United States Patent Application Publication US 2014/0057251 A1 - sequence listing, part 25

SEQ ID NO: 26128 - DNA, 5766 bp, Cannabis sativa
  modified_base (1436)..(1437): a, c, t, g, unknown or other
tgcagaatgctggagtaatgctgaactgatgctgtaacacctgggaaaaaacatgactagaaggaattagctattcaagccacttttaccacattacattttttctttgcaactacgtccacaagctaactttcatcgaccaaatgtcaggacattggaagggccactttcctgctgtggtttctgcatatggtgaacatttattcaaagtttcatttggttgtgctggtgatgaatttagattgataaacaaagaaccatggcactttcaaaaccatcttgttgtgatgtacactccaagtgctctgcagaatgtctcaacgaatgacttgttgtacacaccagtttgggttcaaatttatcgattgccttttttaagcaaatcaaaggctcttgcaagagcattgggtaatctcattggtgagtttttggatgtttatgaggattcacttgatgaaggatgggatccttttctttggattcgtgtcaaattaccgatcaacaaaccccttcctcgtggccgaatgatcaaccttccaaaagttagagacgagttttggatcgattttagatatgagcgtcgaccggagttttgtttcgagtgtggtttactcggacacccctttgaaaaatgtatcaagtttatggagcgaatggataatggtaatgatgatgatctcctatacagtccttggatgaaaggtgccaagcttccttctatgggctatgacaaatatagaacaaatttttctaagggaaatgcctggccattattaactcgccttgcccgtaccacacttacttcaaccattccccgcctaaacactacagccagccctcaaccgtgtatgttagttggatcaaaatctccatcaactttgcctttttctcaacaaactaccagccttcctactgctgccatttctgttcctagtacccaacaaacaccacaaacatccaccttttattcatctttaccacccacaacaaccaatctctccaacacggctagcccaacaacctctctatcacatgacaacaactccctcactgtcacaaacttatctggcattttcacaccagatgttggttctgcagcaagaccatcctttcccatggccactcacctaccaacattaacaccaactaacatgtttcctacccctcctaaccaccttatgtctcctttatctcagcccatatattctcccacaccctctgctactgctactatcagtgtcttccaacctttgtttgttgctgctgcaactaacaaagagaacatcccacctgcttctgtcccaaagagacataatgacacacttaccatgagacaattccttaaacagtgttgtaatcaaagcatagttgctgacccctcccccttgtcattgggagaatgttcaggccaaaatgtttcctatgatgatatgganncggatggcttcattgacaattccggagagattgcaattcattatgaaaatcttgagttggaatgcacggggattggggaacccgaatgcattcaggcatcttcgattgcttgtcaaacaacaatcgccccaaattttgtttctcgtgaaaacgaaacttccaccgaactctatttcgcgttttcgatagactttaaactttaataatggtttggaatcaccacgatctggtcttaatggtggtttgatgcttctttggcaacaaattattgatgttactctacttaattttggacgtactttttttgactgtcatgtcaaggctgaggatgaagctagtttccactttactgctttttatggtgctccggacgctcaaaacaaggctgattcttgggttcttttacaaagactggctgatgtctctcccacattatcatggctcgccattagtgactttaatgaaatcctctccaatgaaaataaatctggtggttgtctcagaaatgaaaaacaaatggaagccttccacaagtccttagatcattgcaagttacatgatactcctttcgaaggtgacccttatacatggatcaaaaaccgggcaggtgtagacacaatcaaagagcgccttaatttgtgaatcaacattgggaaaacactttcaacacacctcaagttcaccatcttgactattttagctcggatcacagagctatttctgctgtctttataccagtagatacacggcttcaggaggataaaagaaagagtagattccgatttgaaaaaaaaatatggctttcggactcacaaagcaaagacattatcacggcaagctggaactcttcctcaaccaatgatcccataaaggctgtgcttgacaattttgaagattgtgctactaatttacaaagatggcatattggtaagtatggtcacatgaagaaaaaaatttctgatgctcaattacaagtggaaaatctgaataacgctcccctcagtactgctgaagcgatgcaaaatctgaagcaatcctggaggaattgttaaaacaagaagaaatctattggtaacaacgttcatggattgattggttaaattcgggagatcgcaacactgagtttttccatgccaaagcttcggcaaggaaatcaaataacactatcaaatttctacataatgcagcgggcattcgggttacttccaaatctaatatgacagctgcaattcacgattcttttacaaccattttcactgctttagatttagatgaggatgctcttgctgctaccttaaatggcatccctacaacggtcacaccagagatgtcctcggacctcctaaagccttttgtagcagctgaaattgaatttgctttacactctatggctcctgacaaaagtctcggaattgatggtatgtctccaatgttctaccaacaaaactgggctgttgttggtgacttggtaactaaggctgttttaagtgttttaaacgaaggtgctgatcctactggtttaaacaaaacacttataaccctcattcccaagatcaaaaaaccacaacggctataagacttttgcccaatcagcctttgtaatgttgtctcaaagcttgtcaccaaagtgcttgttaaccgttttaaacatgttctcccttatgttatctccgagacgcaaaatgccttcttgcctaaccgtttaatcactgacaacattcttatggcctttgagttggtcaatgctatcaagaacaaaactacaggtcgcataggtattgcatctctgaaattggacatgagcaaagcttttgaacgtgttgaatagaaattccttgaagaagtcatgagtaaaatggggtttgctagtgaatggattactctcattatgaactgcttgcgtactaacaatttctcctttctcttaaatggggaagtgttggtttcgcttattccaacaaggggtcttcgacagggttgttcgctttcaccatacttattcctaatttgttctgaggggctatcaagattgctccaacacgaagaaaccagtggtcatctcaatgggtttaaattaactcggcatgctccttcagtctctcacttgttttttgctgatgacagcctccttttttgtcaagcgaatgagtcttcctgcgttgcaataaagagatctttggatatatacaaaagggcctcgtgacaggttctaaattcagataaatatattatgtctttctcgcccaacataacgctagctgcccaagttttcttccaccgacaactatcaatgctaatctgtgagtgtcatgaacgatatctgggtttgccatcctactctggaagagataaaaaaagaatgtttagtgacattaaggagaaaatttggcgactaatgcacacttggagtgaaaaaaatttctcagcaggagggcgcaaagttcttctcaaagccgtgatccaatccatcccaacttatgcaatgagttgcttccgtttacctgtttatttctgcaatcaacttgagtctatgatggacaacttctggtggggtttaaatgagagtggcaacaagattcattggcgctcttagaaacttttgtgtaaaaggaaggatagtggtggtatgggatttcgttcttttgtacattttaaccaagcaatgctcgctaaataagcttggagacttctgcaacaacccgactctttacttgcaaagctattaaaaagtcgatactatccaaactccttccttgaagctaatcttagacattccccttctttaacatggcaaggaatccattggggtaaaggtttactcactgctggtctacagtggaaaattggtgaacgatgcagagttaattgtgctagggacccttggattccaggacattcaagcttcagtccatattatttttttggacctcctgatgcagttgtttcgaatctgatcacagatgagagacaatgggacatggctctgctcaatcaatggttttctccacctgatattgattgaatcttaactattccactgagtttttttttgcaaagatgacacccttatttggcatcccaactcctcaggtatctacactgtccaaataggttaccatttggcagcttttcttgaggatactgatagcagttcatgttcatcatcaactgcctcacggtggaagttcctttggtcgctgaaattgcctcaaaaacttaagatctttgtttggcgtgtctataatgatgctctccctgttgcaacaactcttgttaagagaaaagtaatcacagactccacttgttccatatgtcatcaagcttgggaaaccataagacatgccctttttgtttgcaagtatgctcgatcagtttggagacactctaactttgtgcttgactggaacaactctatgacgatgcgcaaaggcgactacttggtacatttggctgcaatatacacgaaactaaagatggaaccgatcttttgtattatgtggacaatttggactgagagaaacagagttgttcatggtaatagagctaagacagccaaggagcttgctttttttgctatgaattactggcacaatttcaaccacgcacaacagaaatactgcccagatctatcacacttgaatcatgtgcctgaaacaccaactcctgcattgctatctcctgctgcaaatacactaattctgtggactcctcgagcacctggatcactcaagctgaacgtcgatgctgcagttgacaacaccaaaaaagttacaggaattggtgctctaaatcgggactccaatggcactgttgcagtagccttctccaaaccagttgcaagttgctttgaatcccatgaaatggaggcaattgcactgtttcatagtttaaattggacactacaactccaaatgccgatttctcaaattgaaacagatgctcttcgactttctaatgctttatacaaaccttcatctgtaatctcatcttttcaagatttgattgttgatatttctagtttttttgtcctttttctctaatgtaaatgtttctcacgtcaaacgttcagctaatatggcggctgatagcttggctaagtttgcttaagggtggatgaaacttgtttttggttgaattgtttacctccgcctataaaacgtgtttttggttggattgtttacctccgcctataagctctgttattgtaaataaccttcccatttaatttagggaaatttggaaaactatactttaaaaactctaatattttatacctaaaccaatacatttcaaaataaaaaaaatatgacacttttatgaaaaacccaa

SEQ ID NO: 26129 - DNA, 5825 bp, Cannabis sativa
atattaatttagtaggccacatatattcttttgtctttattcttcatagtaattcaaatatgatagttaagtaaaggcttttttatttttattttattttatatagttttacaatatttgtagtgacttgtgattataggttttaacttgttcagatttttttttttttacttcagaattaagccttttaatttccatgtataaataattaatctaattatttataatctacatataaaaaaataattatttatacaaaaaattaaattttgtttaacactgtaaaaataaaggaataaaagcggaaagaaaaaaaatcttgttaaatataataggacaagtatcattatatagacaaaactaaaatgagagtggcatgactaagagcgcgaaaaaagttttagaaggtcaaactatattataaatttaagtgataaatatttttaaaatattttttttaaaattcataattaaaattaaaatgtagaacgtttttcttcaagtcatcaataagtgaatttatattaaattttttggcaatttctctttcaatatacgctagcacacgtaaaaattcatctcccaccttgttgcatagtataatcttgactatattcataaccaaaaaaaaaatcactttggtagctgtaaaaattaaaagtgtaagaataaaagttatcactttatacacaattggaaaaatctctatttttctagcttttaccaactattgaaataaattaaaaatgattgccaaaataataaaatggggaagtttttgcacatgatcaaaatattcaaattgctgtaaaaaaaattgggtaaaatttttgtaccaacttgcaaatatcatctgtttactgagattttcggaaactcaatagaataaaattagaactaagaaataaatcaagtagatgaaatagagatagagatttttacgtggtttaggtattaatgaaccctagtccatgagtcaatctattgggctaagtagccttgaagtacaccaatgttcttaacaagcttaagaaccctaactttttgcagtagtattttagtaatgaatttctaatcctttacatgaaagaataatatagtatttataggcaaggatccgggtatgggcatacccagaacttgttagggtttgcgtgtaacataatccaataatgtggtaaatacgtataatacattgacataggggccacgaattgaggcccaacccatgggattgtgatctttcgtacaacaaggaccacttgctgccgacagttggcatgcatgtgttgtctctgcgcactgtagctgtcagtagtagggttgtacatgatattttgtaaactgcccaacccgaataacccgtcctaaccaaatcaatataactcgttgaaatatacaaactaaaaaacttgacgaaaatataacccgccaaatctttatattaggcgagttgaaaataatatcaacctgcccaatcaacccgaagtaacccgaccattgttgcccccaccttcgaatggtagtgcgtgtttatacacttaggaaaactttcataaagctaatttacttttagaaccttaaggttacagctctaaaacgacttggattattcggactttgattttcttactctaaaaaaattctttttcaactcattctaaaagttagaaggcgaaacttcttttgttaacttgaattaacttaaatgagtttttaattttaagttatggtaagataacaaaacttactcatggttttctgaggttttggttccaaaggcatgaaccttgtggatttcagtttgtgtctctacttccaaatttagttaatattgattggtcaattattaatcttaaatgtggtaagatatcggcttactcttggttcctcgaggtttgagtttcaggctgtactttctactcccacactgatgcatattcacacttcaaaaaataaaatagcaaaatataaaataacaatttttaggggtacatagttgtatataccacccccaagtgagctgagagtttagactcttggtaacttgccacaacacaattgaaaattttaaaaagactaccttctttgaatgattcctctgctttcatttagttgtttcgccctgaggcttacatgaaaagggaaaaggaataatgcgtaaaaaaaaagaatctcgatcgggccactcccagtttactgatagtatcagtgcaagtagttcacattccacgctcgtagaatttttgatttgtctagcctttttaattggtatgttctgatatgcatcttgttttgtatttcatacggtccttcctagttaggtccaaggacccccactcttggctcttgagatgctagaaatactctccttaagatgaggtttccaactttaaatgtttagatttttactttcaaatttaaatgtcgggaattttgccttgatacatcttaagttggacttaagattgctcacggagctcttccatcaaattcaaagattcttgaagtaaagtgtgattccatgtaggatcataagtctcccgtctatgagaaggtacaatattttagactaggataactgctttgcacccgtatgtcattaagtacagagtatgccacattgaagctctctttgtggtctggtatgcccaaagacctctaggaagttctcccggctagtgatctttgcatgcttgaagcttattcttcaacgttatctttaggattttgttgacggcctccacttgtcccttttcatgtggtctagccacagatgagaagctctttatgattccgtgtctaatacaaaaattagtgaagtgatcactgtcaaattgcttctcattgtttgataaaatcttgttcgaaaggtcgtatggccatattatgttcttgacgacaaaatccaatgcctttttggaggtaatcatgttcataggttctgcctcaacccacttagcaaagtagtcaacaaaaacaatagtgtaattaactcctaattttttagttggaagagagcctaccaaattgattctgcaaacaacaaacggacaacggctgttcttgagagtgatttcaattgatggagctcacagaattttagcatagtgctagcattgctcacacttttagatgtagtcaatgcaatcttttttcatggttgggaaacaatatctttttcagatgatttttttttgacaagttgggttctgaagtatggtctccacagaaaccttcatggatctcagcgctaatctctattctagaaatgcacttcaagtatggaactgaaaatccccttcaatataatcatccatccataataacatatttgagagcctggtattgaattttcctggtggcggccatatcctccggtagctccttagagttaagaaattataaattaggccaatccagaagttggagtggtcgatgacatttaccaccagtgctccggtacttgaaatctctaggtgcgcaatgggcactactctgtactgcttgatttgtgaatctgtttccaactttgccaacatatccgcgaaggcattttgatccgtgaggactgggcagatggtgtaactcttaaagttttgcaccagctctctagatcaagacaggcatgcaaccatctttttaccgtttgcatggtactctccgaatatataatttaccaccaacttggagtcactatgcactttgatgttttgggcccccacttcttttgccaagtgcaggctgacaatcattgcttaatgttttgcttcattgtttgaggttgtgaatttgaaatgaagggcactttggatctgatacccttgcaaagtaattaagattaccctcattttgacacccttctcattcgatgctttgtcaacgtaaattttttcagatttctcgttccgagactggctctttcggatcgtcattcattctggtatattccacaatactacaagggtccaccctttgatggtaactctaagctaatactgaatatcaaatgggctaagttccatggcccattttaacagtcttccagatgactacggatctcgcaacacttgttggagagggtgatttgtcagtactttgatggcatgggcctgaaagtatggtctcagcttccgtgaggcaattagcaagcaataggaaagtttttcaatcatgggatatctagactccacgcccaacaatctcttgcttacataatacaccagaagttatacctttccttcttctcccactaaagcgacacttatggcatgatctgacactgccagctataggtacaatgactctccctcaactggcttggataaaattggagctttagccaggtgctccttcaacttttggaaggcctcttcacactttgtaatccactcaaaatttttgcttccacgtaaaacattgaagaacaagatgtatttgtctgtcatttttgaaacgaatctgctgagtgttgtaatccttttagttaacctttgggtgtccttgtgttttctgggggacgaaatgcctagaagggctttgatctcttccatattggcttctattccccgagagctgactatgaaacccaagaatctcctttaagaaactctgaaagtttatttcttagggttgagcttcattccatactttgggtgatagcaaaggcttcctccaaatcattgttgtgctcttctgaggttttgtatttcaaaagcgcatgtcgtccatgtaaacctctatgttcttacacaggacatccttgaacatctttttcactagtctttggtacgttgctttggcattcttaagaccaaagtgcatgaccacatagcagtacgctcctttatacatttgaaaacttatgttcttggtctgctacatgcttttggatttgattgtagctggaatacacatccaagaagcttaataactcttatcccgacgtggcatctaccatttgatcaattcgtggaagtgagaaacagtcctttagcaggccttatttaggtctgtgaagtcaatgcacattctccatgttctgtttagctttaggaccagcactggattcgttgtccaaacaagatataaagcttcacgaatgaactctatagaggctaatttctcgacttctttctttacagcttccgctgaaaccaaatttaacgatcttttcttctagcagactagagtcgcattttcatcgatgtttaaggcatggaagatggtttttgggttgattcctatcaaatctgcatggctccatgccagtatgtcctagttcttcttaactgtggatacaatttgctccttcattgccggagacaaattatgtcccactttgataactttggtggggtctgttttgctaactcaattgcactactgtgttcctaagatgaagtatgggctagtcctacgggtaaacgggtaacgaacaagtcaaagaacccgtatagtacaattaggctagaacctaaccatctcaagattgagatcattgatctaggatcaactaagtgatatttacttagaaaagatattactgtaagtttatgatatattttccactataaatatcggtccagtctgatgtataaccaatagatccaatacaagcttactttgctaataccttggaaaagacattccacgtatgcaagtgtaagtaaatcacattgttaattatcatatcagtgtaaatccagtatactgataaatcatgaaattaatttaatcatataatcatgattaatttccactgtgttgataacacaataatcatgaataataatgtgatagagatttaatagaatttatatatc

SEQ ID NO: 26130 - DNA, 3987 bp, Cannabis sativa
gatttttttgaagagttgatattataagtttgagatgattttgtttttgaagaggtgatgaacaatatataatatagatatatccaacctatatttatatagtggcctatgcaatgaaggatctgaggctcatgtctatgctcatttttttttgatgtttacaaaataaaaattaattaggtagaagaaaataactacccaccccttttaaataaatatgtatagttatatttgtatactgtattgttaggatattttattctgcccctgtttgaatgaagtctagcttggatctaccagtgaatatatgaattattttttaataatataaaagccattgatgagaatttttaaaaaataactataattaaatattaattttaaaaatatgaattttaaaaatgaaattttaattaaacgatcaataataaaagaaaattttaaatttaattacgtgcttaattttattatttaatttaaaaaatattttttttcataataaattaaaaatatgtttacatttaacattattttgattattttttttttattaggttttcatatttattgttaggtttatcaattgttttttctgataatcttagagttattgttttgtatttcaagattttagatttattaatttctgtgctgtttcattattctcatgtttcaattttctttttctttgagagatttcaattttaagattttgccttggctagttgatgacagtatgatcgatgtttgggtctaactggtatttaatttagttgccggaatgatggcaaaatgatcgaacacatattattgtatacgagaaacgaatttgggtgctaattaagttgtggatgtttttcgatgatgagggtggtgacagattaattaagaggaggccatttttacggtgtaagttgtattattaattatatttattacttttatttcttttatagtaattgtaattatagcatatttaaaattttatatttataagcatatttacaattagtttttatttgtcagatttttatttttacatttatttagtctttttatgtgataaaagtcaatttatttagatcaatttgggttattttttatttttcaatttattattttttaaatagtaattatatacttctttatttacaacattttcctatgtttgtttttgactttcttccaaataaaagattataattatttttttgcaatttaatagtttttataagtatgatactatttttataatatatatatgtaataggttttattagtataattttactgtttttgacattttatctttaatgatatatataatttaagaatttaattgtattttaatggctgagccaattttatctcgtgattgatttcagttttattttcaatatttttatttgatattgattattatatataatactcttttagaaaaagatttatgaaactcattaaattacattaaatgaaatttatttttacattttcttttaagttttttcttaccatttataattatatgtaattatcatttaaattactatttgtgagaccacacaggtttttgtactattttttcatagttttgatgccttttacagtttatgtgtcttttatggcgttttgtgccatttattatggtaggtccctatttgtttagggtatagttttgtgttatggttaataggcaagagaagtgatacattctgtgctcataattttcacttcaacgacctttcacttataacagataagtatttcaaatctttctaactccttatactccttatatttaagagggatttatttaccatcgttctttcacattacttttttttttatatattgtgtggtaatagagtttatttttcttattttgtaggttattttgtgaagggcctacacttaaagagcatttaccgataaatttatttttaaatataatctagttgacattgattttcaacaattttaaattagggtatgctagtatgttgttgttactggccgtaattaccttttttggctagttttacttagaaattttgttggtgttttaagtttttgtaatgttgaactagtgatatgggttgtgtgttaattctatttttgttttttaatttttattttgaagattgttattctaatataattgtgttttttagtttggtgtagcaatatttttttcagatttgctagctctagcgacaacttttaattatgagaaggtgtttgctgtttgaacacgttatagctttattgtctatatttttgggggcagttttgtcccatgtggctcgcgatttgttttctacagctcatggttggcaaacacatgccctttggttagacgatgagctatcctggttcaaggagaccgattgtggtttgctgctttgttaatcatgtgtgactctgttcaccacatcaaaaaaaaaaaaaaaaaaattacgcataaaaactcaaattttcttaataatacacattcatgagtaatactcatttatagtacacttatatatattcatatttatatatgattatttttaaaataaaattatatatattggctgtttttttttccttacctactctaattaatgtgtaattaatcatatattaaatatataccttaattatttttaaattattgtatggttgggaatcattgcctataataatggatagaaaagtgggaaaccctcaccgagagatggagccaattcacaagtagggggcaaattgttaacaaatttattttgagggggaaaattataaaattacatattaacatatttaattatatataatgtatatatttatgatttataattaataaaataagttgatttggagaaatttttatttttatggtttgaatttttttatgtcaaaaaataagtattttagtaaaatatcagatattgtttttttggttattttataatttatttatagttgtcatgagtttagatttatcaatatttttagtttagttttatattttatttatagttgttgtgagtttaatttgtcattatttttatattaatttcttgcttttttttttgaaaaaagttgtatttttataattttaaatctttaaaattataaattttgtaaataaaagtttgatactgtaaaattataaataaaacacaacaaacaattatttttgaaaacaagaagccgatcaatgattgttttttttttttttttttgtctttttcatataatatatatatatatatatgtacatatatatttgtcaaattgttcatttttcaaaacaaaaaaaaaagtattattgtcaaatcaatggtttggttggaggaataaaagtataagtataggcagtggcggactcaggatttaatcttagggtggattcagttatacatttaatataatacaaaataataatttacaagctaaatttaagtggaatgatgatttagcaacatcctcctactctagtagtcataagttcaaataccttatacttttttttgtttttcttaataaataaaatgtagacacacataaaaaaaatgggcaaggttggggattcgaaacatgaaagcatcttaacaaatttgttctatttaactactatatatatgaaagcaacaatttaatattaatatattgggtaaatagcggcataaatacctaaagttttaaatttgtaagcggcataaagccattatttatttttagtggtatattaacacagagactgtactaataaaactagagaaaaattatagttttacaaatattgagtatttatgctgctaaaaataaatagtaggtttatggtacttataaaacttaaattttaggtacttatgccgctatatatttatcctaatatatttttaaatctcagggtgggctttagccctccctcaacacccttaggtccgcctaagagtataggaatgagaatgtgaataaaaattgaatggaattaaa

SEQ ID NO: 26131 - DNA, 1230 bp, Cannabis sativa
caataactaatgtgaaccaatcaacacgctccacattgctttgaatttcacgagcaagagctttggtttttcagtattaattgtatcattatgttcttgtaccttaaaagtttgaccaaaatgaataatgcatgaattgactaaataaatgaggtgaattattttccaaaattaaacacactcagtcattactcatttagagtctcagtgtctcaccaccaaataattattttgagtaaatgagtagagttatttatttattgatatcctcaaactcctaataaagatggttaaaagattttcgaagatgtagaatgaatgtcctccgagtttcaactcatttctgactctgccgtttgattgagttgttaccggatttggatattgagatatagatccaaatgtaatttgggcctacattgtgcggcccacttctaattaactcaaattatatattttacatttttacaatattttttgaaacaaaataaaataatatataaataataaaaatattaatatactatattttttgtaaataaaatattaaaagccataaaaatatttaaaattctatacaacccgtatttttataattttttattgagaaattacctcatatactatttttaaaattttttttttcaaatttatggttcgggtttctaaaatagtcaccgtgctagttgcaataggggtttctatacaattttttgttgcaatttattttgcagcgctagttgcaataagaatttctatgtataatttcgtaaaaatacaaaaaaaaaactatttaaaagtgtaaaaatgaaaaaatatcttttttatttgcccaagaatcatcctaccctaaataggctaaatttactaacatcaaataagaattctttttgggtctatatgaatttctttggatgtaattgaattgggtatggcttaattcatggatatgatttgtttttctcttttctttatgatctgttaatttaccaagtgtatgtgtatgtgacgtggtcaatggtcaacttttataatattagtaacattttattttggaggaatgaagatactgtcattctccccacaatttaagatcacattgaaaatgtaaaataacgtttggttagatgattaaaaagtaaattaaaataataaatccatatccagcaagcagtgtactcaccaaattaatataattatatactgctcaaaaaaacctttgcctaaaaa

SEQ ID NO: 26132 - DNA, 3571 bp, Cannabis sativa
acatgataataacatgcaatgacattagagagcaagaaaatcttaaaagtgtgctagcccaggaattcaaagtgaaggatattcaacctatgaaatattttttgggtatggaagtggcaggaaataaacaagaaattgtggtctctcaaaggaaatatattctagatcttctaatcgggccaagtctaatatctactttgggggtgtttggcttctgtggcattaatcggtctttgttattgctgcttggcctcacgcaagccaaagactactcctaatcaaggacatccatggcttcttctgcccttgtatggtaactctcagaccatgacaaaaatgtccacaacttcgcaaaaaagtgggacggctagctgcatctcgttggcttcatccaatctcggtcgtacttttatgttccaatagatcctagatgttgccaacaagtttgatgagacactactacttggggttggtggttttggtagggcttacaaggtaacacttagcagtttaaagagggaagcccatatctgaacagtcttgctgagttcagatttgagattgaaatgctatccaagctttgccatcatcaccttgtatctcttattggatattgtgatgaaaggtcggaatgattcttgtatacgaatacatgacaaacagacctctcgaaatttgtattggagctaaaagggggctccattatcttcacactggggttgctcaaagcatcattcactgagatatgaagacaagaaacatcctcttggatgagaattttgttgccaaagttgcttattttggcctgtcaaaaacaggtccttcccttgatcagacccgtgtaagtacagctgtgaagggtagctttggttaccttgatcctgaatacttcagaaggtagcaacttacagagaaattagatgtgtattcatttggggtggtactaatggaggttctctccactagacctgctctaaacccagttcttccccgggatagcagaatgggcaatggcatggcaaagaaaggaatgctagatcatatcatgaacccaaatttggctgggaaggtaaacatggcttctcttaacaagtttggcgagacagctgagtacggtgttgacaagccgtctatgggtggtgttatggaatcttgaatatgctcttcaactggaggagacttcatttgcactcatggagcctgatgataacaacacaaaccacatctcagtcatccaattgacccccatagagccatttgataacagtgtgagtatgattgatctcggtgactgacaatgatgcagaagatactgccacaagtgctgtattttctcaactagtaaatccacaaggaagataagaacaaaacactcttttggatcaatgatcttgtgcgacagtggatgtccatagaataaaggttatttctttatattattctgtttcagtgcctcattttcttccatgattattttgtaatatatagatatggatggtgccaattggctcgacagaaattgcattttcctgttctttattagaattatattgttgttttgatacaatttatcatagctcttcaagtttcgcaaagatacagattgattgtattaaccttcactattatatccacattcaatgagtatagaaaataatgtagcatttgtgatcaaaaaagaaaaagttaattcaagcataacaattggttactttttctcattcaattcaaatagaaaaaaatgtctaatcaatttggattgactttggttgatatgatttgtccttgcactctctagatttacaatagcaaatatgcttctgtttcgcatcatgaccattattgcgaccatctctgtacttgtatgttagctcttgatggaacatgatatgtttggttgcaaaaaacattacatgaggtggaatcgatttatcctcatgtttgtatacaaccattactaaatgtagatttggtttgtggcatcgattgttgatgaattgtgccacgttctcaaagattgccgcatctatagtgaatgaacgctcgattgggacaaagtagtcatcgcaacacccccgaagagtcctctcaagttgacttgcatggaagagttagccaacatatttgcatacgaaagctcctttgggaatattgttgtttaaagatgtcaaccccatcccttttttcagttttgaaaacttctagcctataatttatgctataatgactgactttgttgtggcaagaagaaggtcacttgcatgaattgccacactcatagataatggttctttcttatcatcttcatcatcaagaatctcattgggttcatatgggaatttatcctcatttttaatcccacatgaacacatttttgaatctgaacaaccatcttttgttttaaatagttggttttgaaacttcttcaatactattttttgaataaataagggttctttcttatcatcttcatcatcactaaatgcaagaatcccattgggttcatatgaaaatttacggtttagagttagccaacatattcacatatgaaagcatatgaaaattagacaacatattcacatatgaaagctattgttgtttaaagatgtcaagccccattcctttttctcagttacttatagtttataatttatgctatgctgactaactttgttgcgataagaaaaatggcacgtgcatgaactgccacactcatagataatgagttcgttcttatcatcttttcatcactaagtgcaagaatctcattgggttcatatgagaatttaccctctaatcccacatgaacacatttttgaatctgaacaaccattttttgtatggaatttacccatttttaatctcatgaacacatatttttgaattcgaacaaccatttatagttaattctaaaacttcttcaatactattttttaaattattcacaacgaggataggatgattttcctcaatctgagatatgtagtttctctatcaataaagaacagtgttattttctgcgtttgaactttacaaaaaaaatttcaataaatatttcattactttataataataataataataataataataataataacatatagttttcataatacttcaccacacatagttattttcataatatttcacaactttataataataataataataataaaattttctttaattttgttattttattttttttttaaaaaaaaggataaacttcaaatctatcattacacgttttttctaaaatcatatattattattagtcaatttttctatgtctttttttttttttaaagtaggatatcacatcactttgaaatctttgaaaccatattttttttttcaaaacttaaatattcataactctaaaatcttcaaacaacacgattattttttcatatgatatattgtttacatttttctatactaggtgattctagtacgtgcacaatgcacgtgcttcgctcttcttgttttatgttatttatattttaataagtaatttgtgacataaatatctaattttaacttaaataaatacttaaatttaatt

SEQ ID NO: 26133 - DNA, 2599 bp, Cannabis sativa
tttttgtggtgacttatcatgtctgaatttcttccaaatcttggttatattttcttatcatcaaaagttgcaacttttttctgaccaaaactttccgagtaaaaagtacttgtgttatccttatctacacctttttagcttttagagtataagattactgttctcttctttgatttgcatcccctgactgagtaaataacctttttcagcttggtaaatttgttatttaagtcgctgatttacttactctccattaaaactgaaatgagaagtcattaaaatggaagaacatgctcatattggagtagattagttcttcgtcagcagactcactactaaagacttttaatactctttcatctttgacagtgactgagcttgtggaaggtgattcatccagaaaaattgttgagataatatgcaggaccagttggttgaaatctgagaaccattgtggtagaattgagagagttttgaaagttcacaacatgcaaaaaactcttgcccgattcgaagaacacagagagatggtgaagatgaaagccagcaaactcgccaagaaacacccacggtgtcttgccgatggcaatgaacttttgagattctatggcaccacactagcatgctcccttggtctaagtggttcatctagtttatgtgtatcagaaaaatgcagtgtatgtaggattataagaaatggcttctcagctaagaaagaactcaaggaaggtgtaggtgtgttcacaacttcaaccagtgggagagcttttgaatctattgagataattgaagaagacccttctttaaggaaggccttgatagtgtgtagagttatagctgggagggttcataaacctttggagaacatacaagagattactggccaaattggttttgattcattagctggtaaagtgggtctttactcaaatattgaagagctttatctgcttaatcctagagctcttcttccttgctttgtggtaatttgcaaaccttgagagaaaggtagtggaaattggaaagaaaaatttgcacatgttatattattttgaagttatgtgaatccttttcttgtttctatttgttagggagttttagttctttctgtgtatctcttattttatgggaagaaattatgtttattctttcaactctctgttgttgtctacttagcaatttattagaacctgttctttctttttaccaaatatgcaagttattgccaaaatattatatcagtatgttattaaaaacaatgactataaagtttattatatagaagtaaatctcattattcaaattactattattattataataattatacacttggatggctctttgagtggtcatagttgtcatgtcagaatactgttatttgaatcttcaaacatagcaaaggttgctaccttgatttctgatattatatgcaataaaatacacttggtttcaacgagaaaacaagtacgagaatggtcacattattagttatataacataattcctggatcatgatggtttaaactttaaaggccaagtaaactgacctaagcgtgagcagttcctagcatgttcatattcacatatataaatatttttttatatttataaattgtgtattatcattaaaatgcgtacttacaaaaaagaattggaatctaattataaaaacaaataattattcactatagagaaaaggcatgtggcgtggtccatgaaagcgtatatgtatgtttcaaaagaaaaatccaatagagaggacaaattacaagcaggaatgccatatgtcctctctccagaattttttttttccctttttctattttattatgtaaaaaactttataacccttctttttcatctcagttttgaactctttttctcaatcttatagaatccatgtacaactccaaattcagcttacatttatgataaggcaaccacacaaaaaacaagcaaaaagaaataaattatagataaggtttctcctttctatttttaaattggttataggttacaatttgaggactgtggtatagttcttccaaatgaaaaagtctccacattttttttatcattattaaaaagttgtttgactcgcggatgcaggtcctagaagactttcctgtctttctaggaagggtcttcaggaaagctaactttcctccagaaaggaactccggattgctagttgttcttcctagaaggcaattccagatagtcgatttcagttggctcttttctattcgggaaggttcttcagcgagtgccttggaccgtgactccggaagccctcatactcgctccaggatacactcttacttatactgacctagagaccttgctcaaaggagagttggttaagttagttatttcctaactaatttaacagtctaatttcttctaaccacctactttaggatcttgatcctaagcatataaataccacaaacacttatcttttcaaaatagaggatcagattgagttgagagtaagagagagaaaattgagaggtagagagagaggtacaaagaaaagagagagattgagattgagttttgtaataagaatcttttgtagatgaagaagattctt

SEQ ID NO: 26134 - DNA, 3782 bp, Cannabis sativa
  modified_base (1941)..(1962): a, c, t, g, unknown or other
  modified_base (2889)..(2890): a, c, t, g, unknown or other
ggtttgcattgtattatgtatttccagataaattccggttgatcatacatatatgcccctcaagtaattttaaaaggttatgctttataattacttgttgaaagaaacaattactttattcacaactaaagttcaaaatattacatcagcgatgcgatttagaatcattaatctcgtaagaacttccctagttcaactgtttattttatcaatcttccagaagcatatctggttttgataaaacggattcttctgatgttcagggtcaatccctaacatattcccataattgtttcaacatctagggtcgatccctgtcatatctcggggttctaggtgaactaatcctagttttagttatttgtcttcaactgctaatggttgacgaccagctttcccttgtagcagctcgatacggcagccatagtgagtcggtatttactttcttcacaatacttttacgtgattgctttatcggattaactgccccttgtcttcttgcaatatgttccctctcaagagaaccgagctattccttcctcctacagaggaaggttatgacccccggtcgcttgagttattgggtggatcggactgatcatgggcattgtcctgcccctttacatgttgttgaaagtgtcctcgcgctatgagaccttctatctcatctttcaacttacgacattcttccgtggtatgtccaatatctccatggtattcacatcgtctggttgggtcccttttatgtctcgcgtgtctcataggttttggctcgctaaaaacgacttcctgtacatatgcgaggtagatattttcccgagtttcattaagctcggtatagtcagtataaatgggtacatatttattgtgtttcttttgtttcttatcgttggataactttttaaagttgtctttcctttttgacccggaagtctccaacttaaattcttcaacagactcacatccaatttgttttcctgtttcctcaacttaaagcctcctgaacttgttctccaactcgtctattcgcaaatggattgaatccctttgctttggtccaagttgttgacgaagatcaggttttttctggttcaagcattttcgtaagtccaattggccatgccgattggctaatctcgttccacccatagaccgtattctaccttttttatcatcgctgcgacgagcgttcttttctacttgtattgatcagttatgaattaccatgtacctcgcggtagctctcgcctcttcacgtcctgctcttcttcctaagatttgattcgccttgttccccttatagggatttatgcgagctcctttcatatgagcttggggagaaggttggcgattcctgactgatgatccatatatcccaggtcgtatccctaaatttcccttattcctatggggaatttccagttttttggttcctggttgattatagggcatctcaccttcaaggtatccctcagtttcctcaggttgcctctcttgagagttttggggatacctttgggttgtcttttgacccttgatttgtgagtcacgaggttttccttgtggatctctttctccaaggtcaggttaattttgggaactattctcttgtgacaccctgactgcagctatctcgtgctctaattcagcattacgccagtttgcttcatccaatcggcgcctaagaaggcagttttctaactcaacgatgggtatgtacctggttgggtcataggtgccatcctcgtcaacttgattataaagagaccgactgttgcttatcctaggcccttcgagtctaagtccccaatactgggtttttccagagctagtggcctgttcagatgataaatcaagtgatccttggggactcaatggctcttttctaggagaatgattggttctttcatgaggattattttttacgtggttttgcagttnnnnnnnnnnnnnnnnnnnnnntcaatcttattagatttttgatagtttttcagggcctttttcacatgattttttttgtgtctcccttttttgatctaaccttccactatttataatcacattgtaggcagttaattacaaggttgaccgatatttttacaacggttatcccctgaaatcatggggtctgattgcatatcacgtagtataaatgcggtgattatttgaatatcacacagctgtaaatatcccgcttttattgggtcaaaataaatgtgtattaaacatgttgtaaaccatactgtgttggaatgtctcgctgggaatagagtagagtcaatcttgatagcgagctggtgtttgtcatatttctttctaaggttgataatgcaagtcccgtcgcttttactttgaaaacataacattctatctaacaatcccagtttctgatgatgagatgatcttcttcgtgtgcatgtcttcctatggcaaggtggacgcctcgctatcacttgctttggctcactcatttgttatacttagtttgtatattgtaaattatacactaagtgtcttcacagacaatatatctcatccacgtaatcgaggttaatgcctcgtcttatacatctgaagttacacggtttcttgttaatgcccaaggcaacagtttgtatatttttgtctcgcataagactattcagtcagctgagttataaatataatctgttagttatgctcttaacgagttattcctcctcaaatataattatgattacatgtctgagttcatatttttcccagctttacacgtgtcttcctctgatgtgttagccgaattttgagtataacaatatattttgtgcccgacaacatgggaatgcggcgtttggcctttagaatcacattttagtatttttagtttagtggggcaatatagttagacanngggaatgtcaggattagtcgagatgttggaattgaccaaattacccctaagtgttaagtgtagtttttagtatataggagggaaaattggtctttttagccatttaggtttttgtcttctagtgagtttattatgttttgtaatctcattttttaaattcaatttagttaatatactttgaatacctcattttatccaaaaaagaaaaatcaagaaaaaaatcaaaacactctttccttcttctctctctttctatcgaactctctttgaaaccagcagaatctagggtttcaacagcttaattcaagggatcttagctagttcttggtgattccattgaaggtaacccttatagcacccttccttttgattttcttaagctttaagtaaagaaattttgcatgaattatgtcttaggatcctgtttttgttcttgctgcttgagtttatattctgaggtttgaattatgttagttgagctgctttgaagttggtttagggcttgttgtggttgttagacaaagtctgagtttaagaacttaaactttggtctttaatggtgattttttattctaagtatgttgtgatgttttgttgcatgaaatatatttattagggtataattagtaggtctggaggttatggtgaagtttgggattgatttgaggttgtggggtaagtttgggtgtttcctgcactaaactagaattctggttcagggggacctgtaggaatcaattgactggttggtccccaagaaaccccacggaaccagaattaccgtcggggaaccggtctaccggttggggcatttttgggaaccctagtatttctcatttttgtgatatttagagtattgccatgttattgatcgatagggaaacttttagtt

SEQ ID NO: 26135 - DNA, 4290 bp, Cannabis sativa
aagagttgttgatcgagagctgacatataacaactgaggggctagcttctgcatcagcctgagttaaagaaaacacccttgctagagcatgttttgctattgacttctgttcttctttcttaagctccatgcaatctcttttatacagtcctggaaacccacactggacacatccttgccctctactctcacccagatgatacttcttacaactgggatactccagttgtatcggtttcagaaccaccctgatagttgcctcgaccctagttcccttggaacctcttattctgacatgagccaccgggtgcagatggtgcctttctcttttttggtcagtggtcaagtcactatcacccctaccataactaaaggtaggaggagtaggggctccaccaacaacttgagtccctcagaactcctaggtgcacacaattgcgcccctaactcgtagtacctttcccacatattagcatagatggtgttgtcgtcagtagtaatcgcaagattatattttatttttggatttaatccatccaggtacttttctctcttgctgaaatcggttggcataattcttaaggccaacctagccaatcgatcaaactaagttgtgtctttagtaacactcatattctccttctgggtcagctgggtaaattcttttctttttgcacttctgactgcctcgttgtaaaactttgcattgaacaactccaggaactcttcccaggtaactgtagtaacaacacaagtcagggacaccatgtcccaccaaaccagggcatcctcttaaaactagaatgtggcacaggcaactctgtcattgccgatgacaccaataaaattaaaaattcttataataaccgccagcaactgcttggctttcatcacatcaaaacctccctgaaagagtggaggtgcctgcttgcggaacgtttcatagagtggttacattcggttcactacaacaatcggccctgcctgcacagcatgggcatgagccacctgcacttctggagcaggcattgcaggagcaccttcctgcctcaagcatctttacatggccgagatacagaggattatgagaaggacgatgatggtgactactataaagatggatattataaagatggtttgtattatgaacatgaccctagtctggggcaagtaaccgaagagttggcggcaacacaggcgactctagaacaacagcagaggcttactgccaagatgaaagcgaccattgagcaacttcgaaataaattagatggtttgattgggatagatggagaaccatttgtggaagagatgactgaagggtgaacccacgtgcaaactaacgatggaacccaggaccttcgcatggataagggtaagggaaaagtaggtgaacccttacctcgtcagaaagatgcgcctctggtcgggcaaccctcgaggacgcagaagcccaccagcgcttttgagcctggatgcccttctgaccctcgagacagggttgcaccgaaaggaccagcaacgaaaattcctaagcctagaagacgagtggatcctcctagtgatttcgtcaatcaaactactggatattcttttttatatatatatatatagtttatttatagttgtcatgacattgattttcttgttttattgtgttgttttatagttcatttataattgttatgaggttaatttctcgttattttttagttattttctactttttactgagaaagtagtatttttataattttgaaattttaaaattgtattttaaaaaaaaattaattttgtattattgtaaaaaaaaaaaaaagtataaattcgaaaaacatatataaaagaaaatatctataaaaaaatcccccaaactattgaaatggtaaagttttgtttttttttttgtctttttttttctcacaaagcaaagtattgccttgtttttcttacaatgctcataatcatattttatcatataaactaaatccaaaactatggcaaactgaaatcattactacatcataataaagttttaatatatacatatatatacatattataaaaactaataaaaatagtagactgagtcacaggtagaaaatagttagaaattatcactaatttcctcaacaaaatgaaagtgggaccgatttgcattgaatgggcctaatacaaaaacatatagaatgacaaggcacaacctttcttggtaagtagtacaaatgcattgggggcgtgaggccgactcacataacaacaaccaattaacacagaatccttgttccttctctgcctcaccctttgtaaatgacaaatacgccctcacacttggatatacccttcactatccctggtctcattcttatatacaataatcttaaataatagtcatcaaatgtttctatcgaaagctctttcaaataaataaataaataaaataaaaataataatataaataagatgctatgttaccaataataatatacaccatattttatttattttgttagtacattttcctaagtataatgtttgattgttggctacatagcttattaaatatatggtgttcaattttcttatatacaacattgttactatcattattatattttgcttatcaaggtatagagttgatatgattgaatacatgtacttcttttctccttaaacaagctatcattttttgttttatttattcattattacttttttaatttcaacaacttgaggttaaaaaaatattttcaaccttatttttagcttaatctaacatttctcatacatacaacaggctgcatccaacagccaccctaggtttgtacaccaaatacaccctattgaatcatcaatcccacacgttcgtttgtcttgctaaaaatatccccaccccaaatcaaataaagaaacccaataattatttattgattgaaaattgattaattataaacaaaattagaattaaaaattaaaacacattataagctgtgcaccccctattttttttcttcgcctcagaacaaatgtcggaacaacaaaattagccattgctatatagcaccctctatatatcgtgttcccatatttaatttcacttctaaactcctctctctctgatctcttgttctatttttatttctcttttttcatattatttttggtagttatcaaaagtagcagaagttatatttgtttttttttcccaaagtcagaagtttatatttggttgacagacacacacacatatatatatataaatatatcaacatgggaggttgtgctacaaagccaaaggttttgaatcctgagacagcggccgatgtgcccgcacctgttcctgagccagcggccttggaagtagcggtggctccagccgccaccgcagacgtaggccctggcttggctgaggagacgaaggagaaggaggtggtggtggctgaagctcatcatggtggggaggagaagaaggttgaaattgaaacagatgatactgtcaaggagattgttgatgatgacaaggctagtgatgaacaacaattgcaacaaggaattaagcccaggtctctcagtaacttgttcaaacaggtaaaattttatatgagtataaattatttaagaaccgtaatattttttttttgtgtgtgtgcttgtattccttacaactattattttttgattatttcttaaaaacggtaaaatgaaaggtagtctttttgatttcgttagttggaaaccttttcttttaggttgttgcttttagaaagatggtgtaatatatttatatatatatatatataattaagaattattcatgatattattaagaaaaattgggtttttataattcattttgttatctaattaaatagtaactctcaattttacatatagctaatattatatggattgggttgtgattttttttttttgattaaataactaaattaaataaattcaaaattttcttttatattattggttattgtatcaaaatctaaatttaatatttatagatttattgataataaccatggttatgaagaagtgttcttatatagtttttggtaccaaaatatttgtgttggaaaaagaaagataactgcaatcagctggctcttgaaattttattaccaaagtaatatatacttgacacatatttatatgtgagattattaaaacaaaacaaaattattttgatgctttgttcacaatatatttttggtgaattgaaacagttttgttttctgatgacgcccaagaaaatgagtgtaataataataataataa

SEQ ID NO: 26136 - DNA, 2212 bp, Cannabis sativa
aagttttctagaaggcctatggaaaaaccacaacccatataggttgtcgggatgtaagttgcgagttggctagctagctttgtttggaagctgcccgacttgtctttactccccctctggctggccagggtctttaaactcttgctttcaggttgtgttattcttctttgaaaccttaagacttggtggtcagggggctgcctaatattaagttgtttagccttctgtaggttgtaagttgtctagtattttacagattgcaaggtgtccatccttctaatcatcctgccagggtcttgttaatacttgtatatttctatttttgctcttgacttgattgagagagatagagattcaaagataggaaagttagtgattttgagagagtgagctgagagagaggacagagagagagagggactgagagattgagtgtgttagagggagagagtgaactttatttttttcttgatttgaactttttttttttattaaacaaggataaaaggggaagaaaatgtaatcaaagtaactattttgtataaattacttaagggtaaattttgatatggagtgtttttttaagcatggttaatgaaaattttcttccaaaattagagttgtagaagtcatatttgctgtctaccatgttataagaaagcttaatagattagtattgatcgcaaacgcaataaaaagtaattagagactataaaatatgaaaaattgattgataaatttgcttcaaagagtgttccaaagatagtcctttttaagtagaaaattgatgttagctctaagttgtattaggataagcaacaactttaataaattagtttgaatatattgatacttaacacaataatattgtaaagtattattagttttcaattgcatttctttttattagaacccaaattttaagattagaaccgacccttttacaattttgatcacaaactatttgattatatttctatgtctactcttgaattgctgttttgttactgagatcttgttcttcagggtgattccaatcactacaatatttttaccaaattctaaatcacggctacttttaagttttaagctggctgaattccattaaacacaaaaacccaaattctttccaattctttcttgtaccttacaaattcgttatgatttatgtaagtaaaaatgctatcgtactctgtggttggtaatgtagttatgatatacttagtatactaccaactactactagtactatggcctgtcaatttcaaaccaacatttcctcaagctaagttacctattgttgaccatttgacattacagaaatgtctaacattgttattgttagagtattattatcgggcactaataatatatagctagcatctctagacatgtcactttgcaatcaactaacgatacttcctaatagttattctattaaaatatatgagactcgatacttagttaaactaatagtaatattaatacataagagagtaataagcaccaccaatactttttaacatttcttctatcgttatatgtagaactcgatatttagtctggaccagataagaggatgctaagaccttctaatcttttagaaagcgatggacacaaaatggagaaccataaacaaactgttggctaaatctacaattccccaaatctgatccaatctctaaaacggctgattgtgattactctctcattttcatcaccaactaatcaaataattcaaacattaattacgtatttctatttgccactattcaaatctatatactcttctcccaataacaaccatcttagtcttatacatacccaatcacgtgactcgcacgcctttactttctctctttctctcatggcttcaccggcaaccgaccccgacgagcctctaactccggcgggaagactatttctccgacaagaaatgaaccaaataatccattgcatcatcggagtaaaaaacccgttcgacattgaagccgtcaagtcccagatccgagactctttcttactaaaacaccccagattctgcagcctcatggtcgttgaccggcacggacgcgagcggtggcggaggaccgacgttgacctcgatcgccacctcatcgttatcgattctcccgtgaactcatcagattcctccgccggcaacggcgatgaagctgctgttaacgagtacctggcggaaatgtcaaccggg

SEQ ID NO: 26137 - DNA, 3325 bp, Cannabis sativa
agttattttgcaatttcagagcacattacattaaacaacatcacacaattatcttctagcttattgccattcctaactaaaacataaaaattgaagcagaaaatgaaaaatttttaaatctttcccccaaactaaatattacatcgtccccaatgtgtacaataaaacgcaaaggtgagagacttacctgagaccctttcaaaaagggttctgtggcggtggctgatcatacggataaaaccgaggaggtggcgccaagtaattcgggtcatcaatcccgatgttcattctgttgatgagagagttgagttgatgaacttgtccctcatcatgaatactctgttgcaccatgtagttctacatgtgattattttactgaattatataactcagctgtgcatgagtagattgcatcaccgaatcaatgggcccaagcagttgtgggggctcttcctcctcttcttcaacactaggctctctttgccgcctttggccttgttgtgcatcaattgggggctgtccataaggatgaggctcttttagcctgttgaccatggtgatgtccatttttcgtagcggcaccacagtattgtcatattcaagttgtggcacatcatacgccctgtagagttcagtgatgacacccgccaaaccaaggccaccacccgtggctccttgaacaatttgctcgatgcttcctcggatgacttgtccaatattaatattgtaccccttcatgatggcgtacacatatttgagtctatccatttggacatcggagacatgtttactcggtaccaaccgagcactcacaaagtacagctaagtttttgccaccggttttatttaacatctgtgacgaatattgggtgacccgtcttgcccatcattgtcatggaatctcaaccccggaaatcccacagtttccgccacatctaccatatcgaattgttcttcctcctcaataattcggaggcgctgttcttcccttgagtaatccgagaaagcaaacatagcgttgaaagcatcagctgtagcgggaaccttcttaccccgcacccttacctccccattcctgcgctcatgccaattggcgagaaattcacatgccttggtaacgttggcccggccactagcatccacaaaactgccccacttcattctttctatttgggcacgaattgtttcgaaccttggttgacgacgcaaaggattttcagggaattcaataccccgatcatcaatgtaaggcctaactttgagcctcatacaccgaatgtgcgctgcttaacttacaaactgggtccgatcgaaacccgtacatggcgggtttgacgatgaacccccttcttcaatgtgccttgttcttttcggccccataatattagaataacaagttttttttttcaaaataattctaattaaaattgggcagcaccttcccttaaatttctattttcttgaaaatcaaaatacaccagaacaatccagataaaaatatacacagtccaaaatcacaacaaaaacccaataatcccactatcaaccaataataatcactattttcacaaaaaattcctaaaaatctttatcaatttctcaaatgtaatagagaatgatacttacaaacccgaagaagcttttactccacctccattgttgaatatccttgaaagcttgaggttgaagatgaaaaacaatggtattttcggatttggggtgaaattgataatttttggggtgatttttgatggaaagtgaagattgatgagtaaaattgggttttgggatgaattgggattgagaaattggtaaaaggatgaaaagatttgaagaatggtgatgaaatttcaaattttcgaagggcttgggcggctgagtggtttttgaatttgtttagagttgaatgggggcgaaaatagggtttttttttatagaattttgccagttagtcgggacgagcccatgggctggtcgcgactagcttgaattcaaattttcatgggtttttggaaactgccgcagttgcgaccatgaaaaagggtcgcgaccagcttaaatgctggtcgcaagtactgggactaaaaaaattctgatggttctgttatttcccaggtcgcgactagggtcgcgactaccaaaaagggtcacgacccaagaacaccatggtcgtgaccactgagttccgagtcctgaaagaattattttttttattttttcacgtttttcacgattcaactggaaaaatataatgtgtggtactttagcaaaaatttaaaatactaaaaacactaacacataaactaaaaacaatagcaaaaagtctgaaaaattaaagaaaaaaacacttgggttgcctcccaagagtgctgtctttatcgtcatctagccggacgctcagttgttcgttttagagaggcgccagaataatggcggacttggcttggtgaatttgacctcccaagtagagctttaaatgttgtccattaaccttaaaggttcctggaccttctcctttcagttctacagctctataaggaaacaccttgaccacggtaaatagacccgaccatcttgactttaacttgccaggaaacaatttcaaccttgaattgaaaagtaacacttcctgcccaggttgaaactcctttctgactaagctttggtcatgccacttatttgttatttccttgtaaatctttgcattctcgtaagccacatttctgaactcctcaaactcattcaattgcagcagtctcttctctcatgcagctttcaagtccatgttgagggtcttcatagcccaaaaggccttatgttctaattccactggcagatggcaagcttttccaaaaaccaatcaatacggtgacatctcgatcactgttttaaatactgttctataagcccatagtgcatcatctaattttcgtgacttgtcttttctttatctatgcactgttttctccaatatcatctttatctcccgattagaaatttcagcttggccattactttgtggatggtacggtcgagcagttcgatggcggacgccatatctcgagaggagtgcttcaaactgtttattgcagaagtgactcccttcatcgcttatgattgctcgaggagtaccgaaccgagtaaatatattcttttgaaggaagagaagaattgttttaccatcattggctggagttgctacagcttcaacccatttcaaaacatagtccacagccaataaaatgtacaaattgctaaaagatgaaggaaaaggacccataaaacctatcccccacacatcaaacaattctacttccaagattcc

SEQ ID NO: 26138 - DNA, 2379 bp, Cannabis sativa
  modified_base (48)..(54): a, c, t, g, unknown or other
  modified_base (384)..(387): a, c, t, g, unknown or other
ttattaccttattaattttttttagttcccatcaatgggtattacccnnnnnnnagtgttccatatatatatatatctatatctatatctatattttatagagttttttgcggctaaaccctctcaactattactctacttgtaattaacactctaagctcaaattttgacggtaaaaccctccaaactacttaattgtttgcaaatttaaggtatcatccacttttcacagtaaactgccaacataagctacttatgtgtacagtactcttatacacgttagacatttatattgatacacttactattattatttaaaaaatataaaaaatatttcaaattttatactatttttattttttaaaatattttattttttatttnnnnaattttatttaattttaaatgaattttgaaaataattttaaataataatatttagtgtaccaatataaatatgccacgtgtacaaaagtatacatataagtagcccatggtgacagttatacccgaaattcggctacgtaccagaaattgacatgtgtcttacagaagaaatgtgaatcaactcaatatatataagaatgacattgcatcatttgatgtaattctctttaaataactaattataattaaatataagtttgatagagatgttcaagctcgctgactatttagtcttatacgaggcaagaataataactattaaactgggattgatgagacatatatttgtctcgggatagatagagtaataaaatgtataagatgagacattcaaggacctcataaatcattaactctctcctgagaagagaagaacttatgatgctcaaccgcctcacggtactcatagcatggtgatcatctcgcatcattaataaataaaaggatgcaactagataaaatatttccaacacttagcgtttttcttattaagatggacaagaaggagaactcatgtttgacgagatgtagccttactagtcagcataaccatctaaagataaaaataaggaacgggtgggtagttataaaatattatcccatgtgtgaataaataaaacgtagagaatgtccacgtttcattaacagttgtaaatgaatcaatcccaaaaggaataactgccaacctatacttctataaatgggggcagaattcatgggaaaaataacgataaaattgagagaaaaaatcttattattttaaatattgacattgtattctgaatcctagaaaatatctctaataataaggactcgtgaaatatatagattttaactataaaactatgttaaatatatggtgttatttattatcatttaattctgtagtatgtttattgcaaaaaagactatttatttagataatgaaaatctgcgttaatagtttggtactttcattgagagccttggtgataaaaaactcagaaaaatctctcctaaacacaatctacccatattaaatggccgataacgatcaacacaacgataatcgtcttgagaaaacaacacatcgtcctaacaaagaatctatgggatctcaaaaacccaacacatctcaaagagccaagtgcacatacacacaaatacaatttttataaccttatccataaattcaataccatgagcagtcttaacaaagtggcacatataccaacataattaaaagctattaattttaacaaaccaaccacacagtaaaaaaatgacacatattattacataccacaccaaaaaaaaaaaaaaaaacaattgtgatatatctgatttcatatatgtgatatcaaaacccaacctggctagctgttttccacttcaacttcatcacattgtcaattttcctcttcatcaactttttctctgaagtagtctcccaaaatcttttcctcatctcgagtttggattcatactcttccatcttattctgcaattctccatacacaccattcaacttctcttgtagctttcccatattattgttgattacatttggtatttcatggtcaagtaatttactcacttggacatagaagaaatctcttgtaacagccttaaaagattcctctataaaacccacatcaaaattcccatacacttttgcaaatcttatgtaacaataccattctcgaagaagatctttagagatgtctatgaccaaagttgcatacatctttttcatgactcgacatattaagaaaaaacatatgctctttagtgatgaagaagatgttgaattatgtccaatatctccataattgtgaagtatatgtttcataacacacacaaaatttagaggtgtaaagtctttttttggcaagttaggtgacaaaataatttttcctttttatggtaagattgctatgcattcattttcga

SEQ ID NO: 26139 - DNA, 5202 bp, Cannabis sativa
tcccatcgagaccttcgttttctttcacacaatctctcccatactacaataaagattcgtgcgcttgcgagttgataaatgtaaaaacataccacttttggtatcaatataagggcttttcaagagacgccccggaagcataagttgatgtgactatcctttgacactgaatcccacaatgtcagggctttgtccctagtgttgtaccattaaagtgtgcgcacaaacaaagagaacatacccattgttcgacgaccactattctaacagctacagtatgcagggacgacccacgaatgtcacctgtcggcatcaaatggtccccagtcgtacggaagatcatagccacacgggttgagcctcaatccgtgggccctaagttagtgaattatatgtatttactctattagtggaccatgttacacaccaaccctagcaggtccctggtatacttatacctggatcctagcctacaaatactacattgttccttctagcaaatggttggcaattcattactcaaacaatatagtaaaaagtggttctcaagcttgtcaagaacattggtgtaatactttaaggctacttagcctaatacaatagactcgtggactagggttcatcaatacccgaaccacataaaaatctacatctctattttgttcacttgatttattttattagttcttattttattatattgaatttttcaaaaatctcgataaacagtatcatattgtgttgacctattttgctatcacaaaaacttaagttatagaaaaaaaaaagtaaatttagatttctattagaaaatttataaatgtatgtgtattttttttagaaaaaatatttttagttttgtatatttttcagtaaatatatatttttatatagttatactattattaataactttttgtttattttatttatttaattttttttttttttaaaaaaagtgagcaatttacggtgaaatccttttatattttaatttttatacacttgactctcttatttttttttgtggcaaaactatcttatgttctaatttttatacactttacctccttatcttttttttttgtggcaaaactctcttatgctttaatttttatacagttaacccccttatcttttttttggtggcaaaaccctcttatatttatttttattttacaaatttgacacgccagtcaaatattaccgttaaatatcaactggatgaccactgtatacacctgtgtatatgtaacagtaaaatctcgaagtcgatacagtagtaatccagttagtatttaatataatatctaactaaaactttaaatttgcaaagaaaagtaaatttaagggagtttggccaaaaaaaaaaagataagaaggttaagtgtataaaaattaaaatataagagggttttgccacaaaaaaagaaaataaggggattaagtgtataaaaattaaaacataagagagtttcgccgcaaattagtcgtgtcaaacttgttatgttcgtgttaagtagatcatgtcgtgtttgacccgttttaatttcgtgtgaaacgcttcgacccattttcaatccgcgcataattttttcgaccctaacccgtaaattttgtattcgtgtggctgtgtcgaaatccatttggccacccctaataatattatgtattagtcatttgacacgtgtctttgtgctatttagtggacagggatcaagacagataattcggccataggagatccgcgcccagaagtagtaggctgtctatctttttttaatgtttagaactataattaacaagtatattaatcaaacaaaaaaaaaagtatttttttgatctgaaaataaatattaacaagtataaacaggtgcgagctcagctgcgttactgactaattagtccggagacttttcttccctgcttggggttttcaaaattaccaaaatatccctcgcctgagctcaagttcaacttctcaacttcaaattagggatctctctctctctctgagtctcttttctttgtccggagaaggcatgctgggcggccgtagagatggaccgttgatgagggagaagggccacacgggccgtggatcacgaattgctatagcaattgtgattggagttcttcttggctgcctctttgctgtgttctaccctcatggattattcgtttcagattcgactatccaaaaccgtcactcggatcttcaggttttgatttgtttttctctagttctttaaatttacctctttgactttccttttaaattcagattttaacttgagagagttgacttttagattttcagtgttgatttatgtttaatgcttcaaatgttgtgatcaatgttcatttagtacgagtagcaactactcagaactttgtttggcaaatatatctaaattgattgtagtattaaactccaaacgttaactttatgtttcgtaaaatattgtcggtagaatttgaagaatgtacaactcgtttcctgtagcattgaactatgtagtctcacgccatagattaattttctgtggttatctgtctctagcataaaaatcgaaatgtgggtctttgttgtggacctgtttcttgctatgaaatggtttgaagagaaaaggggtgttgaattatctttagtagcctcagttaatcgcattggatatttatgagtccagattttgcctagcatacttcaatctcaccgtttaattttcttgatttagctgagtttgtcatcatgcgagtcatcggacaagattgatgccctgaagttagatattctatcactatcgaattcgaactcagagttgcagaagcaggtcagagatctgactgggaagctacggctagctgaacaagtaaaggatcatgctgagaagcaggttttggtgcttggtaagcctcataaagctgggcctatgggtactgtcaaagccttgaggaccaatccaactgtaagtcctgatgaatctgtaaatcccagattggctaagattttagagaaagtctcagttcaaaatgagattatagttgcacttgcaaattcaaatgttaaaagcatgttggaagtctggtttaatagcatcaagaaggttggtatcacaaattatttggttgtagcacttgatgacgtgattgtagatttctgcaaatccaatgacgttcctttctacaagagagatccagaagatggtgttgattcgattgcaaaaacaggagggaaccatgccgtatctggaacaaaatttcgtattttgagagagtttttacaattgggttacggtgttcttctatcagatgtcgatatagtgtatttgcagaatccatttgattatcttcatcgtgattcagatgttgaatctatgactgatggtcacaataacatgacagcttatggatataacgatgtctttgatgaaccttccatgggttgggcacgatatgcgcatacaatgagaatctgggtttacaactctggttttttttacatacgtcctacagttgcttctattgagcttttggatcgtgtggctggacggctttcacgagaaccaaagtcttgggatcaagctgtttttaatgaagagctcttttacccttcgcaccctgggtatgaagggctccatgctgccaagagaacattggatttctatcttttcatgaacagtaaagtcctattcaagacagttaggaaagatcctaatttaaggaagttgaaaccagtagttgttcatgtaaactaccatccggataaacttccaagaatgaaagctgtagtcgagttctatgttaacggcaaacaagatgcactagatcctttcccagagggttctgcctggtagaatagttctcatggaattggatgtgcttttactgacttatggttttgataggttcagaaattcacgtgctacacaagttgggtcaatttgattggaatttgctcatgagaccccttcaaatgatctcatttcatgtctcttcatttctttacttctgtttttttttttttctgggctttgtattcagctacacaatagaatttcggttgctttgtcttcatattcatagccctcttcttagtattatgtataattttccattctttcttgttgttctttttttttcgttttggacttaaaataacattgcagttcttatggagatatcaatcatgatttcacggtgaattgcatttttatatgctcaattttatattgactttctctctcccttgatgatggtattttctcacctaaatgctataggacttgcaatgaacttttattgttcagctttcactcaagattatttccacaaactctgataaatcaagttgcttttgttttcatgcttcagctaaattattttataactaggtaacaaagccgcccatcatgcggcgcggcaattattttttcttgcgcagtagtaaaaatattttaaagttttcaattatttatttaaaatttagtacaaaatagtttatagtgtagatattacaaaaatactaatagaatgaatcatttatttaattcacatctatattaagtgtatataaattaattagatatttttagttgatatatacgataaaattcagattatatatcgtaaatatatattaattttagttaactctcagataattttttgttttatgtatgttaatataaaaattatattttatctatgtaaattgaaagacaaaaaagttaaatcgtcgtcgtcatcatcgtatcttatttgtcttcaccattataaatgtcgttttaattattgtgtttcatttgtagacactacatttgaagttaatattattatcgcatctcagttatagttagcaacatacttaaactcattatcatcatcttatctgaccgcatcgaaaattgaccaaaatcaatttaagaaaaaaaattaattaaacttttaagtcaattttttaattatacaaggaaatattattttttttcttcttcaattatatatataaaaaatttagatagtatttaataaattttagatcacttattatttggaatatcttatgtctcaactttatgtatacacatatacatgttttttaatatatattttgtttttctagtttttcaaggaaagtttgttaatagtaggaaaataaataaaaaaactaaccattatcttaggattagttggaattct

SEQ ID NO: 26140 - DNA, 19654 bp, Cannabis sativa
  modified_base (19368)..(19368): a, c, t, g, unknown or other
  modified_base (19585)..(19606): a, c, t, g, unknown or other
taactttcaattcaatcttctttctatttgtgctctatattattcatctagttactcttttctctttttactaaacaaatgcactgtctaggacattaccacgaatcaagtgattggatgggtgaaaggatcggcaacctttactaccttcatgattaaactgtttcatctattctttatgtagttaattttgaaatatgtgatgaaactttgtggaatcatagacttagtcatgcctcttgtgtaaaaaattattctctgaataaaatcttgcagcttcagtattcttcctatcaaaactttaatttttccatttgtcacttttccaaacaaaggaaattaccttttgtctttaatcataatatttctaaatagtgtttttatttgattcacatagacattagggaccttaccatacacaaaccactaaaggtttcaaatattttatcgccataattgatgattgctctaggtacaattggattcaccttattaagaacaaatccgatgcaaaaactaccataacaacttttatatagcttgttaaaacttagtatggtgtttaaattgaaggaattagatctgacaatgctaaacaactttagtttcttgagttgttatccaccctaggcatcatacactaccattcttgtgtgcaaagactaaaaccaaattctattgtggaaagaaaacatcaacatttgttgaatgttgctagagtagagtcctttaatttcaatctgatttaccttttatctattggggatagtgtgtgagtgttgctgcttctctaattaatagaacaccaacacgcaatttgaaacataaatcaccttttcacatcattaactccaaagtgccaaactatagtcaccttaaagcctttagttgccttgcctatgagtctactctaggggctgctacatccaaattctcaccaagagttgttgcttgcgtctttctgggatatcgtattggaataaaggcatataagcttcttgacctcaacactaatcgtgtgttttgttctagggatgttgtgtttattaacacaattttcccttttgaaaaatgaattgttgccacctcacatctctaattttttccctactaccattccatcactcaatggttatcaacataccgattccacaacaaaattacatcatcttacctttccttctgatgttgtgcactctactaatactgatgttccctctgttagtaggcatgttagacattctaagaaaccatcttctccaagattaccattgtttttttttctacaaataatgttcaatgtcaagcctctaaatctatcgcagaccatgttgtttctaaaattattgactataccatgttgttcccacagttttgagcccttgtgctagccatttccagccaatatgaaccagaattttttaatcaggtacatggcataccaatttgggatggagctatgtcatcttaaatccgagctcttgaagacattcatacctggatcattgttactttacctcctcattagcatgccattggttgcaaatgggttaacaaaatcaagtacaatgttgatggtagcattgaaagacacaaaacaaggcttgtggcaaaagggtacaagcaacaagagggagttgattactcttaaacttttttcccagtcactaaacttctttctagttaaactcattcatgctttggcagctatcaaaggtagatttctttaccgatttgatgtcaacaatgcatttttacatggggatttgcatgaggaagtgtatatgactatacctcaagggtatagtcctaagggggagttttctcctaatgttgtaggcaaccttcaaaagtccttatatgggctcaagtaagcctcaagccagtggtttgagaagttttccacagctctcattgaggaaggttttcaacactctacttcagaccattctttattcatcaggcagcatgaaacaagtattttaattttacttgtgtctgtggatgatgtcattcttgctggcaattatttgaaagctatagattacttaaatgttagacttaacaacaggtttatgttaaaagaccttggtgaattgaaatattttttgtgaattgagattgttagaactgatcagaaaatatttctttcacaaaggccatatgctctacaatttcttgaagactttggttacttgggaattaaacctgctaacactcctatggagactaacctaaaattaagtcaagaaggtgaagagaaattggctgatcccaagccgtatagaaggatgattggaaagctccaatacttgataataacaagacttgacttagcatattaagttaataaactcagtcagcttttgacttcacgaagagtttatcatattcatactgtacaaagggttatgtaatatgtgaaaacacttcaaagataaggtttgttttactctacagaatctgagaacaggtttgaagcctacacagatgctgattaggcagcttgtgttgacactagaagatcaacaactggattttgtgtgtttcttcgcaagacccttgtgtcctggaagagcaagaaacaacatattgtttctagatcctctactaaaacaaagtacaaggcaatgtcaaaacaacttgtgagatagtttggttactttccttgatgaataaattgaacattgagcatcatgaacaagctatactccactatgacaacaaggtagcttaataaattgttgcaaatccagtatttcacgagagaataaaacatatcaaaatagattgtcagcttgttagacaaaaggtccaagatggtgtcatcaaaacatctcacacatcaagtaacatcaaatatctgatatctacactaaagatctacttccagcacagtttcatgttttaaaagagaagatgggcctttgtaacatatacactccaccttaagggggagtattaagtttgataaggtatagtgtatgatgttagttagttagtagttggcttagttaatcgagtgagctgttagtttttttgttagagagtttgttatgtaacaaactctttcctctttgttcaacactctatcttcatgtatatattgctctgttcatcattcaatgagaaataatgagatttcattcaattttgtctcattcttccaaaactaaaagtcataaagcagttaaaaaaatggtgtccatggttctgtctcagcctcttagggtaaacaagaattagtaattaaatcgacaatttcctttgagttactaatcataatattgatacaaccacttaggcaaagcttgctcccaaaagttagcctgtgagaagagagtgtccaagtagttatatattaccaaccaatcccatatttaatcaatgtagtaataaatatttacaagacaacctccaaaaaaggatattttaatcttaaaaacttaaaaaatatatatatttttaagaagcttagaggagtaatcatagtcaacctacaatcaatgtaagggaacaaggaattgaatggaatggaaatgaaatattttttatgagatactttttgttggtttaaatttaagacattctaaagcagtaaagaaaatcatgaaaaagctatttgtgcaaaaggctatcttgaaagaaacaagaatgctctcagaagttttggcaaagttttatcaacttttcacaaaagccctttactaatggaagaagtttgtaacaatacaaacgttgaaaactacattaggactaactaattaaatgttgattaacaactttaacaacctttataaataaaaagggtcgtgtaacagaactcagtcagatactccacattatttatcatgccccctcaaaagatgtttacttaataagcatgtcagctacttgatcaatcgatgtaacacaataaacaaaaatttcttttgcaataatttgatctcagacaaaattacattatggatcggtttgtattcaccatctttattagatctgagcctcttgatcttcctgcctacttgagtctcgataattgtcttccatttcagaatgaaattcagaacttcatctttgtgttgcatggtgtatacccaaacatatctagtaaaatcatcaataaaagtcacaaaccatcttttacctccaagtgaagcattctttgaaggtccccagatgtctgtatggatataatcgagagtttccttggtgtgatgaatagtagtgccaaacttgacccttattcgctttcccagcacaaaatgtttgctgaaatcaagctgttcggtcttagcaccttttagtagaccttgcttcattaagccttggaaagccttctctgcagaatgctctaggcgcatgtggtaaagacgggaagaatcaaatgtcttttcttcaaaactgctacagacagctgctcttcctgtaacagtactcccatctaagaagtataaattcacctttcgagtacctttcatcgctacaaatgcacctcgtacaactttcaagtttccatcttctaatgttatcttgtaaccatcaaaatcaagaacacctaaacaaatatggtttttctttagatcaagaatgtacctaacattcataagtcttttgattgtaccatcgtgcatcttcagtcgtattgttccaatcccatttgtctgacaagcattgtcacttcccattaggacaacccctccatcaagttcttcaaaactcgagaaccaatgtctgttttttcacatatgattggaacatctagaatcaaggatccacctgtctgaatacatatttgatgaaactgaaaaggttgaatcttctttgatgtcggccttttatgcaacatttgcatttgacttgtccttgtttggacaatctttcttctagtgccctttctgatgaaaataggcactcatctttcgcgagttttcttcttgatgactctcctctagactttgatttggatcaccccctattatttgatccacctgatttcttgttgtttgatctgcctctagttgcagccaacgcttctagcattgagtttgtgcgatcatgttgatccttctttcggtactcattatttaccaaagcattatatacttaaccgcatctttaccatataatagagttgtagttaaatgttcatagctctcaggtaatgaatttagcaacaataaagttttctcttcaacattattttcaacatctaaattttgcgaatttgccaaaattttattaaaattatctaaatattcaatcataggggtacctttcttgaactgaaaatgggaaagtttcttcttcaagtagagtcaattctacactttttgtcatgtacttgtcctctagttttttcagaagaactgaagttacgctttctttcatgacaaaatacttctgatcttttccagacacagtcggatttcgccacaagcttgatcattgacaaaattccaatcttctggcctggactctaaggcaatattagatccttcttgaaacaatagatctcatgttttaaattgccacatgccaaaattattggtaccgtcaaatttttctaccttaaactttgcatttgataatgaaggcaactgttgttgggatgctggctctttaggcagtggcaactagtgagctcttttctatgcggttacgccatactgaggagctttgaactttactttattaatgcttttgaatttaaaggctttctctctctagctttctctcagctctttgagctgttgctatggcgaagacgagggcgacgaagcagggcaagccaagatcaccagcaaagaaaaagaaaaaatgtggacctcagtcttccttagatgcaaagaagactaagtcgatggatgaggtgttacgaatcaaacctatcctcttttcagacaaagaagatatcagaggtgaagatcaaaacacagggtaggaatcagaattaattaaggagcacgaggacttttaaagagaggacatacgattggaattagcacaattgatggaagcaaggcaattcagggaggcgcaacaccaatctgcaactgctgttgcgagaggtaaggctgttattccccctattttaagatctggtagtgttattcgcaatctagaaccatgtttttctggttcatcctccaagcagaaaatcaaaattaccaaggaagaccccgtctattgtttgctatgtgctcggggaaaatccccctatgtctatcttagatagttttcttagaagggtttggaaggaaaaaattgataaggtgggaatgatctcatatggggttttcttggtgctgtttaagacaattgaagatcgagatcaggttctatttgggggatacatatttttcaataaacgccctgtgatcatgaaggcatgggacccaaacaaaaacttcaaaaaaagaagacattaattcagtgcctatatggttacaattacagggactagaattgaagtattagggcgagcaagtgttgtacaagattattagccaagtgggagttcctgttatgttggattcatttaccaaagctaaggagaagtcgaattactcgcgtatacttatagaagtatccttgcaacaagaattcccagagaaaatatggtttgaagatgaaaatggtgatgataccgtagtctatgtgaacgatgaatggaagcctactacttgtgctcattgcaaaggaataggtcactctacaatagactgccgaaagaaagagggaagcaaagctgaatgggtggttaaaaaaccaacagaggagactcgggctaagaaaacaagtgatgaagagggttttttactaccaaagaaactgtggaaagagaaggttattgagaaacaaaatgtttctgtagtggcagtggcaaattccttcgaaagtcttcaacggatcaatgaaaataagcaggagaatgttgatgggaatgtagaaggtgaaaatgaatctttgcttgtcctagagatgggcatagagaccattggggacacaagaggagggtgagaacctcctcttcccaatggataaaattgttagttggaatattcgaggagtcaacaaccaacaaaagcaacaaatggtgaaacaatttcttactatacagaaggttagtttggttggtctcctcgaaactagagttaaggcctcaaaactagggtccttatactcaagtgttttcaatggttggtgcttcacttcaaacaatccttggcatccaggagggagaattgtagttagttggaaaccaactacctataatgttaatactctaaaatgttcaagtcagtttattcatttggaggtttcaattgtggatatgaaggtgtgtttttatgtcacatttatatatgcgtttaatgatggagaaggagggcagaagctatggcaagaccttcaagaactagctacttcaatgatattttaacaaaggaagagagaatcagcaagcaagtgaggtactctacttctactaaatttattgattgcattgctcattgtagattggatgatattaatttcagtgggagtttttacacatggtgtaacaagcaatttggagaagacagaatttactccaagattgaccgtgggttagccaatcaagcttggttgtttgcacatcctactgttgaagttgtgtttatgaatgagagtattttttatcatactccagcagttctcaatttccataacaatgttgttagtggaaggaagccattcaagtacttttctacgtgggaatcgcatcctagatatgctgaaatcattcagcaaaactgacagcaacaatataatgggacacacatatgtttcgggtggtttctaagcttaagagtatgaaaattgctcttaaggctttgaacaccgaacactttgctgatatttatgctcaggaagctcgagctaaagcaaaacttgatgaatgtcaaaaattacttcagtagcagcctttgaatgctaacttacaccagcaggaaaaggatctcaggtctcattatgcttttgtttttaagagttacttgtcttttttgcagcaaaaagcaaaaataaactggggaaaggcaggtgataaaaattctgctctattccattctagcatccaagaaagaagaagacataacaaagtaattactattgtgaatgctgaaggagtaaggattgaagagccgagagccatcattgaagctttcattcaatattatcttggtttactaggaagcagtatgcaagggaggaagtcaattcagcagagcatactcagaaggggagttcttatcccaacaccaagctgactttctcatgagagaatacactcgtgtggaagttaaagaggcaatatttgttattcctggtaccaaagctctaggaccagatggctttgggagctccttggaatattattggcactgaagtagctgaagcaattataagcctacttaaaacagggaagctgcttagagaaataaacaacacagttctaactcttgtgcctaagtcaaaattcccaacacagcgagagattacaagccaattgcctgctgtaatgtgatctataaggcagccaccaaactgatatgctcgagactcaaatgcatcttacctaacttggtagctcaaaattagggaggttttgtccaagggaggttcattgcacataatacaatgatttgccaggatctggttcgtcattatcgaaggaagatgacaaaggctagttgcataatcaaacttgatttgcaaaaagcatatgaaacgattgaatggagcttcattgaagaaatgttgtatggattgcattttcctaagcaattcattcaacttgtgatgttatgcattcgaacacctagattttcattgatgtttaatggatctctacattgatactttgaggcaaaaagaggattgagacaaggcgatccaatgtcccctttgctatttgttctcggtatggaatacttaacaaggaccatgagaaaaattgggcaaaaaaccgacttcagctttcataataggtgcaaggatttggctttgaatcatctcatgtttgcggatgatgtcttgctattttgtaatggtgattacaagagcatctattacttgctacagggccttaacctgttttctcagacatcggggttgcaacctaacccttccaaatcggctatctattgtcatggtatgtctcacataggtttaaagaatacatgatgcttcaggattccaaagaggtggcgttcctttcacttatttagggattcctatcagccctaaaagactatcaccaaaggaatgttccattttggttgaaaaaatgactcatagaatcagagcttggagtactcggcatatttcatttgcgggcaaagctgttcttgtgaactcggttttgttagaaatttatacttattggagccaagtcatgcttctcccaaaggtcattaaagagatagaaagtgtttgcaaagcttttttatggaaaggacagcatatgatgatagaagtagggaaaatagcttgggaaaatgtatgtcaatccaaaacagttggtggtatcaggtttaaaaaggttgttgaatggaacaaagcggcaatgttcaagtatatttgggcaattgcaaccaaagaggacaatttgtgggtcaaatggatacatagtgtgtatatcaaggaaaaggattggtggagctatgtggtgcctcaaaatggaagctggtattggaggaagatagtagctctaaaaggtatgcttttgaatttacttgatcctattaccttcactcaaacaaaatacagagtagctgaaggctacaagctgttgtgtcctacggtaactagggtcaattggagtaaggaagtttggaaccgtttaaacactcccaaacatagctttgttttctggcttgccatccaaaataggttgaagagcagagatcgcttgctcagatttcaaattgcaattaatccttcttgtttactttgctcgggggaagcagaaacttgtgagcatttgttctttcaatgacctttttctagtgaatgcttgaagcaagtcaaatgttggcaggcattgtagactcaagcaaccaaaatgactgatctagtgcgaatcatagagaagagagctgtctctggctttcgaagacaggttctaactactgcttgtgcagcattgatatatcaaatttggagaacacggaacacaaagctttggcaacattcaagtgaagaaccgaagactattgtacaaatgatcaaaaatgtatgtaaaactaggatacaaagtatatggcctaggaaggtatcaatagaggatacaacttcgtttagcgagttgtaatcaatagaaaaaaaaaaaaccagacctagttattataaaaggtgctgaataggatgtaaaaagtttattggagtaatgaaaaacactgatgatttccccaaaaaaaaactttgcatttgataacatggttctcctcatagaacatcttgacttgccaaaactttttacatcaacttgtgcatctttttcaagatcccagttgacagccataagtgcaaacaaataacaaaacttttgagcttatgacttaagacaatttttccaaaaatttagtaccatattttgaaaaaaggatgccacaattgaattcaaaatagtcaaaatagcaaggaataggtccgagttggttgaaaatggatgaaaatgggctaactcggtcccaagaacacaatttgactgagttaacttagtggttggtagcaacactctgaggctacgggtaatgcgtcagacctccgattgaggcgattcttgtggcattggattcgtcttgtcgagagcttccatttaatatataatattgccatatttcgctctaatacaaatttgtcgtgtgtggaagcaaaaaatagtaacagataacgataaatatatatcaacgcggtaaataataaaacacacacaattacgtggttcgacaattcgcctactacatgggaggtaactgatattattaatatgagtaggacatatacagatttcttaaagtgtttcctaaagtgtttcccaaactcagcaaagtatttctcaaagtttagatatatagatgctctctctcttagatttcccaatgaactgattgtacaaagttgtacctaagatgtttttattcattgagatacaaattctcttctaagagctccatatctatagaagaaacacctcaactactaaccatatgtaataaatgaggtagctcatctcctaactatatgtaataattaagagagcatgcttctcgataaatgtggcatatagcaagtctcaacactcttcaaagttgaaccatatctttgaaactccaagacaagttggctttttgagccaaaattaacacccacttgcaagagctaatctatgtgcttctagagtccatagacatggttttccatcgtagtgacaagcatctcgaccaaaaacatcatcaaacgcatggttgatagtcattgggagaacttgcaatttcctggaatgcaaattttgacgatcaagcttgaccgtagggagagagttaagggaatccaacaattggctgaggatgagacaagaatgaaagtggaaggagaagaatatgaaattgaagatgatgaggaagcattcatggagggttccatggctgacctcaatcgaggaaaatgatgccatgaagcagtaaagaaaatcaaggaaaagccatttgtgcaaaaggctattttgacataaacaagaatggtctcagaagttttctagaagcttaatcaactcatgagacaatctctttatttatagaaaaatattgtagtagatgtaacaaaaggttacaagagggctaactttcattaacgactttaacaaattttacaaacagaaagaggtgtgtaaaataacagagcttaataaattaagccaatttatttatcacattcgaatgtcaatcgaatagaatgattttttttttcatactaaaaaaattctattctaatggacaataaaatatgtatattaatatttttatttttctcacctaaacacctaatagttctaacttgtaagcaaaaaaaaaacttaccgagtaagccagtataataagataaaggcacatcagcattatgaattttgaatagagtgtgagttgcacttataatgctatgctcttcccaccctgtgattccccaaaccaagtccccttccttgaagtttggatccccggattctaaaattttacaaactccataacctgtgatgggctacaatttttttattcaatgttagtcagtgcaccacacaacttgggagaaaataagaaataagcataataaacataaaattatagaacagaaaaatataaacaaataatgtaacgatatttgcttgtatagaaaggattatggataaattaaacaatgatcattattttcaaaacttactctaaagtgttaggaattagtaaatacttgtaataaactcatggaatagcaaatataaataatcatcaaagcacctactttcattgatactataagagaattcattaaaaaaaaaggacatatctcagaaatttaactagaaatataagatggatatgggattaaggtttgaagactgaccaaaccaggcttgaagggctcaacataagacccgacattttgactgttcatacggggtcgcatatagggatcgcaagacaggtataagttcttcaccaaaactcctttggaaccatctggaagcttaagtttcatagtggaagaggttatgaccatgtctgattctttgacaaaaccaagcacatgattcttcaacaacacttgcttattactcacttctgccattgcaactcactctttcactcttttaccctgtttccagaagaagaatcaattactaaacccgaatataaactatataaatcaaatgaatgttgcaattttgaaagaaattttattatttttattattattatttatttatttaataaattatataatttgtttaataagtagttaaaataataggttggaaatacatattataattagaaaaaatagtcaaataatcaactgtctaattcccagattgtttgtcaaaaaaattaaaataaaattagatgaaaaagattacaacatcataattaactttaagaacacttaaattctattttatccatcgctcagaaaataaaaccgtaagagctattgcagcaggttcattcaacctcgttgcttgagcactcaactattgtgtaaggtacataattgcactaataacaatcccttcagtagcagaagactagttatacccaactactaacagtgatttgatggcaccccatagaagaataaagaagaactaatagcgaaacaagataaaactatgtcacaaagacaagaataaaacactcaaaaccatatcatatagacaaaactaatcgcaatagctaaaattaaattatagtagcaaaacacaatcccaaccaagctgcgcctatgacttaaaaattgtaaagaaaagatgataaaatgaataatgctcagttgaataggctgaggtaattgtattacattatataggcagtgtatagaggattctagaatatacacgtgtaggtctaacggtacaatcacagcaatgtaattaaaaatatcctaacaaaattgattctataatgattacacaaatcatgtgttgtcccaaaaggttggaagagttgggaccaccaccaaattacatacacaccctcattccactaactttattattttgacatcccttctttgtggggttttaaccacgccaagtttggcaattagaaaatggaatttatcatgtgtcaaaaattttgtaaggcagacagctacttgttccattgatgggatataccttacatccaaaacttttgttaatactttgtctctaataaaatacacatccaattcaatgtgttttgttctagcatgataaactgggtttgcagctagggcactagctcccataatatcacaccatgtgattggtgtagtgctcaagaaaaaattgagttcctgtaatagagccttaatccacgatatctctgctgcaatatcagtaagtgctctatactcagactcaatactcgatcgagacaccacacattgcttctttgatgaccacaaaactaaggcctctctaagataaacacaatagagtacaattaatttaagagtatttggacaacatgcccaatctgcatcagagaaacatgttaaggtaagtatattactgtaaggaatatgcaagccatggtatggtgtttcttttatgtatatgagaacctgttttgcagcactaagatggacattggttagagctctcaaaaattgactcaagttattgatggcataactaaaatctggtatggtgtaagttagatattgcaaccacctataaggcttttgtattctgttgtatttgacgaaattgagccatcattaatggagatcatcttagtaactgccataagggttggacaaagatttagatataacatctttgtcctcttgagtagttcttaaatacactttgcttcatttagatacatcccagtctcacctcagtgcacttctattcccaagaagtagtaaagagaaccaaggtccttgagggagagaattaaattcaactttgtgatgaatttcttgagcttctcaatgttattccttgtgactatcatgttatctacatagattagaacaagaatcacaagagatgatgacctgtagaaaaacaaagatgagtctaccttagagtttttaaaaattttagctaagcttgtctaaggccatacaaggatttagccaattgacaaatgtagtcagggtgttctttatcttcaaatcagtttggttgagtcatgataacatcctcctcgagatggccatttaaaaaagcattattgatatccaatttccttacttcccatgattttgcaactgctatggttaagaaaattctaactgtggatgctttaatgatagggcaaaaagtttctccaaaatttacaccttacctttgagtgaaacacttcgctactaactgagccttgtacctctggaaagagccatttgtatttcttttaattttgtacgcccatctattatcaatcacattcatcccaagtgttagaggaaccaacgtataagctccattccttatcaaagcaatacgttcatcatccattattgtcttccatcctttatggctgagagcctcttctaaagactgtggttcttcattgataggctcccactgagacttacttaaatatgttttaggtttaaaaatacctaccttggctcgggttaccatagggtgtgatggttgaatggattttatagcacctacgacatctgtatttgaagcaagtacattttcaactagttgagcagtatcacaaacatgatcttgatctgagctagagggagcatcaccagataaattagcaatttcaaggcgattaataacatgttcatggtcaattatccaatttgtatcatgtctggaagaggattcatgcaacaagcatgcgagtgattagaaaagtctaaatctagggagttttgtgacagggacggtggtgaagaagttaataaatccccctgataaacctcagaagcatgatgtacttgggaaggatttgaagaaatagagtgagcagtgggagtaaacctactaggaatgaaaatagcatagatgacttgggctgatgagtgtttagaaacccttacttgaagggaaattcatgcacattaaagatgacatgtgtagaaatgtacaaacaactagtactactaagaaatttttatcctttgtgattgtcactataaccaaggttaacacatttaatggaatgatactgtaacttatgtgtttgatatgacctaagacatgaaaaataagcagagcaaaaaacctttaagaattcgtaatctagcaatttcaaatacaccattttgaaaagagttttattggaaagtattggtgtggaacgtctattgataagatagaatggaatttggaaggcatcctaccaatatatttaaggaattcaagtttatgcaagcaaattaaggcgcatttccacaatgtgcctatccttacgctcagctcgaccattctgaactgaggtatgatggcacgagtgatcaaaagcaataccataatctatgaaatgtctagtaaagacttggtactctccacctccatatgtatggagagatttgattttccttttgaactaattttttacaaaatttttaaactagataaaggttggaagagcttcaaatttagctttgaaaggatatatccaagtatagcaactgtaatcgtctataaaatggatatagaacctaaagtttgtgtttggcataatgggggtaggaccccaaatatttgaagcaccatatcaagggttgtttggcccgattatatggtttgttttaaaaggtagacaatgagactttccaagttagcatgcatcatagaatttttcattcattttggcatttcttacattcaattgttttaaaacaaaatctaaatctcgagaggatggatggcctaaaaaattgtgccatacatctttgattgaaaaggaaacaaaaccagtttttcattggtttacattttacttagaacatattgaaagaccaaagaattgactatgaaatgagctagacttgtttgaggagtggagttgactatgataagtggtagtgcgcattttgaattggtataaagtatctttaagaaaatcttgaagcatcacatgccttgtcaccttgtccttaacatagcacaaatcaaaaaagaattccacaaacacattattgtcagttgttaatttagaaatgctaatcaaatttttttcaatatttggcacatgcaaaagttcatttagagacaagtttgaatcaaaataagtaggcaaggaacttgttctaacatgcttgattgcaagttgtcttccatcaccaattataagtgtctccttaccattattctcttccttttcctgcattttagttgaatcagctattatatgattggttactccactgtgagcgaactaggcctcgtggtcaagagtgtttggagatccaacgaaggcttaagctcgttggggattctcattagagttttaactatatgcaagagtatttcccatgttggcttcatcgtacttattgtagaaataggtcgttgagtggccatactggccacacacttggcaagtaggcttaagtccactactatttctgcctcctcttcctctaaagtgaccaccatttccacgattgttactttggccacctttaaaagaagatgaacctctaccaccaccatcattaggatttgctttgtttgctatgttagctgagggatttactcctgaacaacttccaagtctgtttgtactagagaaggtagtattccatcttactgtcaaaacttagcaacatatcttaaagctcttgcaaagttgtggatggtcttgcttcaataagtagtactattggaagatactcaatgtctaagagatccttttctagctgtctaaatcttggttcgatactcatccattttagattaagagtgagctcaatataaggcttctaatgaagtccatagagaggctgtaaattcacatcccataacttctgaagcaatcctttctataatggatccatagagtcgtccgatgagcaattgatcattgacaatccactactcgaaagcatgattaatttcacccgtagacacttcactgccatcaacattagtataaacaaactcttgtggtctaggaaacgtacatttacggtaaccatcgagcctatggctacaaacaatggtagacaccatggttctccatagtataaagtttttgcgatctaacttcaaggaaaatggttcgtttaatgtgcttccaaagtgaggcacgataatactttgagtctaagcttggctgctaccagtagcagcacttgatacaccatactgagttattaatgtagcttctttctgaccatcaatgtcacctccagttgggacttatggtgttttctctccaagagcagccatggaagacaagcgtctttgtagctctgataccagcttaaaaatggagaagaaaagatgatacaatgaataattctcagctgcataggatgaggtttgtattacattatgtaagtagtgtatagaggattccaaaatatacacatgtataggtttaacgtcacaatcatagcaaaggaataaaaaaatatcctaatagaattgattctataacgactacacaaatcatgaattgtccaaaaaagatagaaaagttgggaccattgccaaattacataaacgacctcattccactgattctttcttcttgacactaagcctagaaaacctagtaaaggccgatgggcttggtggaaaaaaagacaatatctaatagttatagatttaagaataaaaaatcctaattcttttccacttcaaactattagaacttaataataataataataatttcaaaatggtaagtgaaccatcatgaacttaggtggcgtttggttgtgagacataaaaatataggaataggaataggaatgaatatgaataggaatgaaataaaatttaaaaaagcataaaaaattgataaaaaatcattaagtttttttcaattacattggaagaggagtgctaaggagactttctatctcactctcttttgctctctctctttgatgtaatgacaaatgtcaaattttgagtaagatttgtttttgcttaatatttaattatgatattctaatgttattacaattatgccatactaactaaattattatataatgactagatatttattataatctaattattttattaatttttatttttacttttttaaatgtttatttttacttaattacacaagcaaaaaatatatatttattttgaagaaaaaaataaccacattaaaaatattaaaaaattacacttgtaagtttaatgtatacaaaagttaatacaatttaaaaaaaaaatcaatgacataaaactattattataaatctttttgtactatttttttttattttattagttcttttattatacagtactagttttttttttttggattcaacactctattttcatgttagtttttattcttcttatacaagtgaaaattcactccacttctaatacaatattttttaaatatttttttaaatattttttatttaatatagcataaaatgagntgcaataaattaatatactattgttcaaaagaaattaatatagtaggtcatagatgtattttttttaagaaacaaaaggtcaatgatagacaaaaaaatattatagtagctcaatttctttttttaatttgctatactttttgcagtagaatatatatagataaatgtttaaacaattatttagcttatatgtatgtatgggtgactattcaatggnnnnnnnnnnnnnnnnnnnnnntggttacatttttctttgacctgtaatagcaggttactaatagataaa

SEQ ID NO: 26141 - DNA, 1833 bp, Cannabis sativa
aaacatcaccacccttttagtcttttacatatataacatattaagaaattaaattatcttaatcaccctggctccgaaatttagtaggctataagaaaaaatatatttttgagtctttatttttaaaaaaatatatatttaaaagagaataatttttctttagctctaaaactaggtgggctctaagcccaagcctatcctgcctatatccagaatctagagtgtcactaaatataacatgatatgataatgtttaacttagtaacatcatatatattttttagataaaactatcttcttcctctttgaaatatatatgctctctctctatatatatatataaaagtaataatataactttgttagaaaaaaaaaagtagtaatataactattcttggttgaaatattaattcgatgaaacattagctagtgttctattaaaccataaatgtaacaagctttctaactaggaagggtgtatatttagacactcaaatttgatatatttttttatacacaataatgtaatgtatatttaattttagctatataattaaagtgatgtggttgccacttaaaattatatacgattaaaattaaatacacattattatatgtaaaaaaaaatatgtataatttgaatgtatatttaacactactctcaatttaattattaacgataaaaaattatatgtactttttcagggtttccatcagagagagcagaatctcccctccaattaactcgttgattggttggcaacttcccggacctctgcccttcaaagaacaagatagccttgtctagggcatctttataattgtaattaatattagtatcagaagaagagatcacccactgattattatcatcatcaaaagctagccctcctttcacactaaacaacactagtacaaataatagaaaagcaaaactagtaccccaaaataccccacactgccccatatgtatactattccaatagacttaattatatatgaacctctcaatgttatctttgaatgaattatagtagtagtactgctgggtatttatagaactagaaaaaacaaaaagtaatattgcatgaagtcctttagaattaaagaagttctaattattagaatcttttattcaacttttattataaaaaaatcttatttttagtcacaagaaaaattgtgactaattataaatcatcatttttatgttataactaaaaaattcgtggttaaagttattagtcacaaaaatcacaatttgttatgactaaatatgtttttagtcataatatatattgtgactaaaactaaattagtgacaacttatatttaaatactatgctttagttacaaataattttttgttgtgactaaaattaagtcacaaaaaaattatattgtgactaaaagattgtcactaaaagtaattttttcttatggtgcttcacgtccgaaatcacattccgaaatattttttttatttattttcatagcaatatttgttatagttacttcatcatccttgtaaatttttgaaaatttttaaatagttattacagtaccgaaaatagagttcttaatattccagtcaattacgcgtgttcaaaaaatttcaaccttattttgagcattgtaaactattcaaaaaaaaaaattaaaaattacagggatcatgatattgtaactataacgaacaccgttataaatttttttaaaaaataaatattcggacatgtattttcgggtggaaattgactaaaaaattataataggaggtaattaatgatgttttgataaatatgtataatgacacgccaaattaaagggaat

SEQ ID NO: 26142 - DNA, 1764 bp, Cannabis sativa
gtaattactacaatgtgactacaatgtgtaattattgtgtaattatcatgtaattatcacccaattatcaccctagtaattaccctacttagtaattacacagttacttccaaacgcaccctaaataacttttaaaataacaaaaatacatgtaaataattggtatttaaaaataatagttcattatataacatgataactcattagtttctaaagtaatttttaagattatataaatgtattttaaattataatctaccacaatataacttaaaaaataactaattaataactaagatgtatacatataaattttagaggtaatgaaaatatattatatgatataaaaataattttttgtatataaaggtaactaattagttttttatcaacactattcgtaattaaaaaattacttaaaaaataataaaaaaaacagtaacaatagtaataatattataataaattatgggatatgattttgtcccgtgatgcactttcaccgaatgtattccgtggtacattagatgggtctcagggtacgtttctactttttaagcctaattatccctagattaatctcagccgtcagatcaaataactccttcatttgacggctgccgtacatcacagatttcaatccgtgaaagtacaataacgggacaaaatcatatccctataaattatataaaaattatgtattattttgagacaatatcttagttacgatgccgtattgggcgattcagagatttaagatttaattatctttcgcattcaataattaatggaaaaagaaaaaattggtgacgtataattgaaggcaattaaaaaagtcttcaaatcaaatgaatgcagatgaagacgtatacagtggagatctagctatgcaaatttagtggtccaagaaaaggttgaacaaaatgatgattttatatcatttcaacaaatattaattaatagcacatatattttgtatctcccttttatcaatgaagctttcaagttttttcaaaaaaaaaaaaaaaaaaacaaaaactttttcgtcaattataaaaagacaacaaaaacaaaatgctcgctagtgtattaatattatgttttagactgtttaagatttttgttttcaaattatgatatatgtattattgtgatcttgaatttttctatccgttagtattgtaaatcggttattttgtcaaattttgatacacatgacaaactgaatgatgacatgattgtactttagataattatcttgttagcgctacattaacgccacatatataattaattttaacaaataatttaatttttttttatttagttttacgtaatttttttaatcattatttaatttttgagtacatgtaaataccattttaaacattgtgttttgcaaaagttatcaattggacaatattttgttaaatgacaaaatgaatcttatattttctgaaatagtaaaaataggatcatgagttcaattttcaacaattttattttcaattaatcaactttaagataatttctaacacgaacagatatagaaaatgtaacaagttttgtcataacatctctacattagattataatttagttttattttgacaaaaaactcagttcagggtcctatttgtaaaattttgaacaattcaaggtcttactagtacaacccaccgtcgacacccacgactgtaacaaccccaacaatggcagaagacgactaatgtacaccacagtgaaaaacgaagtataaaaagt

SEQ ID NO: 26143 - DNA, 2638 bp, Cannabis sativa
  modified_base (2290)..(2309): a, c, t, g, unknown or other
atcctgaattataatttaaattctagaaaattaattctccgaaatttaatttgcagattcataaaatgtagatctataagaaataaatctggagttcttgatcaaagcaaacaggtaaattcaaaaaaaaaaaaaatgtatcaatacagtagctaataatagatttggagttctcgttgcattatcgttgttttatagacttcagatttgtatttattcaattccaattgcgaataattaagtaaattcacatttatctcgcgctacagatttagtagcattgtttttagtctttttgattgtatgtagttgaattgttgttggttgtcagttttatcaatgcttcaataattaacgagtaaataattacgagctggtaaccgtataatatttttagtcttatttacagttatttcacattgacaatccaacacaagactcgcacacaaaacatttctaatatggtcagtatttttatattttaacatttgttgagttcacgttggtttacaatgttctgttgtttcttcacaaaatattctaaacatacaagtcattattcatcaatgcaacaaaaacttttttaattgaatctgatctaaagttagtattgggagcaatcagattgaaaatctggtcttataacaattgaattatgtgagtagcgatggtgtggtgtgaattgaagtaagacttgctttgtgtttttttttttttttggtttagtgtctatctttactcgagagcgagtaaaaattaagtttggggagtttgatagactaattttagatgcattttataaaatattttagagatgtgtttcaattgattatattcatttatgcagaattacacttgttttctatttgtttcaggcttaaatggtgaaatccatgatgtgaattgaaaatgagaagaaacatattaaatgagatgaatatgattgagttcaaaatttagagttctaggatttaagtggtgaaaaattctaagttttggatgcttaacacgatctgtttgtaatcgaaaatcaagtttaatgctttaagcgaatttttgactatgatgcgttcactttgaggaaaaatattatgaagaaaagttctagatttctctttcgtctttccaaatcatcttgactcgtctaatttcgagcaatattaaaagagttatggccaaaacattatcggttattgtaccaggaagttcgctgccaaaaatcgagcttcaagcgccacgacactacaaggtagtgtcgctgcccgcctcttttaaagtgccaaaattagggtttttatctttttgaaagactatataaaggaacatttaagcaaaggattaaggagtacgaaaattagaggcgagaagcgactctgaagacttttaacatttatttttccaagagttctttcttttcatctatttttcttatattcttacttagttgttatcagatgtttcaatgattatgagtaggtagatttttcaaaagggcattaatgaagattgtttgacactttattttgaatttaattaatgtgatttagttctttctcaattttctatgtgcatctatttcattcgtacttaattatttttaattgcttgatcaccaattgaatattttatgatttcaatgaacatctgataattgagtgttgattatgctataatgaaaagagtacctatatagtttatgttgcatttaagatttttatgcttaatgcatcctatagtcctatgtgtttaaatctatcaggaaagtagataatttgcatataggttgagatttatatgtcctagcccgaataaaaatttatttaattaattcgctatcacatgaaatttgaaaaatgagaattgaattatgttaaccatataaagtaaatacaatcgaaattaatcactctaagcttcaatcattgttaatttcaccttaattatttgttttctttatttttttagcaaaaaataaaatatcttttcttatttttattatcaccaaatagaactaagaatttaattatttggtttttagctacatgcaatcctcttgggaacgattttacttaccaaagtattacttgttaaaatgatacgtatactttcgtgttgaaaaatccatcacagtaaacacttttgagagagataaagttttccttacttctcctctcacaagtcaatacaagaataaggagcagggccggtcctaggcataggcaggctaagcccgtgcctagggctcactcattttaggggcccaaataaaaaaaataccttttaaaaaatnnnnnnnnnnnnnnnnnnnnttttaaaaataccatttatttttatagtaagtgcccaaaaaattttttttacctatgacccatttcaacttagggccgaccctgataaagagagaactattaccattatcaaggggccgaacctctacaatatttttgtgtttttattttgctctatattatttatattccatttaaatttaattatcatcaatcactttaaactttaaagacttattgttattggctaaaagcaaagtaaacaagaaaaattattcggcaaaaaaaaaaaaaacaattagcttatagaggagcaacaattagcatttagaggagcattagcatttaga

SEQ ID NO: 26144 - DNA, 4586 bp, Cannabis sativa
  modified_base (3766)..(3781): a, c, t, g, unknown or other
aaaaaaaaaaaaacaaaaaaataggaaaaaaaagaaaacttcggaatcaggaatcagaggagaggttttacgtttatagcttgtataaaacccggcagccacaatccacatcatatttttgcagaaaacttccactgtaaaataacccactctttcccattcacagagaaaaagaaaattaaaaattgatccattttcttgaaaaccaaacagcagaagccaaaactactttatacaaaaagcacaaagccatactttttcatcaaaccccattactgaaaacaaactctataacagagacaagccaattgaagcaacaataagactcacccaaaaatgccttacagttcttatcgacccagaaaaatcaatgttatacttcttggtcatattgggataaagaatcccccatgtccgattctgcttaggagttccaagtttctcttccttatcgaacatctcgtatatgtaagtctctgcaaccccttctttcctcaggggagttccaaatcccgatctcaagtgcctcaccaaacccttcatgtaaagctcggcatagattgggttggcgtctaattcccccgcgtcgccgcttgagctcggccacccagtctccgttaccaccaacgggatgttctcgtgcccagatacagccatggcgcaaatcacggcatcgaccataacgtcgaatagattccggtacctgactccggtggtgaggtcgtctctgaaaccgaatgcgtgttcttgaaacagagcgtaaccgattgggatttcgctcctcattcggtacacgttgtatgggtatatgttgatcaagaatgacgaattcgtgtcgctcaagaactggagtaaggggcttattacgttccctagagccggttctcggaattgggcggcggagggcgggaagaatgaggtgatgacgttgatgaaggagaaggttgtggagacgtcgatcttgcgaatacctagatctctgagagcgaggtggacgttttccatggctggaaggaggaagctcgagttctccggtgagttttctagaatgtcgtttccgacggagattgtagagatcctgacccgtggaaagaacgggaccaccatcgtgtagagccattggaaggcgttggagcggtttgcggccattgatgggaccaaggagttcggaatgttgaggaggagggtggtgttcgagtataggaaggctctgatcgtggctgggtttggttggtcgagtcggaccgagttcattcctaaggagattgccaatgcagagatacgttcgggagaagggggtcgcgagtgggtcgcggtggttgctggcgagtaggtaattccgattgcggtgaatgaggtagctccggcgaccggagagagaaagtagagggagaatgtgagggagaagatgaagaagtggtgaaacgacattggaactccactgctggttcttgctagtgggagtaaggttttggagggagatatttctggtttaaaactgacgggtatttgctatattacgctgggggcggacgataagcagattgtttcgagacggaatcgaaaaggactgcgtactttagcactgggccattggtggtggatatgtagattgcatttcaatgggcttcttctgtaattgaagcccaattagtcgtgctttatagcctggttgctttaataacttgcttcatttctttttattttactttattaaatggattgaaaaatgaattttcttcttcggagatgcatcaaataaaataaaattatatctactctatctacaccacaaataaaaatatttttgtggcttttgattttcaatcaaatggtagcagttcatttgattgtcataggtatttccataaaagattaacaacttctattatttattttaattttttggaaaaaagaaaaccactcacgttgtactacagttgatttttaatttccaaacatgtgtatggtctatttccaaaaggagaaagtcaaacggtctatgatcatctataggtagagatttttcttttttcatttttttcttcatatatatcctgaactaattttagttgggaccttgcattaatactcttaaaagtgtcatgatacttattaggttaataatttttttttcttctaaaatttgggctataaataatttttatacaggaaaaagatgtttgaaagttattaatttgatgttcattgataacttgttttttttttttttattaagagatcctttattggtttgtttgcttttttttttcttcttattataatagatcctactcactataacagaattggaaaaaaggggaagaaatgaatgaaaagaatgatttttcattgattgaaaaaaagagttagaaggtgtatatatacacagtccatcataacaaactttcagttataactgactaactaactacctaacaaacatggccggtcttaggtaatttaaggcctaacgcgaaataaaattatgggaccctttaatcacaaaataaagtagaataaaaatgagcaaaataatttacttgttcaaaagtattatgtaaacatgattcgtctaattttttgtgatgcaaatgtactaattaaacttgtataatcaagtttttaagttatatctttttcaataaataatatagccaaaccacttaatctttctttgaacatcgttgaccgtagagaagatttgatcaactttaatttcgaaaagcttctttctgcgtgagcaaccgtgacaggaattgttagcataatctcatataagcaatccaagcattcggataactatcattaacttttcttatataattcaacaaatcaatcgccttttttgtttcttttggcaagttatgtcgtaggatttgtaattataggtcatcattgttaaaatttgaaatctctccatggctcattacattggtaagattatcacaaaatctcttctaactatctccatttgtagactttaatttctccaagttaagaaaaagtccaaaattttcttcaaacctctcaaattattcaaacttaattttagaaaaaaatatattattatcaatatatgtacactatacatataataaatcatttcatataagtatttatttagtcaaacttggattcaaatgaagaaatagcttgatcaactatatatagaggaaatagttgattttgaaagaatcaacaggtgattgtacgaatgcgttgctagtactctcatcaaattgtttctttctgtgacatgttcgttttttaatgaacaaaggttcaattttcatttcacttactatctttgtagctgcaaccatagcctcttcaaactcagtttctctatatttttgtagaaaggaaaggagagttttcaattgtctaatagctacataaatttgcatatcttcactttgaagaacgatgctaaccttattcacagtagacagtaggggtgttcgcagtgcgggtggtgcggtttttgactattttttcaaatcaacccgcacgtgcagtttttccacttttacaaactgcacctgcaccgcgaaactaaaaaatcgcaaaaaccgcaccgcaaaaaatcatgcggtgcagtgcagtttttacggtttgaattatcaccaaataatttaactgtcacaaatacaacaaagtttgagcaacacttgtgaaaaataccataaggcttgaaaataaaaatgaaaaaaaattaagtttcaacaatacaagtgaattttgggttggacattcacatatnnnnnnnnnnnnnnnntaaaaatttgtatttttataatgtgcggtgtggtgcggtgcggtttgaaccgcgtattaacaattcaaaaccgcaaaccgcaccgcaccgcgcggtttagaaaaaattcaaaccatgaccgcaaagaatttcaaactgcatttttttcgcggtgcggtgtggtgcagacagtttgagcggtttgatgaacactcctagtagatagtaaatcataccaaatgactaagcttagcaaaaattcaaaattttgaatattatatgttgctaaagtctcagcatcattttttgttttggcatcttctttactatttgccaagtagagtaaaacaattattatttgaggagcttgaaagcttaccgcttaaacactttcaacatgactctcccaacgcgtttctgacaatgacttaacagtgagacctagcacaagtgtaaaaactttccatctttttgtagaagctgaaaacaaggaatatatacgttgtagcacaccaaagaaagacacaaccttagagcaacaattagccatatcagaaagtacaagatttagagaatgacaagcataagatgtaaaatgctctaggatttagttctagtaatctgcttcgtacacctttattttttcctttcatgttagatctattatcataaccttgtcctcttatattatcaacatcaagatcaagagtatgtaatgcatgtagaagtccattaagtagcctaagtcctgatgtgtcatttaccttaatgaattctataaaatattcatcaacaaatattggactatctgaaacattcacacatc

SEQ ID NO: 26145 - DNA, 3724 bp, Cannabis sativa
taatataaatgtatgcatacattttctattatttgaattgatattgaattatgttactttctatttcgataatttgtagatagttctcgaaagtagtttgaagcatattttgttaattaattaaattgcaagattgttaatactaatactagtttgggctgcattgtagttatactattaatgacaaaatatattgcatacttaatgacaaaattgcatctttagtataaatgtctgcagatattgctagcaaccatggtagagatggtggcggtgaggacccgccaaattctactactatgccaactttttgcgagtcataaggtaatttaattattttcttaatattataattaaattaacaaaaaaaaaaattaaaatgtgtatgttaatgtatttattttggttattcacttgccctatttagtagctcccacgcagaagaaaggtcgtggttctagtcttggtctaaatctagagcagagaagggagaaagctaaaaaaccattgcctgttgtgtttgatgaaattgcaatgaagatagtaggattagagaatcaagctttccctcgcatgttcgaaaatcagatcaaactattggttcctggatggtacaaagattgggcaagtgtccctcaacagtacaaggaccaagttcttgccaaagcccgggtacaaatatttataaatactttaaaaatacattataatagataattattaattttttttgatgcaatattattatcagctagatggtaatttaaatttcgacaaattatgcattataataaatttgttattaatttttcttttgatacagtattattatcagctagatggcaatccaaattatgacaaaattatggcgattgctgatactgagatgaagacaagatatagagatcgtaagacaaaaagacacacccatttcaaagagtattataaaggaccagaggacatcgaattagctgtctgtcaccccccaaaagaagtcaacatagaacattggagaaagatatgtgagttatttacgtctcctgcgtttattgctagctcgaaaaaaaataaggagaaccaaaagaaaatgaagtacacaacaacacaagggacaaaatcgttggcagaaagacgattcgaattagtaagttttatataactcaatttaataaagtgtactaaattacaaatttctaaccttctctttatatttattaggaaaaaccttaatatattgagacatggagagaagttcacataaagaaagcgacaaaaacttttgtcaacaagaaagctcaaaaagattatgtaagttacctaattttatttttataatgttccatattcctctcattcatatgcttgaataatctagactgtatatgtgtgtgtaagcttggataatctttttgtagtcctctttttacatttaatttatgtggaaaaatgtggtacagcccgaactccaaacctttatatatagttagaaaaattagttaaaaccatagtctccattggcaagtctttgggtcttaccctgatgttaatttaaagaaaaatgttaattatttagtaatgaagtatctgatggttgttagaaagtactaactaatgaaaaagtaaaatattctatatgctatctaccaaactggaatgttattgttgaaattaaaatatgttttaacgtttgcacaccaagctaaattttgttcttgcaaaataatgatcgataatatgcagtagttgaaatagtagcattattattccattttaaaaaaaaaagaggaatgataatctttttgtagtcatcattttgctgttcagattttagagctcttttgtaaaaataagggagaaacaattggattacaaataatagaaatgaaggataacccttattcaatatgttttgtatcacatatgcaaggttataaacaagctagttagtttgtgaatgtttaatatgtagtacatgctttcttttcaataggttgctcttagttttataagtctcggttggtggtgccaatctatttcttttgatgagttaattaaatatgtcttgattctcccactcatttctcttttcaaataccaaactctctctttttgatggttttgttgtttatacttaatagatgacatttttggtatctgtcttgttctttcaatataagaacgattgaaagaagcatatgaagcacaatctgaacagcaaaatgatgactctagttgtcatgcttattcctcagttgatcagatacaaatacttcaacaagtgcttggcgagaggagcggttacaaccgacgagtgggacacaaagtgaagggtcaatccacaactagtcacactcagtacttccaaacacaggcaatgcctactcaagaattttcagaggaaatacaaagattggagcgagtaatagttaaattggtccagcatataagtcaaaaggagcattttccaccaaacaatgagatagatgacttgattcagaagcattcaactaggaggcctgaacctcaaatgtctagagatggttctggttcgtcttttcgaacttcgggaagccactccaacatgcactcagctttttcgtgtcagtggcagatgccacgaccaccaccatcacaacaacctactcctacaccctatcttccctaaatgtatggtcccccatcacagcatcctccaccgccatatcactatccttacatgtatggccctcaaccgcaacaacctcagtcgcaggagcctatgccgccttatgtctatcccgaacatagagacatgcctagatcttcatcttttcctcagcagatgccaccatattcatggcctatgccgcctatgtcgtcgatgccacaacagaaatcacaaaatctacacagtgagagcgaggatagggaggatgaagaggcagctgtaaccagataatttttattatatactgattataattattattattacataattattgtaagcttccatcatctttgtgtctagatatatttgttagaagtacttgataataatctagctccataaactctatggttgtactgtagagcaataataatagtactcatcaacaaaatcataatgaacagacccttattaagtactacttgtttactactaaacatggtcttgttttcttgtgtttagatatatttgtttcacttgaaattgtgagaataagttgcataattatatcatcttaaactgaaactttagcttgtaggtgccttcaatcttttgtctaactaaacacttatttttgttttaaatttctttcacttgggtatcccacccgatgagtgtgcttatatttactgatttcgatgtaggtgctgataggaagttacttctgccgcatggattgtctatgctactagaccagaagttggatttcgatgtcggtcattattatcgctttttgttgaattaccatactatgtacattgcttgatacatatggtatcctgaaactggaaagtttgaaaatgaattacaccaattcatttgatatacaactttttctttgtaattgaaattcaaaactatttacaaattgaaattcatttgatatattacatttaattgttgatgttaaataatatagggttgacaaatgatactaaatgttggcatacttgcatgcgaataggggcgacattacatttttagggatgatttttttttgctcctaatttgcat

SEQ ID NO: 26146 - DNA, 1683 bp, Cannabis sativa
tctatctactttttaatctctctttttgaaattacctctcaaaactcatctgttgatctcactccaaaaatcataagtgttggtggtatttatatataaaggatatatggatcccaaatttgatggttgcaaatgctaagtagttaagttagttacgagttaaaaaacttaacaagctctctataacaatattcccacatcgtctttagttaaagcactctcagatgagacgtacgcttcctgaaagaaagaccaaagcatacactgaaaggacttactgtataggaaaagagacagctggagtcaactatccagaactcccttccaagagggaacaactagacattgagaactcctttccagagaaagactagctttcttaaagacaacttctagagtggacaagatagacttccaggaaatccctttcgaatgacatctatctctccacgagacatctttcggacagataagttagacttttgggaatgcccttccaaatgatatctaactttccatgagaacgagtaacttttggagatcttttaaatttggaggaactataccacaagttcaaactagtttcttcaaattaaaattaacaattgatgaagaaataatgcagccatcatggttggtgcttcagatatctcagtatactaacttttgaggttgatcaagtctaagcaatgcttgaatttatttactgttaagaccttagtcccaacatcattagaattatcttctgatatgacattctctaattcaatcaatcattattctatcttctctctaatctagtagagtcttatatctatatgtttgctcttttcatgataaactggattcttgaaaagatagatggatgactgtctatacgagtacacagtcactcctcctcttagttgtttcaattctaacaaaattcctcaaagccataaagcttccttgaatgcttccatagtggccataaattctacttttgtggtggaaagagcaaccacagactgtaattgagcctttcaacatatacagttccagtttgtcatgaacacgtaggaagtggttaattttctagtatctatattcaaggcatagtaaacatcaacgaaccctttcaactatagttctccttttgctttctattataggtcagaccataatcctaagcgcccttcaagtaatttaataaccatttaagagtcatccaatattcgatgccaagattggacatgaatcgggttaggatgcttagaacattaattatgtccagtctattgctcttcattacatacattaaacatcctaaactactacataggtacatccttcattttctctttctctttcacacttttcaggcattgttcattcgacaaaaaaaactatccacccaacggtatggatgtactctttgcatcttccatgtcgtacttttgaatagctttcttgatgtatggagactgcttcaagtgaattgtccctttatgtttgttccttgaaacttcaataccaaatatcttttgaactggtccaatcttttttatctcaaattctctcttaggcttggctttaatacttttgatcattgatttatctttgttcatgatgaacatatcatccacatagagcaataaaatcacaactttcgattactcaaaactattgacactacaacaatta

SEQ ID NO: 26147 - DNA, 1375 bp, Cannabis sativa
atttccaatggctatagagaaacacaagcaagcattcgataggtcgtatgtaagggtgtttataaaaaacctcaatccaatctaatctaattaaaaagtattaatatttttatataaattcgattagattaaaaaatttaaaattcgtacttatactaatcagatattaatttatatgcaaaagtaactgattcacactatgagaaaatagacttttgtcagcataattttgtatcaggaattgcaccggcaaaaatctactaaatgtgtcgacaaatttttaccagcgaagaactctgtcggtgaaagttgtcgacgcttatttgtcaaggaaagtagttttgtcgttgcaaaataaaccttcgtcgacataggttgctttcaccagcgtataaagtcagcaatgaaatatgtgtcgtcgacatttacttgccagttgagcctcatcgagaaagtttttccagcaatataatgtgtcgacaaaactttcatgtgaagctggattactcgcgagaatgttatactggaacattggcaaaattttcctacaaatgaggatatacacaaaatagtattgtcggcacatcaaactgcactgacaatacatgttttttttttaaaaaaaaatttaccttttgctggcgctgaaaaatgccaagcaaaagatttgtataatttgtttcaaaaaaataaattggtgcaattgaaccaaatgtaaatgtaattttaatgtaaatttcataattcaaaatttaaaataataccctaagggctcgtttggtacactgtcttgtgttgtattagtattatttaatacaatactatatttcgtattaacttgtattaatagattgtgtaaatttataatatattttcaataaactcaaccccaacactgactacgagtcgggtccgggtctaagtttgggtttgggtctcgggtccgggtttgagtcctagtccaggtctaagttttgggtcccaggtctggtccggtcagtatttgttctgtgtctaggtctagggttcgggtctgggtcttgtcccaggtctaagtgtgggttcggtcacgagttctgggtcctgagtccaatctcgatttcgggtctgggtgtgggttcgggtttgatttcgagtctggttctagttgtaggtctaggtccgagtcctaggtctagtccggcccgagtcctggtctaggtccctagatgcgagtaggagaatgaggttgaccccgaattctttaaaaattttataatacaagctaatgcataccatttgttatgtattaaataatacaatttatattgtattaataattttggctataataattaaaacaatacattattttatctgaacatagtgttattta

SEQ ID NO: 26148 - DNA, 1295 bp, Cannabis sativa
atgattattagttttaagttttaggtctatcagtatctgaatcacatcatgtttgtcaaggactttgttcatgtaatatgcttgttatgtgctttaaagagtgtacaagaacttatcctagaggggtagttgtttgctcctataaggtttaggttcgagtcccttctatgtaccgacatagcaattattagtttcaagatccccaatagagaacaaaatcataactaatagtatcctttcttttcaaacaattaaccaaattgaatttggtgtttgtaggtgagtcttctgactgacaatggaaacaccaaggacgatctaaggcttcccaccgatgataatctgcttagccaggtacctcactttgaaactctaccgagtttagacctgtccttttcatgtattttaaccaaatgtaatggtgttgtttatgatgtgtatagattaaagatggttttgctgaaggaaaagaccttgtggtatcagtgatgtctgcaatgggagaggagcagatcaatgcccttaaggacattggtcctaagaattaaatatgatcacaatgatgatgatgctttagcagtagctattgctgatgaaagaaaactacaactttatagatttctattttacaaaattgattacaatgttgctgacagaatgttatatcaaccctttgtataatgttgtgtgcaaaataaaacgtccagttaagatggtattaaagctgtgaaattacctaaaaatggtcttgttacttacaaggggagctttctatctggtttttatatgttggatcttgttgtgattaatgtttagtgctggtttaactgtccaaaattgtgtttattaagtagttttgctttttaagtgttgtttgataaaatttagagcacgactgtggtgggacggagctatgttgtcctcaattttggatagtttggcaccttaaggtgttcaaaagtgatcatacccaccttaagatgcattttcaatgaggattgaaaaatatttgatgatatggatatatttttaacatcttttaaggaatgctcactattagagtaaaaaacatatcaagaaagaatgttattgtaaggtgtcctttatattttctctttattatttcttttattataattttgtcttaaaataataaaaaaaaaatatttaatatatactaaataataatattattgagaaatttacaaaaatactggaatttaagtgaacttttataaaaatactgtcacatggaatttttttcaaaaatattgtgtttttataaaacatcagta

SEQ ID NO: 26149 - DNA, 2167 bp, Cannabis sativa
aattcaaatttgttattaatataagttggttgcaaatatcatcctctttaccaaaatagcttcctcaaaattttgagtgtagtcagcaaatatatttttggacaataactacaatgacatggcttagatttgatagcgtaaccactctgtacaaattttagttgtatctgaatatgttcttgatgcaaacatttaatcagatcatacatgagtgcttatgtaacttgggttcatttgtttgcatttaatgagaaaatttatgtgattcggtcatatttagacccatttggatcatttgctttttatttgttaaatccacttttttcctcttaatacaacttattcggtcggatgtgtgttgcacatttaattttttttttatttattcacaatttctttctctatatattatttacacatgtatataacatcaattcataccccatacttcaaatgaggtcatatctcatatctcttatttataaatatataaaatattagtaatttattttattgttttaatgtgtactattattgtggtataattcctctaaatcaaaaggtctctgccgacatcatttttggatagttgttcactagcaattatctgtccaagaaggagtcttgtggaatgatggtcgagtccggaagggagttcccggatgactatcatgtccactccgggtccagtcttaggaccactagtccttccctagaaaggagttttagttggctagttgtcactcctagaatgatagatttggatagtcaactccagcagattatatcctatccagaagcgtctccagcgacagtttgtcaccctcgagttcagaagatcatttatgttcacagaggctctattactttagatgacgtggagactttgctcaaaaaggagtttgttaagttagttatttctaactaacttaacgatcttgtttcttgcagccaccgactttaggatcttgatcctaagcctataaataccaccttcacttatcattttaaggtgaaactgaatacacaagtttgagaactctctgcagatgagattttgagtttaagagagcaaagattgagaagtagagagagaggtgcagagaaaagagagagattgggtttgggttttctaagaagaatcgtctgtagatgaagaagattcttgagtgtaagtatgaagtgttgaaatactttgtgagaactcaaacagagaatctcgtctcaactgtatgtacctattcttgcgaaatcaataaagaaagatcatggtggtgttctagaactggagtagagccataaatcacatcgatctattaaacttgaaccagtatatatcttggaattgatttatctattttctgcatttattgtttctagttttaatactctatttgtccctatttttctgtcgattattgttcttggtctagtaaccttgtcattgctcactatttcattgtttaaagtttagttattttgattctgcactttagtcataattttcccacaaattagagcttggtaattgatatagaacgcagaattaatcaagattctttcggctgcgttcttcaagaaactttaaatgtcatcaatggcaagattcaaattggaaaaaaatcgatggaactggggactttgctctatggagagaaagtttgaaagggatccttgtgcactagaaagtttccaaggttcttggagatgagaacttattggcaaaaaaaaaaaaaatcagaggaaaaagcagaaatggaggagatggcatactacacgatcatcatgtatctatgaaatagtgtttgaagaaaactcatcacacagaaggcgacaaaaggagttttggataaattggaagaattatacttaaaaccatcgatagcaagcaagatcaatttgctagaaaggttatacagttttagaatgattttgtccctttctttagatgagaatattgatagattttaatgagatcatttgtaagttttcctaacataaatcacaaggttgatgaagaaagtcaggccatcattctgttgagatcacttccaatcgcatatgaagaagtcaaggcagccatcaagtatggtagggatgttattgcattagaagatgttcttgccgcacttcagtcaaggattttgagttacagttagaaggaacc

SEQ ID NO: 26150 - DNA, 3976 bp, Cannabis sativa
gtatatggttctagtacatcaatgtcataaaaaataaaaaatacagtgagagaatgaagagaagaacgatccactgctctaccagcctcaacacacacatacaaaaataagacaaatgaattcaaaaatggaagctaaaattctagtcaatggggaagtttgtacagattcagaataagagtttccatgaagaaaatcatttgcagactggccacgaatataaaaaaaaaatgatgacatgaaaccggggcggaattaaaactctagttgcttacctgcatgctgcttgatagaacattattttgacttccctcttcaatatcccatgtttcttcctgtcattgcaataaaaaaaggtgatttaggaatgggtggaacaccaaatgtaatacatctaaaaggccttgcaattacctgaacaagcttctctaaattctccattagtgtcttctcttctagttctatgtatactgtcaagtgaggttcaaaacaagatgaaacaattccacggaagttgaactgccaaatgaaacagtacaggtatctttaatatataaaatcaaaattataacataaggaaaccacaaaaaaacctttagattatgatggccaaatatgaggaatgaaagaaacgttaaaccttctcaactatactatgtttggaataactcatttcaaagaacataaattagcaatgtctcaacattttcggcatgaattacacgtaaccataatgcagtcctttaagtcccttgtttttaatagaataacaaacaggagcaaaatttcataattttcttattatgaccctgtgaaaataaagagattgtcttatgtgagttacgtaagaatttcccacagaagaaaacccccgtattagattctgatgttggagaaatatgaatctgagagctatcattactttccatttcttgagggaaaaacaaagagtcatgcaatgggacatgccagagaatccttcagtttattatacaagcatacttgttcagggtagcacatatatgaggagatatacagaaaaataaaaatggtatatgtaccccagctccaggtgccgacaactctttgtttcctttcttttcctgccaacgtttatatgaaaatgatgttacaattatatattaatatggaataattaataattagttaggttgagacaacaataaattcagaagcattaaaaaaattaacaagcatacctcagaaccattttcctggtgcgcagcaagctttttttcatacttcttacgaatatctgaaacattttgaccagtttcccctctaccgatttcttcaatatcattccctgtctctttgccttgagctccccccccaaacttttctgccaattcatcttcaaattctagagttcgctgcaaagcctacaacaccacatgtagcaagaagattgaaggaagagattctgaagtagaatgaagcgcttaaaatttaaagaagaaatgctcgaacagatcattagaaccagtgtagcatattgaccaatcagttttagtaaaaccatttataatgtccccaacactatttgtacccagtcagttgccaatactacttgcatacactagatataccatgaaaaattacaaaatacctatctacatatttagaaaaacattaacctcatagaatcctcattcctcaagagtaatatgactacagatgaacaactggatgatggcattgggtaagtgtcacaagatttatgaggtttgtacaatgttaacactaaactcaatagaagtatatatattttgatacaaatgctcctggatgaagaattcaatagatatttttaatttaggaggaaaagaccaaataatatataggcatgcgagcacacaaggagctattctatagtaatgcatgctgaatttaacttgctacactaaataatatttatgtgaagaatattgagggcacatacaggaaaaatgaaaggcattaataaaatatatatagcctaccaacaataatgttccaacatctggcttctccttcatattattaaggatctcctccagttgtttcctgaaaacaaaacatccaataacctcaggttctcgaaaatccaaatattgtggctttaccattagagtggggtgaggagagataataagaaaatttcccattgaaaataaagacaatacaaaaaaaataggagtaaaattcaaacagcacgctgtatattaatgttgtgttacaatgacaaatgcagcattcattttgactagttacacagatttagaccacaagattccattccatacacaggatattttaagtttcaaagcaaccttcaatagaatcaaattatagcttccatataaaagagaaagaacaaaacaacaaaattcacataatgaggataaagagatcataccttgtcttcttacagaactgaatacaaagtcgatatggaacatgccacggtagaggaaatattttccaaatctcttcatttgttcttattcgccgtttgatccatgcataccttcgttctgttttatccagcttcgcaagttctaaaggtatacaaaatagttcaaaatcaagaaaatttaaatgaagatttgaataaagaagctaaaataataatttgcaaaaacaacaaaatgcaaactgagacaaaccagctccttcaaagatttgttcataagatgtaagctctctgctacaaaagttattcaccaactcttctctaacagatggctctaaagcatccacaactaaacaagcatcagacaagtgctgaagtaaattagtttcttctgtttctttcccagtacctaagctgagattaaaaaaggaagaataaatacttaggaagcagatacaggtagtcttacatttgaaaataattacaatttgtttttaagaaatcgcaaacaaaagacagaattctagcttttgttatctagaaatcaaaataaagacagaattcaaatttgctgttatcgagaaatcaaccactaaactcacacgtacaagttcagcaaaagatctgatacaaaactatatcacagacatagataatccttgtcccttgaccaagtttttcccctaagtacaggaaacgaaagttgtaatgggaaaaaaagttggggccattatgtaaacatccagcacaatgaaactaacaagtttaaaatcatttgagatatgataagattgcagtcaaaataatcaactagtattcatcaaagagcaaggcaaatgaaaattcaagaaacaagatacagtataagtttaaccagaactacaaacaagaaattgatcctaatcattgaagaaagagaatagcttctggcagtcaatctctaaactcacacgtacaagttcagcaaaagatctgatacaaaactaaatcacagacatagataatccttgtcccttgaccaagtttttcccctaagtacaggaaacaaaagttgtagtgggaaaaaaagttggggccattatgtaaacatccaacagcttcaagttttaaatcatttgggatatgataagagtgcagtcaaaataatcaactagtattcatgaaagagcaaggcaaatgaaaattcaagaaacaagcttcaagtttaaccagaaccacaaacaagaaatagatcctaatcattgaagaaagagaatagcttctggcagttttttccataaattggcttttatgaccatacctcgagaaatcagagaacacgtgtgatttaagtatttgcttgatgttcttaaatttctctctgagctctgtgatttttggaatatccctataagcttcaaaatgactacacaattggttcacagcctgaaatgaatcatgaactatatatataagtagcaattgaagaaacattaatttttattttttgaaaagaaactgaacttgaattaaaaaaaaaaaaaatacaagtcagttaagcaaacaaattaaaacagttta

SEQ ID NO: 26151 - DNA, 2658 bp, Cannabis sativa
ctctctctctctctctctatgaactcaccccaaggactcaacccaccaccataaccttgatcgcttctctccataaccacagacccaacgacccacggaccccatgacaattgcggacccaatgacctccatcagccacgacttttccatcaataatgtcgtcaaaggtaaatattgtttttgtttttgttgttttttttgcatgatttaggattaaaatatatgaaattattgatatgtttatttagatttagggttaacggtctttgatttttgagtttggattagatttagggttggaatggtcagatatgtgttttggggaaaattttgattttggcctggtctgatgcaagcccaatgtattttttgttattaaaaagggataaaggttgaagacaatagcccgatataggtcttatgctgggcttgatatagggcccgatagtgtgcctaagttttatgcttttattgtaaggctcgattggaccgatgtatggttcgatatgaggctcgatgtatggtcacaaaatagcacaaaaatagatacattatcgggccttataaaaaagcataaagcttagacacactatcgagccttatattgggcccatcatcgggcctacatcgggctatcgtcttcaacttttattcttttccaacaacaaaaacatatcgaactaggccaaaaaaccgaattttctccaaaacacatatccgaccattctaaccttaaatctaacccaaactcaataatcatgcaaaaaaaaaacaataattacctttgacgacattgtcgatggagaaggcgtgattgatgaagaagttgttgggtctgtggatcgttgggtatgtggttgtggtggtcgtggagagaagggaccgaggttgtgggaagtgagttgtgggtcgagtcaagtcattcgggtgagtttagagagcagagcaagagagagaagggaggaagagagagagtcaggtgtttgaactgggatgggtagaattggttttatgaaatgttagcctattctaccaatatgggttaacttaggtttaaggaaataattttaatccaataaatgcatagaaaattatatttccccatttgttatcatagttatttttttttttgaaaggattatcatagttatttagtttaaaagagaggtgaaaaaaagtgaaaagtaataactcaaattcagcagtcaacactcgtctactccctttgaaatgctttactaaaattttaattttctctttaattttaccaaatacagttacattatttaaatattagaaacataataaaataaaataattttttcaagaataaacaaaaataaaaggttaaaaaaatatgtaaaatattgtaccacataaatagttgtaaatagtttggagcaagtagctaaaaaagttaagatggagaaaggcttaaattgtttgatggggaacgaaagcaagattttagttattaatatttcttattttattacctcttaactattataaaggagcacttccaacaacttgagtggaaaaggcctttgatagggttgagtagaattttttcaaagctattcttctccattttggtttccctgctaggtttatctctctcattttaaattggatttccactgtctcctttaaaatcttggtcaatggatgtctctcttaaagtttccatccttctagaggtatcaagcaaatggaccccctttctcctacctctttctgctggtctctgaaggcctctctgatgccatctgtgctcgtatgtgtgctaatcaatttaagagtttttctatatgcagaactgtccctgtgatctctcacttgttattttcaaatgatagcctactgtaaagtcatctctcacttgacctctataataaggtcactggttagtctgtaaactttgacaaatcctctattcttttctctccaaatactagcttgtctgataaaagtattttttttacaataattagggctgtctaataaggattttatcagtaaatacctaggagttcatcagcgttggtaggcttaaaagttctttccactatcttctacaaagtgttagttctaagatcaatagctagaatggcaagttcttctccagggctgggaaagaatccctgctcaaagctacagtccaagttatcccttcttatgctatatcttgtttccgtcttcccatgactacttgtaaaatcctggagagccttatggctaaattctggtaaagttctagtgttaacaagaaaaaaatcattggaaaaattggccatcactctgtgttttcaatttttttagttgtttgggttttagatccattgaccaccacaatgaagctatgttagctaagcaggcttggaggatctttcttaaccctttgtctcttttgtctagattgtatttcaaaaacaatgattttctccatgcctccaaaggtcattgctcttcggccagctggagaagtattatgtgaggaagataccgctcttgaagggtctgatttggaaagttagaaatgacacttctatctctactattagttcctgttgtgttcccaatgttaaatctcttcaatttaaagaaaaaatttccccttaatcactcggtcttgtattttattcatgataatgatac

SEQ ID NO: 26152 - DNA, 3758 bp, Cannabis sativa
ggattgaagctagattggatagagctttggtgagtcatgatttgctgaccatcttcccttcgaacaagcttattaatttagaagtctctccttcggatcattgtcctctgctattggaggttcaattgggtacttctattgttcaagaccatcactttaagtttgaaaattggtgaacaaatcatcaaggttgtgaggaggttattcatgactgttgggatagaatgttggggcatggtattgaggagaaaattgaagaatgtggcagtgtgctacagtagtggggaaaagatagcttcggtagtttctctactcgtatcaaacattgtaaccgtgagcctaagccgtataaaagtagaagggatgatgaggggaagaaacctttttatgagtccaaaaaataactttttatcatgcttagtcaaagggaagtgttttggagacaaagatcaaaacaactttggctgaaagagggagatcaaaatagtaagttctttcattccaaagcttctagtagaagacataataatcatatattttgtttaaaagctacttatgggaacttgagacacttggagaatggattagatcatgtgatgactgatttttacactaagctttttactggtgagtctacatggtgggaggaggttcttgattgtgtgacaccgacagtgcgtgaggaccataatgagattttgcttcggccgattggtgattaagaggtcaatgatggtgtgtttgaaatgcatccagataaatcttatggccccgacggtatgaacccaaaattttttcaaaaatatttgtccatagttagaaaagatgtgattaatactcttagaaactttttctgctatgagcaaatgccgagtagaatgaatgatacaaatattctcttaattctaaagaagaagatggaagatcagatgagtgagttgcatcctatttctctttgtaatgtttttgctaagataattactaaagttcttgctaacaaaatgaagggattattatctaagattatttctttgaattaaagtgcatttattcctgggagactgatcacagataacatcatggttaccttttaaattttgcactacttgaagagaaagaaagtaggcaaagatgggtaaatggtgctgaaatttgatttacgcaaagcttatgacagagttgactagcattttttgtgcgcaatgctgagacaaatgggtttcgctgataaatgggttcggcttatttttagttgcttatcctcagtgcaatatcagattgtaaatacaggacatactttgggatcgattgttccaagcagagggcttagatagggtgatcatattcctccgtaccttttccttgtgtgtactgaaagtttatctactgtcattagaagatttgaggaaaggaagtggattcatgggattaaagtagcaaatggttctccattggtgtctcatatattatttgctgatgatagttttctctattgtacggctaaaaatggggaagtcactcgtatgctacaacttcttcatctgtttactatggctactggtcagcaagttcactttgacaagtcttctgtgttctttagtacggatacaacatcaaaaacaagacaagaaatctttgctagaatgggtattcaggaggcggctgagaatagcaaatacttaggtctccaaagtacggttggtagaaataaaaatgttgtttttggctaattgaaggataaggtgcagaaacggattcaaacatgggacaacaaaatcctctctagagcaggtaaagaagtgctaattaagtcagttgttcaagctctgcctgcttatacaatgaatgtctttcttattctagttggaatttgtaatgacattgagcgatctattagtcaattttgatggcgatgttcatcaaaaaaaaggtattcattggatgaaatatgccaaattatcaactcataaagctaatggaggaatgggtttccatgactttagggactttaatcttgctttgtttgccgagcaagggtggagacttctcacatgtggtgatagcttgatggggaaaattttcaaagctagatacttctcctttggctcctttctttctcctactttgggattaaatccaagttacatttggaagagtgtctttaaagcccaaagtttagttcgggcaagtgttagaaagattgttggtgatggctctacaacaaatattctgtctgatccttggttaaaggatgaattgaattcctttattgagtctcggcatccaactcttgttgggaatgttgttagttctctgatgaagaccaacttactagagtgggatgaaaaaattgtctcagatgtgctaagtgtgagagatcaagctttaatttggaaaatccctcttacaagaagctttggcaatgatacttggtattggatggaggaagacactggtttgttcattgttaaaagcgcttatgcattgcaggaagtaattaatggtagcaatgatatggattcaaattcggggatttggaaacaactttggcagttgaaaatccctccaaaggttcttaatttttttatggatagtctcttctaactgtttacctataagatttcagcttttgacaaaacatgagccaatcaatactcaatgtccatctgtgctgtagctcccgaaacatctttgcacgttcttgttcgatgttcttttgctcaaagtagctggagcatgtcacgggtacctagtgtggctactgctgcaataacctttgcagcttggtttgaggaagggctgagttgttggagcgtgtccgagaggttggaggcggccatgctttgttggtcgatttggaagcacaaaaacgagccagttttgaactctaaaaggcctgaggttagtgaggttctgacattagctaaattgaactttattgactgatataatgctcaaaagaataccattcctattgttggagttagtggttcggttgatgcaaatttggagcattggacagctccctaatttcatacagttaaagttaattttgatggagaaattttcacaaatgaaaggcgttttggtatgggttttgtggcaagaacgacggctggggtagtattacaagccaagagtttgatcagagtagatgttttgcagccacatgttgtggaagccattggcatgaaggaggctttaagttggattaaagtaaatggttcgacaaatgtagtggtggactaggattgcttgagagtcattagagatttaaaaaggttaaaatgtatggcttctccttatggctatataatctcggattgtatgactttatgctcggaaattgttgatctttcttttaattttgtaaaacgatatgctaataaggttgcgcatgctattgcgcgatcttctccctttgacgctgattgtaatatattgcggatgtgttacctatggtttatgcatccttaataaatttcatcattattcaaaaaaaaacttagccttcacacaatcaaattgctgctgcaacctgtgaaacttcagtcaattatttaaaccagattttcaatcctaaactctaatattaattcagatgcttactttgaaaaataatgcaaagatgcaaattaacttcaatatttgaaaaacatcacatcaattctactcattctaactttccacaatccaatgatcaatatgcttgcattacttacctcaatccactaatgtcaacaattcttgttcgaaat

SEQ ID NO: 26153 - DNA, 1922 bp, Cannabis sativa
aaaaaaaaaaaaaaaaaagtatgccgtgtgaacagtgcacggcatgtagcacacacggcaatttagtgtaaaatttgatgttacgttggaggcctaatgctactgcatcaccaaatttgatgcctccttggtgatgctcttagaccactcacaacagcattaatattttttaaaatatttcactaaattttggtttttttttctttattttacctcaaatatttatattatatattaattttttatatatattttttatatcattgaaatattatattttattaattaaaatgaaaaaaaaaatatgaaagagtaaaaagaataattaaaaattaattaatggaataaaagagaaaaaaaaaagtttgagataaaatataataattaagggttgacaatatttattggagcttaattttaagctcttaactagctatttttttttttttttaacttttaactattatctcacttataatgagtgatcttaccattaattatgaggagttgataatccaaagcatcccatattaaattagactaaattttatattcaattacactattaataatattacactttgaagaatactaaacagtgctaagtacactttataacatttctccatattattgatatgtatataatatatgatcttttttccaggtatttaagttaaagtttactggtttgggttcaacatcttttgcaccacaacacgttctctaaactaatggtgtccgtttatactaagatttggataaaaatcgtattggaaattaaagagtactttttgtgaatctgttactgtctgtctgtcctattaaaacacgtgtccaagtttttgataattattggagtgaaaatacacgaatatttaatttaagctctcatcttgattcagcattaagatcaatataactgttcacttttaaggttctaaatgttaattaagtgttaaataccacaaaaaaattgtaaatcaataatataattggtgcatgtcaatatcgataattgtgagatgccacttcggtgtgaggttgaacaatgtatattttgtaataataatagtaaccattgttatttttttggtgctataaattatttacaagttacagaaaatatttgaatctaaattttttcggctaaaaataaataaagactgttaaaagacaaaattgtccccacggtaaaattttcacgtgtgtttgttactcttcgatatttgtaatcctgggtgttaaaattaagggcatttgaatcaaacattcaaacccccaagtcgatacaattttattttgtaaagctattaatcatttcgataaaataaaactgaaggaataatatatctactatttatcatctcgtttatgtaatatcttattactttatttttatttttggttaatgttaagacaaaaattatttgatgtattgtttaattaaacaacctaaaattcccattataattggagaccatgttcgaattaaaaagaaaagggaaaaagaaaattcatttgatcgataatgataaaatttgtattaaaaaaaaaacaaaaacatttttattaataagccgaaaagctcgttaatgcatttatagcagtttcatgtaggaatatttacaaacacaaatttaacaaatatctatttttttaaaatgaaaaataacaaatgagttgtgatgtatcgtatgtatatatcatttggaagaaagaaaaacgatcacgtagtcgagtctggaccatctgcaatctcatcaacaaattaactatttgatacataggtgcaattatctgtcgtacgtatattattaaattatgtgtatagtatagtacgtcttcttatttatttttaaaggaaactataattaaccttatttaaaaccgctagaagtgagaaattatcaacacaacta

SEQ ID NO: 26154 - DNA, 2508 bp, Cannabis sativa
ataactaatcagattgtaaaggattttatttagggcacaaaacccaacagatatgtctagttagcattgtgaataaggctccatcaaagttaagtttatcccacgaattttccttagacattactcatcctaactggagagattaatgaagatcatatcagaaaaggaataaaataaattaattataaagaaataccatatataaatttagtatttattacataataaaccatttatttttacttgagtaagaatatattctcaattaaaacatcacagctcgtgctttacaagtaagaaaacaattaggaaataaatgaaaaactattctcaaaaagaaaaatcagaatttgtaaacattcactgcaccaagataatttttcagcaaagtttccttaaataattaaggaaacaaaatatacatcaacgatacaagttgtacaagatttcttgagaaacaaatcagattaattaaaataaatattaatactttccttaaacataaaaattcaatataagatattctaaataagaaaattgcgtatttatttaacaaatataacacaattcgaatttaaaatttttttcataccaaatcaaaatctcaaccttattttgaaaataccacacataattaattttgtcatctttaccaaatataccaactaaagattttacaaagttaaaataaatggtgatattttgtttatatgtatttcttttacattttaaagtcgatattaaacatcaagagtgtaattggacatccaattgaaataccgatctaatccaattagtagttgtattggatcgaattagatttttaaattttattagattggatcggatgataattttataaatccaattactacttggatatgggtcggattaggagaaaataattggactggatcgaataatcctactttctcgtgttgatttagtggttgcaaactgtaaagacttactgcaatctttaagtggtattgtattacattttgttaaatgatctattgatcaagctacacattttcttgcgagacagtgtggatgttatgttgttcgtatatttgaggagggggtgtcccttctaaattttatgctattttttttagaaatttgctctaatttaatgaagatgatttttattaaaaaataattgcatatatattttaaaatattatcgagttatatatatatttaaattactaattatcatgtttatttgtctccctttttagaaatgagaaataagaaattattatattagtttcacaattatgttagtttaattacttcttaaaatagaaatacttactggtgtaatatcactaaagtaaatgtgtcatattattatttttgtaatttaatatcgagtgtcacaaaccaatgataactttctctctcccttctctatttctcttttgctatgattttaatcattttttgtttctctcaactagaccctctacaagctctacctgtgtggttctctgatgccctagctgagaggatatacatggtgggtcaagagtagcgactaacttggggtgcttcatcttctctgttatttggttctatattccttcacagatgactgtgtgtctgcatcgtgggtgcaacaccatattcgaaaggatggcttttccaaggtcagtctccttggtggctggtaggcgattgttctagtggattgttctcttttccctttcgagggagatcgtggatgtcctttgctgcttctaaagggtttggggtggccttttaggatatgtgtcctctttccttgagtggggcgttggtggctttagcttgttggttcttggtggctacaatggtagtgattgcacaataggggttcatatctccttaaaccctagatagtggcatgtcatgtggttgatgctagtgtttccaaccttgggcattctgtgcaggttgtaattggtgagtagtggacacgagcttcagaaaagggcagtgccccctcatgtcattttttatcctttctgggtggttctcatatgcagttgtttcagtcatttgtttggttagttgtcaccattttcgtgttgtttaggtattgttttcgttattttttggttttctcttgattgtgcaagctctttggtcctaaacatttgagggattttattctaacaataatctttgctttacttacttttattatgtttaatcttctcatatctgttgttattgatcttaatccattgagttttcattcattatcatctctatttcattttgagtaaataatttttgtttatatgcatgtctatttttatttttattttctattatcaagattgataattcatctcatacatatgaatatgaattcttaatttttcaaaagaaagtattttcaattgttgttattgattaggtaaaattataaatgtgtagcaagtagtacacttaaaagtgtagtaccacaaccgtgcccatacatgataaagagaaagtggcaactaatgtgggaga

SEQ ID NO: 26155 - DNA, 4328 bp, Cannabis sativa
tattcaagatatactatacactcataatttttaataaattcacttttttttatttatttatttttttagaaaaaacaacctcattaataacccttccacactaatagaatgattctaaatggtggatccaaagagatttgttatttgcaattcttttcgtacaaataccaaataagaggattttaccaatcctagcattacttcattccttccccattttctcatttctctctcatatcttcataaaatattcaattttttacatgagattttttccttacattcttatcatttgtgattttttattctaaaattagaatgaagaatatgagaaataaaaattgttttgcaaattaaaaaaaaaaaaaacacatatacgatattggtagtagaattaatttgttattttttttttcgagtaatatctttgtcattattattggtattttatatttatgaattagctaataaattataaaaaatgtgatttaactcccaattataaataattacttaagtttaatttttgacgattataatacataagttataattttagaacttctgaaggtacctaactattaagtgttaagtaaattatcacgtgacgtgacaattcctaattagtttaagtcattaaatttttattttaaaaaaatagtttaaatataccaataaaaaaatgacacgtagatataatgacttaacatttaatagttaggtaactatataattttagaaatataacttaggtattattagccaaaagttaaacttaattatttatttgcaattgagagttaaatttatatatttatgccgcaaatttctcttaaatatatataaaatgttttcggtcatgtttgaaatctaaaaccaaataatgattttttttctttgactatcacaagaattgttgtaatttttatgaaagaacaaatctaaacagcttgtaatcagccttaattgcataattctgtccaagaagatcaaaagggcaatgttacatctataagaaagcttatgatcaaagtcaaagacttttacattgcatcttatattcattgtataaaataaagttttattacgtttttgtgaggctctttgagtgtgtttgctgtagagtcttttcattcttaggaaaagtgtattttctaagaaatttgagatgtgagtgagctatcttcaagaggaagatcattatttaattgggaaaagaaaaatctaatatatatgctttgaaatgagttcaatggtgaagaatcaacaagtcaaagggatctcataataatatttttcaggaaaaagattgtgacatttttggaacaaagtgaattttaatatgaaatatatatgattttaaaatatgattgtgacatttgtggataacatattgcatcaacataacttaaaatttattatttttattacacattaactaaatataactgtaaaataattttaattaataaatattatttttaaaaattaaaatactaaatataatttcacataacttatcaaaattaaagttcgtaatacacataatatgacatataaaactaaatataaattaaaaggtaataaatgataaataagaaataaaaatagatatagaatgtaattttttcaaaaataaaaaacaaaatttaagtctttttttactaggtaaagaccaactcatgttgaaaatacttttgtgtgttattctattttttttttgaacagcaattatgtacatattagatcaccttgatcttaatttaattagcaggattaacaataactatttaataattaatctttttttttcttaaaaaaatcaatatgttcaaggacttcatatttttgttccagttaagggatttaacataattgtcttgtccttgaaaatataaattatctatgttttatctaagttaagaaagtcattaattatatcgacttctataaattttcaaaataataataatttcaattttatacataaataagtatctgtcctcctaactccaaagcttcaatttttttagcaatattaatattattattattattattattatgaggaaaaagcttcaaattggcgtaccttgctttctacaaagtacatttcacaattttttattcccttttaggtttcgaatggataacatttgtccctttttttaggataaataaaatttaccttattcttatatagaagtaaataatgagagtatgaagctatgaatcattactctgtagtctctgttgtgatgaattaaattatatttatttttagtagatgaagaaaagaaaaaaagaaaaagaaaaagaagaaatccctttttaaataattaaataataataataataataaaaggaaaaagcttacctggcaaaagttgggtagaatggctccactagtcacatggtccaagtaaaaatcccaatccgatttaatagtattgcttaccaaacataccctaaataagtaacaccaataattaatatttcaccattatattccaaataattaaaaaaaaaaaaaaaccaactaaggccttcaaataaaaatacaagaccagctactcgtgtcggcgtaggacctaacatacccataactttctttcttcaacacaaaattaataattaaaaattaaattgaatctattatgggagagagagtgaaaaatgctaaaaaagaaagaaaaaaactttttgtgtataaatcaaattttatttttatttttgatttttaaaaatttatgattcaataactactaaccatatttttctccactaaaaattaaaggaaagtgttacttgaaccttttattataatctttatacttaatgaaatatattttttttaatttttttataacggtgttcgttatatttacaatatcatctttgtaaatttttaaaaattttcgaataatttacagttacgaaaatacctttgaagttttttaaactcgagtactaaagtggaatgttagaaactttgttttcgatattataaactattcgaaattttacaagaataatactataattataacgaatactgctataaaaataaatatttcctcaaataatttcgaatgtagaaatcgactaaaaaattttaatagaagattgtaattaagattcttaaaaactaaatcactatatttttttttgaaggaaaatagttcttggagagataaaaaattagatctcgcgattattacacaaaatgtttactaaaataaagagtacagataagtaaaccatactgattgtagataaagattcactttacaacaaaattacgtgatcaactaatacaaaaataaacaacccacgaaataagaagaaagactattataaaataaaaagtaattctcaacttcctatcttcgctattttagagatttttttttttattatttaagcctttatatattagacaatacgtaacctgaaactcgaaccaattacctctacctatatactctcgagctatttcagagaattgatcattacccaatatcactagatagtagtacagtactcgttctctacatttatatctgagatggaacataataaaattataaaatatatgtttttatttctgtatttatcaatctatttcttaattaattaattttattattattattatttgctacttattattattattattattattattattgatgtcgtttgtcattgtcattgtttttgagaagaaagagaaagagagtgagagacagaagagagagagagtgtgtgtgtgtaaggaaatgaatcgaaatcaaaccatttgattttgattccgagagagaaattgctttgtttggatcataaaatcaaagactgaagtctgttatttgagcgcgagacttggaaatggtttgacctccgcctatataggaaaatatacgtgtgtgtatatatatatatattatatatacagattgggttttactttaggagcattgattggggaaagtggatccggagaggtatggagtctcggatggatcagtacgagatcatggagcagatcggccgcggtgcttttggggccgccattcttgttaatcacaaggccgagaagaaaaagtaagtgtgtgtgtctgtgtgtctatgaaagtaagtgtatatttgactaattgttactaaattagtgtaatgttgaagtttaatctcatgagagtttgtgcatttcagatatgtgttgaagaagatcaggctcgctcgccaaactgaacgatgccggcgatcagctcaccaagaggtagcttttccattaaaataatagcgattcgtttcttatttattataaa

SEQ ID NO: 26156 - DNA, 2629 bp, Cannabis sativa
atacttgttagtaaatctagagcctggtaaaatatatccaacatagttttgaaatttataggattgaaatttgaaaatatgacattactgaaaaaacagatgaattatgaaataaagtggcaaaattgtaactagttgaatcaaccttgtgtgggccagccacttagtgattttttcttattattttatctttttaaatccatataattaaatcctaaaccctaaaaggaataagatggctctcattctcatccaactaaaaatattgtttttattctttatcaaacaactagaaaattagagcctccttcttatgtaattttgagttcctcttcttgttcttcatcaatttcgagcttttaatgatagagtaccatgcccacacatatcaagtcaaatactcaatcatagtgtggaagactgtagttaaccaaactaaaaaagagaagatctatgttgagatcttgataatgttctgctacaaaaaagaatcaaggtctagagatctgaacgaaatgagtaattattattccgctaccatcaatgtatagatttcttaatctcttggaaattcatatttatggtactagattataattaataatcaaatatacattttagtaaatctagatcctgctaaaataatttccaacacttatcagattaggcgtgttatcgtggttcaaatataaactggaaatatactatgaactaatgggtttattgaaaatcatgtttaattaaaacttttcgttatgaacctaaaactttacataaataaattttacataatttgagatcctatcttaaaaagttacaactgttttacaaaatatataactacaaaagttgaccagcgacttccaaaataaagcttgctatcccaagatcaaacatttcaagtcttaccgcccgattttttcaatttttatctgctcgcactatttgttgctcaacaatagctttgcctttacctacatatgtaaagtttaagaaaccttaaataattgttagtcgacaaactcagtaagaaaagtataactaggcacccatacacccaattataactctatcccgcgtcccacttgtactgagtctaaaatgttcatatgacagtactatttaccgtaatatcagcctatacttggtactctagtcatactgataggatagtatcaatcagtacttaagccaaaaatatatcagtcggtattcagtgtaactctatgtatactaatactatcattaatgatgtgctaactaacaggcattcataaacatgtacgctaaagatgcaatcacatattatactatcatactaatattacctcaatttttaagtcatgtgtctcgatcaacttgagtgaaactgttgctcgatgattataggcccctaagtcacaacatacgcaaaaataataagtgatacgttaaataactttttggggacttagacttaaaactaaaagttatcctattgataaattgctgactaaatcctaaacataaaaaaaaaaaacactgaagaattggattttggcgaaaagtaccccaaaattttctagaccccccactgtaaaaatggcatgttgcttttttgggttatcttcttgaataaatggtacactgttttcccaaaaatggcatgtcgtttgtacaatagaaaaagcctaaaatcccttaactcggccaaatcaaaactaaacttttccaaattgtccaaagcacctaaattaaccataataagaataatccaagtgaaattccatcatcaaggtaatagctcaaaatctaccattaaatgagtaactttacgcttaaaagctcaacacatgcttcaacactaccatgtccaacaaaaccagctcaaaactacttaaacatcaataaataaactttagcaaaaaaaagtaatccatccccaaatggaacagcaaccaaaacaccaaaatcaagctaaaaacctaactttctaattaagagcttcaaaggaaacttgaaatggatgattaccttcaatggacactaaagaaacttggtaaaggtccttgatttgatataaattgagatgtgaaccttgagttttctcttggtgttcttggtgaccgacccaaagaaagagagagaaaaggagatcctattttctcttggtgttcttggttagttttatgttcattgcaaaagtttttgttaattccatttttcactaaaccctttggttagtaaaggattgcatgatactttaaaaatcattgcagcgcaccaaagttagcagggttttacactgacactattaaaattgagtgtcggtaaaaaaattacattatttagtgtgcaatagtgtaagtttataacagatggtaggcattagcgtcaatgataaatgaacacttaaaagagaacatgttattcttttgttatgggtgtttgcggatcccgccaactcagtaatagtattaccttcaatttgaaatagtcacctgcaacatagataccactaacgattgacataaaacaatttgttttttaaaaaagaaaaatccaactcaaattatcaaagcccattatatataaaactcttaagattatatctatgtatatcatatttatttttagtttaggatcacaa

SEQ ID NO: 26157 - DNA, 2338 bp, Cannabis sativa
tgtactgtgcaagtgttaaatgattaagcggtaacagataaagtaaaaaaacaactattagaataaattttttattaagttggaataatttttaatttaatttaaacaaatctgataaaattttactaaggcttatccacattgaaaggctggccaggatgaccaactaacacgcaaaagctaaaagctaaatacagaaaaggaaaaatggactaagacaatgtcctatgaagcaaagaagttttctatgaaaatagcagctttagcttgtttctcattccttgcaactagaaaattagtaggaggaggaattttgggaagctcaaggttgtagacttcaacccttgcagcttcttcaaccaattcacgttagaatcaatcctgtagagagcatttgcattgaaacactactcacaatgctttataaagaatggaatctctatctcagggaaggcccactagttgaatgtgtttgcccatccactagaagaccaaacacaatagatggcatcaaaatacagggcatcataaaaagtgacattagcaacatccctctcctccacattagttacttgctctctcaggcgttgaacttgatcctcaagctcagtaatacctaaatatttctcatgaagtgccaaaaaataagaatcttcaacctatgaagttttctttcgaccagtgaccagattcttcttcaatggtttctttaaagaatcaatggtttctctagccatacttttctctagagcatcaatagtttctttcaagttagccaccaaatcttctgcacaacgggatgctcctgtacagttgagagctttctagcaagtcaagtgatgataggtgaaagaaagctagttcaagagatgacaagaaaaattattacattaaagatatcagtgaagcatctttgggcaataaaatgtggaggtttggagctaactaacttttgtaatggcgtgtattcaaccttggatctaatcaaggcatcaccattagaaaaaagctaggacctatgaacatgcagttgctccaccaggtccaaattagggtttgaaacaaaattatctgcctcatccgaatagatctaaatgagagatccctcatcagctccaacaactttagacttctctctgccaagatcttgggtaggggaaacatcgttagcatgtctactcctcttctgaagtctattctttgtaggagcaaaagaagtagcaaggataccctaaacaacctccctgaccagtggttcagtcttctttagtacatgaaccttcccccttgaactaccatggcagctaagaaactcatgttgttagtgaagaagaaaagataagtggttactacaactgaagaaaaacaagataacatggtaaaactactgaacatggaacatgaacaacctgctattcctcaactctttctggaatagttcaggcagaagtaacttttccatcattctaatctaagaacacaaatattttcccttattatcttgggtcattttaaacaaaactctcatattttgacactgtcctagtgttgtgaaaaatacatttatgcacaagtgcacgctatcgacaacaagtaatataataataagttgagtattgtctccacagggattacatataaaaataaatgtaaaaccaactaataaaaaactttagttcttttggaagaaaataaactaagaggaatggatgattgattaaagtaaaacaaattggtgacaatgaaaataaactcaaaataaaacaacaaatactggaaaattatctacaagaaaaagtatctatggaataatagacatgaatatctaatctcgcctatgttaaatctatctaatttttcaacattactttagcattgtttcagcaaagttgcatagagttaaaaaaaaattcttatgtctatgagattttttcaaaactcacaaattaagttttactacttagttgaatatattgttatatcaaacctaattgcagaacaaaagttaaacatcaattctcaagttatgctaggtaattaaatattcctattccatttagtaagaaaatcataaacctaggaattcacttgcatcatcaaacttgtaactactagatctagcctttccagaaccaaatgtagcttagcaatacttacagccaataagtataaataaatgatagcaaactcacttgaatgaacaaaggcaaaattgttaaatcatgcttaaaattaatcataccaaacataggagttcatagccattcaagccttaacaaaatcaactcatacatactttagttaccataatcccaaatagagtattacaatccatggc

SEQ ID NO: 26158 - DNA, 2444 bp, Cannabis sativa
  modified_base (2150)..(2153): a, c, t, g, unknown or other
cctcggacttatgtttaataaaatgaacttaggtgtatctagagcaatcatccacaatagagataaagtatttaaaattctgcacaacagtgatgttaaattggccccagatgtctatgtgaattaagtcaaaacaatgagcagagaaattatgattagaaatgaagggaagcctctttcatttggcataaatgaaaaatggagcaatgaaaaggtgaaaaggagaagaattttgagtaaaatgcaaatctttattcaatgaatgagtttttatacaagctggatgccccaaatcccaatctcaggataaatttttgtatcagaaaaagaaaaagtagtagcacatttattcaaagggaaaagaattaactaagtaatagagatttccaactagttcacccttcccaatctgatgtgtccgagtggtgtcctgaatgacacaatgatcatcaaagaaagtgaagaaacaatcagctgagacagttaaggcactaacagataaaatattaaagtgaaaatctggtacataaagcacaccagatagagtaatagtaggagaaagaacaacagtgccaacacatgatacatcagcatattttccatttgctaaagcaacagaagataaagatttactagtgaaagtttgagtaaacaatgacaagtcatggcagatatggtgtgtagcactagtgtctataatccaaatatgattgggaacattagagttgttatcagtgaagcttaagaccaatggttgatctacagtttgagaagaaatatcttggattttctggcattgagcaggggaaagtgtggaaactaaatcagcagaagaatctgattcagtaaaattagcacctggtttcagtgatggacgatttgcgaaacgaccttttccatgaattttatggccagggggatagccatgtaatttgtaacacttagcgattgtatggccggaaataccacaatgatgacagaaaaccttggggcgcccagattgagcattccctgaaaacagtctttgaaaacattcctgttgaatgatagtagagtagactttattgatgtttggcataggatcttgcataagaatatgtgatcgagctccactgtaggactcattcaaaccaattagaaattcaagaaccttgtcctgttcttgataatcaagtaaagtcttcactgcaccacatgtacaaacaggtagagggcggtattcactcaccatgccccagagagatttgagcctagtgaaatatgcgctcacactattttctccttgagtaagggcttgcaacagaagcttgacttcgaacacgcgtaggccattgttctgatgaaatcgatcattgagtttgctccagatcgcagcagcatcatcaagatacataacactatctgcaatttcagtggaaacagaatttaagagccaagaaattaccatactattacagctacaccacgcattgtaatcgtcatgatcaggagttggtcgtggaagtcggccatcaacaaactcgatcttgtttttagcaagtaaagcaatagacatcaatcgacgccaggtactgtaattttcaccacttgtgagaatcttaggaacaagctttgctcctggatgatcggcatgtgagagaaagtaagggttccgagcttcatcacgagaaagccgaacaggaagatcgatattagctgaagaatttgtctcgagagcaccactactacaagttcgcaccatcgcgatcgacaagaccaacaaagattctaagaatgaaaaaaagaaaaagaatggaatgattgaagaaaagaaaatgaagcagttcgagtaagaatgaagctcaactgactcaactaactaaagtctattataagcaactaactctgaacttattcagttacatttaacaaatgctaaacaacaaaatgactaatcatcaacattttatcgtgtcatatttagattattcttctccaaaatatggacttttgttgtagtgagtaaactagtcttagaaaatctcaaaccacactttttattttttttttattaagttttagttaaaatagctaaaaagttagaatagaaagccattttttatttttgcttcaatcatcctcttagtgtttgattattttaataatatttnnnnatttaaatttgttaaatataaaataatgaaaaaataataatattttttattaaaatactattaaaaaaaattagcaaaaagtaaaaaagctccctatatttagagaggtccataaccattctctattatagagagccactttttgtatagttggagcttattttctaaaaacctactccccattttaattaagggatgtgtggccttggggctgcattcccaaacaactcctcgccgacagtgcgtcgtggtgcgacagggtttgggcacgacggggctctcaccctgtcc

SEQ ID NO: 26159 - DNA, 4632 bp, Cannabis sativa
  modified_base (1110)..(1110): a, c, t, g, unknown or other
actaaagtgtggccaaactcaactttctaagaggacccctcccaaactcttttttgacctttcaatgcagccacattgaatttttcttactttggtttagtccaatcccattttttatgtaactttaagcaaacatgggtacaaaattcaaaataataattataatacacaaacaaaaagaaaatgtattagtaatagtgttatgattatgtattttattgtgatttcgatttgtttaatcatctctatgaaatttgtgcgattttatctctgtctaattgttaaaaatttatcttaaacctttcttcttttaaaaaagaaaaatatgaaaagatattaaacgctaaaagaggtggcatactattattaacacaattcaatatcagatcttatatattttaatttaataaataatataaaaaattaataattacttacaatacaccatagtaatttattgtttggtattaagcatgttaacaatactcattttaaaaataaaggaaactattagtagaattatgttatattaagtattgtgtgtatcataattaataacacaacaagctattttttttccaaaaataaaaattaataatagaacaagaagtaaagaaagaaaagaatattgtatatttttgtaattgaatgagtaaaatgacaagaaatttagattttattaatattaataaaatccttgtacttattcaacaaatgagctcatattctaaatatgattataataagaaaatgtaagattataccatagatgagctattagtgttaaatcgatataatttccatttgtttagtcatctcttcatgaaatttgtgccatattttgttttagtctaacttatagaactttgtctcattaaacttttttcctttcaaataaataaataaataaaagaaaaactattagtagaactaagttatataaagtattgtgtatactataatatttgtttctaaataattaaataatttatcgttaatctcttattataatctattagtcaaattttgtgctaaaaaatacatgctgaaatatttgtttatagcgatatttattataattacaacattatttctgtaaatttttaaaanatttcaaatagtttacaatgtcaaaaataaatttgaaattttttaaacacacatggtaaactgaaatatcaagaattcagttttttgatactgtaaataatttgaaatttttttaaaatttacagagataatattgtaactataatgaataccattataaaaaaaaattaaaaaaaaatattcaaacataaaatttgattaaaaaattgtaattagcattcttaaaaaattactagtaataaaacaaactaaataaagaaagaaaagaatatacattacatgacaagaaattcacattttattaatgtatactccactgcaataaataaataaataaataaaagaaagaaaaatctattagtagaactatgttatatattaagtattgtatatagcataattaataacacaacaagctatattttccaaatataataacaaaacaagaattagagtaagaaagagaaaacaatatgtgtatattatataaatctaattgaatgagtaaaacaacaagaaatttacattttattaatgtatactcaactgcaataaaatttgttatttttttcttttgtatataataataactaataataataatacaaagccttaatactaattaaacaaattaatgaactcataatattctaagtatgattataatcagaaaatgtaaacttataactatcttcttctgcaaaaccaacactaggatcttcaccatccttaatcactttcctaatttcctcaactctttcaataattcccttaatagacaaatcaaaagcatcttcaacagtctctaatctcaccattggatcaccataaacaatatttggtataagcttaatcacctcatttctcatactcaattcttcctctttagaaattccaaccaaaactttctcaatggtaccttctttcaaatcattgatgacatccttaacaggaatatacacagaatactttgtatgattcttgggaaaatgccatttatattgagaataagcagtacctggatgaaaaaaaacaggaatacaaccagctaaaatcgaatcgaaaatcgatcttcttgtgtatgaatcaccaggaggttgtaaacaatagattgagctttgaaaacttttcataacactaactggtttactacaactattctgaattgaactacaatcaatgaattgacataatgagtttgttgatctttgacattgatcaataactctttctctaatagatttggtcatttctggccttggtgaaccaacaaaggtaaacaagtaaggcctttttctgtttctcattcgagtttgccaatcgaaaatcaaactatctttccatggatgaaagtaagttggataaggaatagcataatcattattccatgaacttgattcaactgaaagcatagacatattcatagattgaggtaagaatctcaacttactaccccaatcagaaatgttatcagtttgtcttctgaaatcccatgaaattcttcctgcaaccatgaaatgatctctaccccacattcttttccattctggtttgttggaaagaaaatcaagaagatcatgagctgaagaatctctacttgaaatgtttgaatcccataaatgtaaactaacatcaagacctgcataaaagggtacaaaaacaacagaagccattgaagggacttttgtcaaacacctgtaatgcataatcttgttatgaaaaattacttccaacatgaattgattagtgttaaaccaactgttattagacaaaattccatcataatcatcttcaattaaaggaccaagaccattgttttcaatgtacggacacattgaattttctgttcctcttgttaagagtctgcaattcttgagtaaatcagagttgaatttacttggaagatcttgaatgtagatgtatttaccggtacagggatcattgattgaaggagtttgaagaacccttttgtcggcagccattaaaaatgtcgagtaatcgaagcttgacataatgaaaaacagagcaagagaagtgaaaatggctaaccatatttcttgagaccattttttgggagatgggatttccattgttggtgttgctgagaaagaaaaatcttaactttgttgaagaaaatgtgggaattgattggaaaatttaatgaaggaaaaaactctgtttgggagagaagaaaatgaaatatgaaaacagaggaattagatcatttttagagtaaatattttggaaaaatttcatagtttaattttttttatatagttttgtaagttttaattatttaaaattttaaaaaaaatagaaaaattcagtaatctaaaaataatattaattttttttattatatgtgtaattctttaattttatattaagaaataaaatatttaaacactcatttatttgaatttttagaaattttgaatgatattttaaattattttaatgtaatcataaaaaaaaaattaaactaacaaaattttctccacaacgaaaaggtaaaatatatgagtgagtgttttgtaaaatcactcaatattttttttatttgattttgtttatttttaatgaattaaatttttgatctttgtaaaaatttgtgaccattggattgagagtagaggagtgtgtgttgtttgggattggtgagaaaagttttacattggaagaagaagaagaaggaaagagaagaagctatagcattaaatttggagggacacatgtcccctatttatcaaccaaaatcctttgtttttatatgaattctttgattgaagagctttttatttattaacattttttgatggaagagctttttaacatttgattgaagagcttgggattgccccatttaatgcattttttttttgtactttttttttttatgagaaagagagaaaagcaagtggttgtgcagagaaataatagagaagtagactattatcgtccaacttttgttataattttttagtctaacttttatgttcaaaaattcatatcagaatattttttttcacgggagtgttcgtcatcgctgtaaattattaaaaaatttcgaatagtttacagtactgaaaatacgtttgaagtggtatatcagaaactctattttcggtacggtaaattattcgaaatttttcaaaaatttacagggatgatactgtaactataacgaatacagttatgaaaaaaatattccgggatgtgatttcagacgtagaaattaactaagagattgtaataggaggttgtaattagcatttcttaaaaaaaaattactgatgtttatatcttcctcagtcaaaattattattagtataattaaataccaaatttaatatcaatcattgaacaatttttaatttcatatttgtattcgacactattcatgtctaataataatagcaatctagtttctatgacaaacaattacacatttaatatggctttgtcttaatattattttttttttttgagtcaaagtgaaaattttatttaaacactttcagc

SEQ ID NO: 26160 - DNA, 4464 bp, Cannabis sativa
  modified_base (30)..(30): a, c, t, g, unknown or other
taaaaatatttaaaattccatgaaaccgtntttttgtaattttttttatttttgtatatttgtaaaataatccttttttttttaatgtatttgagttataagtttttgattctctttacattttttataaattttttatgtcatatttttttttgtaaaatagtttttcaatatcacattttaactctttttttttttttttttcattccctgccacttttatttacataaagtttaatttatacgaaggtattatattagttgattcattttattttaatttttaaaattacaaatgacaataaatatgagtttaattattaatatatataacataatattatttggtgtaaaaattataaatgtggagattttgtaattaactggaggtggtgacattaatagtgaattggggatattttgtttgttttattattggaaaatattgaaataaatgggcagtaatagctaaagaagtattgagttttttgcttttttagttatataagaagatatcaatttaaattatttttataataaattgaatgactataatatttaggagatttgccaacccatctattttaataattgttgtaaacaaacaacacaaactcaaacctatcaatggttaattaatcaacaagaattaaaccagcaaaaccataaatataaacaagataattaaacaatgaaaacaaagagagaacacaaggatttaacctggttcggatctcaaattttgagtcctactccagctctcctccaaggagatatctccactataaatcagtaattacaagctccaatacattacaatgcactcaagaacaatccctgtcataattgactctacaacactcaatactagagcacacttagtcaactatgaacttgatcttcttgcagcattcgagcttcgattctctctgtttctctctcaatttcttgcctttaattgaatacaaagaagagccattttatagtgttagtagttgacatgtccagcacttaacaacttatgacaagtcggttattaaccaactaactgatttcctaaaacaggaaagatctcaattgaaaataacagctagatcaactaaattggagaaaaaaccggttaagtttagaatggattatcttccacaaattccaccttaatccatctaagctgaaccttgataaacttactacacttggggagtgatcctattgaattagttaggacctatgttgagtaaatccaaacaatgttggaatttactcactaggaacaccttggttcctgcataagcaggattttcatcacttggtactttctcgagataaacttcaccatcttctatctcttctcttatccaaaatcttctaatgtcgatgtgtttagatctctcatggtacacagggttttcttgcttagatgaattgaagattgagtactgtctgaaaacacaatgacttttccctttatcatttgtagttctcctaagattcctttgatccaaatagcttccttaaatgcctcggttgttgccatgaactctgcttctgtattggagagtgctacaacaagttgcaattgagacttccaacttatgcaacatgagtttagctgaaagcagtaacttgttaaagattttcttgtatctctatttgatgcataatcaacatcaacaaaaccttcaagttccaccttgatccctgccttcttaaacttcaggtcgtagtgagcagttgttttcagatatcttagtaaccatttgactcctttccaatgttctacaccagggttagacgtgtatctactgagtgtaataacaacatatgctatgtcaggtctagtactgatcatagcatacatcacacttcaaattgcttcagcatatggtatttcttccatttgtttcctttctttgtcatccttgggagattgacttctggaaaacacaaaatgtccagcaagtggtacttttgtttctttagaatcattcatcttaaatttctttaaaacagcttcaatatactttccttgagtcaatgtcattttgttgttcttcctgtctctaagtatttcaattcccaaaatcttcttagccactcctaagtctttcatctcgaattcactattgagaacatacttgagcttgttaatctgattttgatcatttcccatgattaacatatcatcaacatacactagtaggaatgtagcagcttgtgtctttaggtttgtgaaatagaggcatgtgtcatattttgaccttgagtaaccaaccttagtcaatactgagtcgaatttcttgtaccattgtcgaggtgactgatttaaaccataaagtgatctcttcagtaagcacacaagttcaccatccttggattccaccttgaatccatcaggttgcttcatgtagatagtttcttcaagccttccatttaggaatgcagtcttcacatccatttgttcgatattccaatcaaactgtactgcaagtgccaacatcattctgatggttttcattttaactactggggaaaatatctctgagtaatcaacaccttcaacttgagtaaaaccttgagctaccaaccttgctttgtataatataggttcatcattagtcaatccttctttatgtctgaaaatccatttacaaccaattaccttttgtcctttggtttaagaactacaacccaggtcttgtttttctttaaggattgcatttctaaattcatagcagcattccacttcttggcttgcttactgtttatggcttcaagatatgtctttggcactttatcttgagactccattgtcatggaaagagcataggcaataatgtcagcttcaacatacttagcagggggtctgatttctctccgagctcgatctcgagccaattggtaaccatctaaagactcaactccatcatctagatctgctttagattcttctaaattttctactgttgtttcttggttaggaactgctctttccagctcagtttgtgtacttatttgatcacttccttgcttacctgaaaaatcagaaacaacaccttcctcatttcttttaaatggaaaatcattttcattaaaaatcacatctctactagttacaattttattggtttcaagagaatggagtctatagccttttactccattaggatagcctagaaatatacatttaattgatcttttctcaagtttgtcttgtacattgtgtgcataagttgtacaaccaaatatcttcaactgtgacggaaatggtggcttaccagaccacagttcttcaggagttttcaactcaattttttgtttggacttctgttaattagataacaggcagtatacaatgcttctccccaaaaatgtttctttaatcctgattctaataataaacatctaactttattaagcaatgttctattcattcgttcatctataccattttgttgtggtgtttttattacagtttttatgtctttggattccaaattttaaacacaattcagtgaactcatcactaacaaattctaagccattgtcagttcttaatactttgattttagaattggtttggtttattacaagagttttcaaatttttaaattcttcaagacaatcattcttatgtcttaacaaaaacacccaaactttcctactaaaatcatctacaatggatagaaaatattgtttaccaccttgagctttcaccctgctggctccccacagatcagcatgaatgtattcaagaattgattttgctctgtaattgctattagaaaacttgatcttatgttgctttccctgcacacatatttccctgttttgatagttcgactaaaccttgttcaccaatgtggcctaatctagtatgccacattttagattctgagttgcacttctcaacagcagcagcatgtgttggtgtgacagtttttacatcaaggtaatagagaccatgtcttttaattccttttagcactagcaatgaccctttagtgattttgattactcatttgcttgtcttgtaatcatatccttcatcatctaaggttcccaaagaaattagatttcttttcaaatctggaatatgcctgactttgtgtaatgttttgaaagtcccatcaaaaagttttaatgacaatagaaccaattccaattacactgcgtctgtgatcattccccattacaacactaccaccatctatggttgtgtaatccatgaactagtccctatttggactcatgtgatatgtgcacccactgtccatgatccaatatcgatccttgagacaagaactggtgcaagcatcaccatttgttgagttttcaaccttagtttcagtattggtaattgtaagaacatctccatcagaatcttcaattactgcattagaatcattgttgttgtcctcatcttctttatccttcttcttctttcttttgtctcttaagtcc

SEQ ID NO: 26161 - DNA, 2200 bp, Cannabis sativa
catcaaagtgatgtaactacagagcattccttatcgtcgatgtctggtgaaatagtgcaaattccgttggatgaaaatgaggaacacgatgatgttgaggctcaggctcgtgaaaatgatggtgttcctatctcagatgctcccctgattggtgctccttttcggctgatatcttttgtatctagatatgttagtggtgctgacttggttgacaaaaattcttttcaatcctaaactctttttaaactctaatcataaactttttttatatgtatttattattattattctttttggatcagtcactaattaatttgatatttttttttccacttgggcttaggaaaatatatctatttgtgattctcgttcttgcattaatatttactcatttacttccatcacgtaaggtgcaaatatttttttgacactttacatagactaataatataaaatacaaaaataataacaattatattagagataaaatagtacaccaaaatgtattcattattattatatataatgatattagtttattaaatgaaatcaaatgtatttgactattttccatatatgtcaaaaaaagaaaaaaaaatgcattttccatatatgtcaaaaaaaggaaaaaaaatgcattttccatattacttaccccataataacttttcttaaataaaattatatttaaattagggaactaatgtgctttacaataattgtaatctttttagacttattataccgaatcaatgttataatataatttacagcaaaataagacaaatgtcgttgagaactccataaacggacattccatgtaagacacaacgcttggactgggtgggagcctgggaagatgaaactgaaaaatttatataagcttatgtggttttgttatggatttttattgatatattaattaaggaaaatttgccaatctatgcttaaaataagcataaggtcttttaatattccaccttaaataatataagaatttaatacttcaaaaacttttaatcccaataatatccttcccatttgaaactcctactctccctctaactcgcattctctcgtttgtttctctttctctaactccccaaacccactccaacccgattcccatcaccatttgccaccaccagacgcaacatcaacaaaacccagcgagcccaacaaaaccaccacctccgacgaaatcccaagtccagacccagaccgatatcgtgaaaccaaatttataagggaaatcacgaaaccccaaacccacatctgaaatcacaaaaaaatgtatttttctattttttttttatttgaatcgggttttttgttgtttgtgcttcattgtaagaaaatttatttggtttaggttcatttttatgttttcatttgaatttcattaacgcctattcaagttctgtgttgtttgtgcttcattgtaaggaaatttgtttggtttaggttcaatttttgtgttttcatttcaatttcattaacgcctattcaagttctgggttttcggtcaattatcgacatgtcgcgacattgttcctgacctttttttatttcttttcaaaatgttatgttagttatttctattagcaatgttttcacgacatgttgcgacgtgtttacgagttctttttggtaggatgtaccttttaaaatgttagttgtttagcgatagtttcacgatgtattgcgatatgatttgcaacattggatgaaatatccaatgataatattgtcgttatatgtcgttaattgtatcacaagatatgtcgccatcttgtcgtgaaatatcgtcgagcaacaggctacgtatctgcgattttattttgcgatgattcacaacatatttgcaattcatgttacgatattcatttttttgatctttaacaaaatttcttacaattttgcagatgactcttgaacttaaacttccagtttcccagcatttcacagggcgtcttacctattggggtacatataggtttagagatatcaaggctaagtttacggagcttgagttgattgatacaattaaggttagcactttcgaacacttctgggaagctggagagagttgactttctctagcgctttggcccacaacctcctcttatgtaagatgaaagtcgataatgaaaggaagatgaggttgttgggttttgtgccctaaataaaaccctttaca

SEQ ID NO: 26162 - DNA, 3263 bp, Cannabis sativa
actagattcagcgagatgatgcgaataggaccgagtctaatcgcattggtatggctcgcgttatgtaggaccaaggaccggttccaaactcgcatacgccagggtatatgtgagtatcaccgtgatcttcctacgaaaacgtagagatcaattctctatattacgagctgacccaactgccttgataaaccgatatcgactcacatgccttagttctatcagcatgttataagatgtccgtatgcgactccaagaggacgcagacatcctagactcgactagtctcgaatgcatcctaagcctaggagcttatgcaagtatatgaactgccaactcgcactacaaaggtcgcatacattgctgtatttagtgaattaagctggaaactgttcttcatttattatgtttacgttttttagtttaattattgtaattaaatgtatgaatggattggtaatgaatgcaatccttgtgtaaatgatgggacacttgatttgtatataaaggagtgatccgccgtgaaatgaacaggacagaatctttgcaacagtggactaagcagatcgtgatctgactgaaccactaaactctcttgtgttcattgtatttcaagtttttgctaagtatttttgttcttaattcgaatactcgtcgttctggtttgagtactcgtgtatattccttacttattgttattattatttatttttggtgttgtaaaaatttcattcaacaacataataaattataaagaatttttaaaaagctaaagatttgtttatgataactataatgtaaattattttataaaaaaattaaattataatactttgaagtaccaaaaatataaagagtaattagacttcaagtcgactttgaggttaataactccttgttgtgtgtttattttttcaaaatggttaatggagatttttgctggttacaatttaaatatgagaaagttagtaatttttgttacatgtgcggtcagttgattcatcagagaagtggttgctctctggtgtcgtcggtaaccatccttgatgctcatggaattccttttcccctttatggcccatggagcaatacttcatcaatgtgtcagagttgtttgtctagaagaattggactaagtttggtaaagggtgaggaggtgctaagtcggtgttgaggcgcttgggttatcttcgtcggcaaagacagatgggcttcaagttgtgaatgtagaggctgctgaaaggtattgtacacatggctcaagctttgagactgggttgaaagcaaggcgtgggtacccaaggactcgtcgaatgtgccgtgtagaatcacactaggtatggcaaattatctcgtttaatttatctcgtagtcgtgccagctgtgtggagtcaaatggcaaaattgtagttgactattctcaacctattcccttgtgtgatatttttaggcctgagagtcctttgcgctatgggtataagtttgttagggatgaggccattaagcaatgctcctactcgagtaaggcttttaggcctaatattatgaattatttaaagtcgtgggtcgtgtggataaagaagatgaggagttggctagtcaaaggttatacctcttgggtatggttggtgggccaaataaaatatttttaattgatcggccatgtgatgataatactgtttctaaggagcagattcttaatttggacaatggacttcattgtgatgaaattaatagctctctaaagatccaagatgtctctactcatcttgatcaaaagataattattgatattggtgttcaaccgtcttctaaaatcattaagcgaactacacctataaagaattgggggttggattttaaacctttttgcttgggagaaagtcaagcctgcgtcttagaagagtgaagcgagtggttagggatttcccaatgggactttgtctgccgtatggagttgagaatgctaatctattttgagttcttgatggttcgtcgaatgaacctctcgccaacgatgaagtggagaggattaattgagctaaggctattactgtatgctctcagcaagttgaaaaactgatctcttcgaggcagtcagctagacttacaacgtggaaggccagagctcagttgatggacatttctatccctttcaaggaggatattttgattgaggatgagggatctgcgatttgtgtgccagtttatgttgtgacccttttggaggaggatggtatccctctttaataggagccatgagaggtgttactgagaactgtagagggttggaacagacctctccaattctggaattaaaagccatgatttggtcgtgctctccaagctttatctttgttaccgaactgaaagtggatgccacttttttgttacgttctcttaagaacttacacttttattttaatagtgttattcttgctgtgggtagtgctggttgtttaattttaggtttgaaatctagttttagttttgaaagcattattatatctaaaaaccaaatttttggcattgtgtactttgacccagtgcattatccttggttattatcttgtgtttacgggcccccttacttccatgagaagaaaaaattcttgttgaacattatggaaattggtaacaaatttggcaagccctggttgatcttggttgatatgaattttgtgctgagtagctccaagcgtgtcagttcaagggggaaagaccaatttctcccttttattactaagctaattaacggtcatgcattgatcaacatgcccattaaaggggacaacttgacttggaataaccatagggatggtccggatcatattaaattagctcttgataaagccttggtcaatgtggattggttacttttttttctaaaaactttgatcgaatctctacatatttgcaattccgaccataggcccttgtttatctgtatagttgatcctaatgctagagcaaaacattcatttctttttgaggcttggtggacaagggaccctcagagttcacttggtttttgaacatgcattgaatttaatttctcatggttgggccccagcaagagtatttaagaaggttggggctactcgtctggcactgagtaggtgaaatagagagaaatttgataaattggatactttcataagccagttggaagagtaactctagaacattcaaaaattgtcgattagttttaggagtttggcaaatgaagtttgttaacgcagattttgttaaccaaatttgagcct

SEQ ID NO: 26163 - DNA, 2117 bp, Cannabis sativa
  modified_base (2087)..(2088): a, c, t, g, unknown or other
tgtataatgtacaaactaagtgtaatagtcggatcggcttgagaccaagtaagcgaggtgcccgtctcgctatgggaatgcttactataacttcatgcagttacgtctgcgaggcttacaaccctagcaagtcagaagctaacattcaaatgagctttgaagaactctttgtaaataagaaccgtgatcgtcacaagacatgcatcgtcgacctcggaaggaaaaatagccctagctcgctattgagatcgctggaaccaagcttctgtcgagacatctctagatacgacaattaaagacatgtttaaaacacgatcattttgacccagtaaaagcgggaaaatcacagccatataattttcaaatcataaccacatttacactacatgatatgtaatcaaaccccgtgattttaggggatgatcgttgtaaacatattacagtcaactttataattaactgtttgctatgtaattaaaatagtggcaaacaagatcaaaaaaggagccctgaaaaataatcagaaacctgaataagactgactcgtggactatgtagaattttaactgcaaaaccacgtaaaaaaaccctgttttcgtacttttacgtttatagcttgtattttttctgtgtgaaatcgttactgtgaggctcaaatttggttagcgaaaatctacgttaacaattgtaagaccttattatctgttttgcgtaacgtttcttttcactttgtaaagcgatcaacaaaatatagtggctcattccgtcgttagagcctctatatcccaccttgatcgccattttaatttagacatgatgtccctattgaattgttactaaattttgtgactgagttaatcgtttaataagatgatgattttcattttttaaaaaaaaacaattaccttaacggaagtaaaggagacataaaatgacttggcaaatttgtcacttgactgaatgagtttattaaattagttaataaaataaatcaatgtgctggctctctgtatttttttaaaacaaatttgttattactgctctttcccgcaattaaaacatgatgtttgttttttaattactgtccaagttggcaagcttgcatctcttcagcatataggacacatcagtcctacagcagtcggcatctaaatgcaggaaaaacgtgcaaaggaataataatcgattaatggagaaccaacattttcgtagcaacattatatatatttttatacacaaacaattgattattttcctctctttttgttgtctataaaacattggaatcttgttagttgtcatggtcatatctttaaagtgttgatgatttaagtacaatataaaatatgtaaagttattaggttattgttattactacaaaatatgttaacaaaaggaaaaggttcatgactttcataaattcttattcttgttcttgaagctccattgacttatttcatttttcactaattatttaaaaaaaaaaaaacatattcactgattcttatttttatatatacttgaccttttaccggtaagaaattgcattttataaacttttcaggttgtaagttaaaaaatttcttaaactactgagattattgtattctacaaaattttgtctaattttattatgttttactcacattcctaatttgtttgacacttgtgcatgtagcaaagcatagctcgtgaacttaggtgcacgtgaagtgccctttagtaaaattgattccaaatttaataaaatacttagatctatcaatctcaataataaaaatttttattttgcttaaaatattcgaagatacaatttaacacatgtcaatgtctgaaaagaaaaatcttaattaacatatcattttagatggaatatatatagaatgcttatcccttaatggttactaaaaatcttttgttacaaatattaattttagaattattaaaacattagagtttaggctaattaggattttcgctccctaaactttgacatgtactaaatcatgtcccttgaatttttctgattgttgaaaatttcccctaaactattgcgattatcgaatttaaggacttttgtctaattnnattcaattttactaatttagtgattattt

SEQ ID NO: 26164 - DNA, 4682 bp, Cannabis sativa
  modified_base (177)..(192): a, c, t, g, unknown or other
acggtcccctcaatagttgatagttgagatagtaatgcttgtatactcagttgattgattttaatgaatcaattataattctaatattagtctatgtcttattgatgaatttacactaagcaagagcttaattgtgaaaaaaagaggttttgtgatcaatttattaattaagagacnnnnnnnnnnnnnnnnaataaataatataaatgaaaattttatttagtaattagttataattattaattaaatatttttggtatttataggattgaattggaaaatatggtcttattgaaagaagaataagtggttgaaaaagtggcaaattgtaactagagattggtcttttagtggccggccttagagtttattttgcccaatattttattctattttaatcaatataattcagccctaagcgctagttgaaacactataaaaggaatatgatgctctcactcatccactttttgactcttgtcaacttgactattcaaccaacatagatgaaagaattccttccttagcgatttcagcctccttcattgttcttcacattattcgaaacccatagtgaatgagtgccattcccacacataccaagtaaattactcaatcataatgagtaagagggtggtaaccaaacccgaaggagagaaagagatccaggttccgatctttataatgctctgctacagaaatgaatcaagggctagagatcttgaacagaatgagtcattatattcttttgcaatcaatgtaaggttttcttaaacctttatgtgtttatttcattgttttagaaaattcatatttcggatgtttattcaacatgcttgttagtaaatctagatcctggaaaaatattcccaacactatgatagacaatggagcttccttattcataacaacttatgagaagcttagactccaactaaaagactttatcccttacactcagctcgtacatggtttctccagcgaaagtgttgcacccctttgaaaaatctgcctgccgcttactgttggacaagctccaatgaccataactataatggcttaattcctgataagtgatgtcctttcggctttcaatgtcatgttaggccaaccagccttatatgacttataagttgttacaagtgtttttcatctgtgcgttaagttcccaataaaaagttgagtgtgatgtctcaaaggaaaccaaagaattacaacggaatgctataaccttgctctaactaaggataagaaggaaaatacctctggctagagttcagacaaagggaaaagcattacccaaaaggaagtcgcccaaggcgggggtgaagacatgtatccctgacttggggaaataaatacaaatattaggctaacttaagaacttccaaacaacagtaacgaagcttgcaaaatgatgagaaaagctatgcggtatatcatagtcgaaggtgtgatgtatggcagaggtttctctatgccattacttagatgtgtaacaaaagaagagtctacatgactcttgtctgaggtacatgaaggattctgtgataaccacgggtaaccacgggcagggcaaagtttatcaaagaaaatactaaggcaaggatatttcttgtcgaccatgatggaagattcaaaggcctatgtaaagaaatgtgataaatgctagagattttcaaagacccctgtgcaccgtccaatgatctaatacagatgcaaagttcttggccttttgcgatattatgaatagacctgatcggataattgccaaaaggcaagggcggagtacaatatgcagtcgtggcagtggattatttcacaaaattgacagaaggtcgagcccttggcaacgatcacatctaaaaaagttatagattttttagtaaaaaacttcgcacaccagttcaaacttccgcacaaaattttttcgaacaatggcaaacaatttgatagccagatgttcacaaataattttttgcggcacatggaatcataaaaagtttctctatagtggcacaccctcaaacaaatgggcaaatcaaagcaacaaataagacactcaaagacaccatgaaaaaatatcttgaagaagctaaagggaactagtcgaaggaaccctgaagtattgtggttgtaccgaacaatggaaagaacagcaaccaggcaaacaccatttgccatgacttatggttatgaagcaatgctgcttgtagagtttgaacctctgtcccataggagactaacctataatcaagaagctaatcatgccctccttgtataatcagtttacgaaattgaagaaaaaagaggctaagcaaacgtaaagatagtagctcattagcaaaaggtgacttggtacttcaacaagcaagtgagggcaaggaaattctttgtgagagatatggtccttaacaagtgttcttaaacacaaaagatagcacggcaggcgtactcagacctaattaggaaggaccatatcaagtagttgaagtcacaaattctaaagcatacaaactgggacagtatgacgacaacatggagcttgttctagtaccaaggtattggaacaaggaacatttgagaaaatactacctgtaagtgtgcaaggtctaatgatccccttcaagtactaatgatcaaacatctactctcaagtagatggccttctgaccatacctcacttaagggtttggataaaatgactggcactcaggtcggatgaccatatctaatgtacaatttagaaaatacaattgttttatgttttaattagctaaagatcaattagatcatgtaacagcttacataattcaataaatgtaagttactacgataacaaaatcgttagaccaataaatgaataaagatattaatcatcattctaattgtatcaatcatttttccttctatagcaagttatgaatttaccattaaaatgtgtacaaagggtctgctcaaatccaaaagccaaacagacaaaaaattgaacttgtgcaatacaagtgaccaagagtcataagtctgctcagtcacttggggggcaactatacccgtacaaagcatagataaataagaagctaaaaaaacacaacattttccatgtgaaattattcaaacttgagggaaaatattcatttcaaaagataacaaattacggtaaacttgggattaaaggataccctgtcaactagttgtcataaaacaaaatgtagtattaccaagtttcaaggttgcttggtcggccacattgcattgaaaaattgcccatgggccaaaataaaataaataaaaaaaagaaacacttcacacggttggagtccatggctctttatatgggccaactatatcttcaatcgctgaggtgtctgtgcttttgtcggttggagctttcagattggttgcctcggattctttcttgtctttttcggctgcacaaaaactaagatatgcctccttgtttgcattgaggtaatcaatgtttgcatctggtttggccttcaaaaattcatagaagacctccaaggcgaccatatccaagttgttcacctcagagagaaattgattttgttattgatttagcacctggagcagaaccgatttctaaggccccctacagaatggctctagtagaacttaaagaagtgaaaattcaactccaagggttgcttgacatagggtttttgcggcctagtgtttcaccctagggagctacgatactatttgttaagaagaaagatgggtctttgcgaatgtccattgactatcaggaattgaataagttaacagtcaagaataaatatcctttacctaggattgaagatctttttgatcaactttaggggaagacggtcttttgaaagattgatctccaatttagctattatcagttgaaaatctgagaagaggacatcccaaagacggctttctgcactaggtatggacattatgaatttctagttatgtctttttgactaaccaatgatcccgcagctttaatggatctgatgaatagggtatttaaggatttccttgatatttgtgttattgtatatattgatgacatccttgtgtactctcaatcagaaaaggagcatgagcaccatcttccgatggttctgcaacgacttcgagagcataagttatatgccaaattcaagaagtttaaattttggctatctaaagtgtccttccttgggcacattgttagcaatgattggatcaaggtggatccaggaaagatagatccatcagagattggccaggaccgaaaattgtgacagaagttagaagcctcttgggtctggctggttattatcgtaggttcgtagaagggttttccaaaatttcaacacccttaacggagctcactaaaaagaatcggcgttttgtatgaacggacaagtgtgaagcaagctttcaggagctgaaacagagattaatcataggttcagtgttagccctaccttttgacaaagaaaagttcgtggtgtattgtgatgcatccagacaaggtttggcgtgtgtactgatgcatgtcgatcaggttattgcctatgcctcccgtcacttgaaatattatgaatagcggtaccggactcatggcctagaacttgtcacagtagtgttttctttaaagatttggcggcattatctctacagggagagatgtgaaatttata

SEQ ID NO: 26165 - DNA, 2764 bp, Cannabis sativa
  modified_base (888)..(891): a, c, t, g, unknown or other
taaacttaaagtgtataaaagttgcttttaacgtgttgtagtatatatgtaataaagttagctttttgtatttttagtgtaaaaatttctataatttatatgataaataaattcaaatatacaacgcttaaaatataaatatgaaaaaaaaaacactaaataaataacataaattttggaactatgaaaataatatacaatttaaatataaataataaaataataataataataaacaatcgaaaataatatacaattttaaaaattaatatggatttgcttttcactactatcaatttcatcagactcaagagacccaattttagcggaatgagtttggaaaaactttgaaacaaaaaacaaaaatattatgaaaaaatagtgaataaaaatgttaaacatatatatacatgtatatcactagctaatagaaaaattaatattaattaatagaatattataatataaaaatataatttgatatgatcatatcatatctttttattaaaatttgctcacaagatattatttcatcattcaaattatacaatggaaataaattattaattaaatattcaattaattatgatatgattatgtcaaaagctgaaattatagtattataaaaacaagatattatatttacataattagattagttaattattaattgaattactactatatatattttatattaaaaagtgaacatatgtttctaacccttaacaaaatatataccaaaatataaataagtttttttttctcctataatgtaattaattcataaaatgtatataaactcgtaaatttctcatatatatgcatatatataataatttaataaaaatatttatatatgtcatatcttttttttttctttttttnnnnaaaaaaaaaaaaaattaataacctgtaacatatatacataattttaataatcaaatgtgaatgggtgaaaataaaaagcttaagagtaacacaaaaaattaatgaagaaaagtaatattgtattgaatctctaaattaactcttttgcaaatgattatttccttctcccccctccccctcctttcttcaattgaagatagaagtattaatagcgagctctaatggctcctgaatgcaggtggtcccaaaaactaggggacaatattacttttctatcttgaagattagcacgtcagactagtattggtgaggtagttgtaggatgtcagttgatacttcgagtgagacaaataatttctccacttcgtgtacttgttgtacaacctctactttctcagaggtactgtgcatgctttaaaactccatccttttttgtacgttctattgacatctctctctttataatttacgttcatgatgcaagtataatacttagaaaatttagctaagtgatgggtctacgaaaggggagtcttattgttcaaacttaataagagctagcttcctcctaaatctcttttgggggtcactccattgtaacatgtgttcttgctccttcgtatgaagcagggtgtcttaggtggtgcctaaggggagtgagtgagtaagggagtaagggagagagagtggaacgtacggggagagagaggagtgaggtgagagagagcagggagagagagtgatgcagggagagagagaggagcggggagcttaacacgtgccttggcctctcctcatgttggctctcccccttgtgtggtgtcctaccttggtaggcatcttcttttcttgtaaatactcttgtaaagtgtattttgggatttttccttttattaatttatagatctccaaaaaaaaatatacttaacaatttataagggtcaacaatatttttacaatttttttcatggaaaataatagattcacgaaatccccataattttccatatactaactcccaaaaatttaaatttattgtgttctcaatttaaaaaaaaaaaaaaattcttacatactaacccccacaattcaaagtttcaatattctcaactcaattaaaattttcctaattctcaaaattttcccatttctttagtccctcaccaaattgagtttataataaatggtacattggtgctaggggtgagcatttaacctgttgggccgaccaaaccggctaaaattgccttgtttttttttgggccgaaattaaatgggtcaaaattttcttaacccgtgttgattgggttggtaacgggttgcatacattgtaacccaaccaacccaacccaggccggcccaataatgattttagaaaataaaaaaaatagttcaaaccctaatattcatgccatacatacatgagaaaactctagcacactgtcgcgcccctcttctttcttacaaaaaaaaagaaaaagaaaaccctagattccattcccaaacggctctgatccctccatccctccgccatctctaatggccctattcgcacacacaaatgaccatatcgttgttgcttgccttgtcggagataacaacaagtaagttctcttttgtcttttcttttctttcttttttctttcgtgttgaaggatccggagctcatttttttctgtttggtaagaattgcggttggctagacattggagtttgttggttattttttgctatgattttgagcatatagcaattagcataaaaattttggtagttgcaaataaatgtattataattttttcttttcaattggtttttttctatttgtgatttcatggatttggttattttttatactattattttttactat

SEQ ID NO: 26166 - DNA, 7601 bp, Cannabis sativa
  modified_base (1114)..(1120): a, c, t, g, unknown or other
gagagagagagagagaatttgaaagtggggatatgtgttttaatgcagttcagccagataaaaataaaatggaattaaaagtcaacaaagttacttggtatttttctaggaggtaaaatggaattcatctcaagtcaacaaaataaaataaaatggaattcaaatcaagtcaacaaagttacttggtattttctctaggaggtaagcgattattcaagacacagtccagacaccaccacggcaattccttgtcgtcttcagttccatctaaatcagtaatcttctttctccagggacctccctgagaaccctcagtaataatggagggaggggatatcattgaaaattcaaaaggaggatagaccacagaatcattttcagcagtagaatctccatcaattcttggatgggcatgacttcttgtagtgatttccctcccaggcaactccccattggtagaagaagcttggtttccaaacctttgtcttctttttgttaaccaatgagccaagagtcctttaagagtttctcgtgcaaggttaaccttcaaagaataaaccaaccaccatcaacacatattaacagacaaaaatacacacacacacacacacacacaatattcatataaatgagacaaataagaggttgaagattctaggagagcgtgtttaccttatcatcctcaggctttcccacaatattcagatctgctgaatacatctcagcagaaaaacactgtggggtatccaaatggatagacaaacttccaagtcttgtatccacggtgaaccacgcaggaatgcttacctgaagtacacaactcgccaacataaacaaacttaagcaagataaccaaacttaaacaagctaagggggactagaatataccatttcaaaaagttcttcttttttcttttcaaaaggaacctgtgaattttgacagaaattgttagttatcatatttacatattaagaatgaaaaagagaagaaatgcacttcccatagccttgttcctcaaaaccttagccattttatcatttcatgagaaatttaacttaataaacatgtccacatgtacgtatatatatagatatatatatatatagagagagnnnnnnngagagagagagagagaaataaagagcatgtcttacctttccataatcctcaattacagttcctttagtaatctcccagagctttactgatccagcagtatcctatcaaaatcatacaagcatatcatatacagataataacaataaaaaacagaaccattctaactagatttaacaggttctttatcatcacaatttatctcgattacctttgtcaagacatgtctcctattattcaaaatctcatgatgcacaactgcaggagttccaggaattgtaagaagtggttctttataaactggaacctgtaagcgttgatgaaaattaagtatttcaatggcaaaagaaccagagaacctatctcatagaccaaaaccacatcggcaacaacaagagatccagtaaatgcaatcttttataacatgatttcctaggtacttacagggctagatccttctaatgacacccttgcccttgagaaagacaagtttccagctaaaaatgagccacctttctggaaaactttttgagggttatttccttcagcaggccaccgagtaactgaagaatctgtgctagcaacccatatgctatcatcatgcaaagccaattgcaaaataggctgctccccagtgcaaagtagaagactctctctcgttgacaagtcagtcaagtataactgaggatataaagagaatgagcatcaaaaacatgagcagcattaaagaaaaatcaatgactgataaagataagccggagcactaaaagctgggttatacaacaaggaaggatacatgtactcacagaaaagtctctgccaccactatatacatgactaaacgttggggtactagcaagagcccaaacagaatctgtgtgcacagcataggaatgcacacatcgctgttgaccaagatcccatagtctgcaggagaaaaaagaatggtaatcaaaatacataattacccaattgtttttcatataacccaaacagattcatacaagcttatgatggaaacagtagggattactaggaagctgggaagacatacctgatcattgaatcagaggatcctgacaagcaatatctgaaacaaaatttaaataaataaaacatcaacaaatttatttttattgtagatgaacaaaaaggcaatatacacatgcaatacaatcatgtgccagagttgttggcaatgtgaatgttgctgtgaaagcaggaaatcatagatcaagaaaaaacacgcaattcagttaaaagagaaattggtgcgagtttaatatacagtgtgatatataaatgtaatgtgcaagttcattacactaattcagtatagcacatctcttaggataagaaagttctttagagatttgaaaaacaaaacacacacaagtaaacttaatataatgagtaaaactaatgctctgagagattattgaccaaaaaggaatataatgttcaggacacagtattcaattgtttacagaaaaccatttaagttaacgcaacaagcaaaacaacaaacctgccagaagaatccagaatcaaagccctgatgttatctgtatgtcctctaagtttcatagtctttgaaccacttcttgggtcccaaacacgtacaacctgggccagtagaggtactagataaagttaaatgcattttaagaatattcatacaaataattaaaataaattagtcacaaaccaaattgccagtggtagtagagtgcaattttgctcataacataccttctctgtgccaccagagacaagaagtgatccactatcattcattgccaatgcataaactgactccttatggcctttggctgctgttggaacatatccatgtgattgtgtagaatggacagatatattgttgcttgagttgatagtacgtagacttgtaattggtagtgggtgcccagaaccattaataccatttgaagaatcatcttccattgcttcgcctgacctggaaactggagaaagtgcagcttcgatatcccatatgaacacctcccctccaagtcccccagaggcaacagcattgctctaaaatgcatgacactatacaaggatcagaaaatggcatttataaagtacagattctagatatcatgctatcaaacaacaaaggacacttatatgacaggatccctctgcctgacaagaacctatatatggaggaaatttcaacaaaagaaattacattttttcctgctgaagcaagacaagtaatgtagtcagagtgctgacgcagagtcctggtacaagttccatcagacaagccattccaggtctggtgcagtaagaacaacagatacattaaaatacaacaaataataataataataataataaacaccaaaaaatactacattcatcaacaatatatagtgaaattgcagtattacaaaaattagcaaaatcaaaattatgaaccttaagggtggtatctgaagaacaagaaacaagtgtattgtctcctgcaagtacacaatcattgacctgcacaagaaaaagctttctgtaagtattggaacatacatctaagcaaagaagaggggaggcttaggcagatgtgcaaacctaatcctatttcatttttaaggaaaagatcttaacattagctaataaatattttctgattattaacatggacagctaaggaaatcactgttagctagctaggtagaagcaagagaaggtacccaatccacatgagactcaaatgtagcagagcaagtggcagcatcttcacccagtgcccatcttttcagtgttccatcacggctcccagtgaaaaggtaatcacacccatcaaatactgtagtcttcaacaatgccaaactatttatgcctgcacaatgctgcagatagaggaaaacccaaatatggaaccatgaatatcaaacaaatcaaagttctcaatctgttatggccaaaaaaaaatagcaatgttttcctctttaaaaaagaagcgagaagcacatgcggatatttaaattttcaaaacaggctactgccataggagaaaaaaaaacccccaaaaggtcccccttgtatgagtccaaattgttatttagcaaattagtccagatcaataaataccagagcgtgatagaggtaaaaatacatatatgaaaaatatgtaacataactgggcatggtaaaaaacacaatgttattcacatccaaatatatcagattaattagtaataaaactctatattcccaatagacagcatatctcctcattaaagtacttattcaaaaaaataaaaaataaaaaaattgagtggacatcagtaaataaacatagtaaagactaatgacagttacatgatcaaaggaaaagagaaaggtatccaaaacagaagtagatatatctaactgactgaatataccacaatagttatctgtctttccttggccacagggggctaaggatattaagttaatgagaagcaacggttttaaatttttgaacttcccatcaaaatagaaatcgcccaccttgccattacaatcagcaaaaagtaatctacagggaaattttcacaatatgtatttgtggggctattacatatctatacaacgctcccttataatgggcaaattaaattccattacagtgccatatcctctaagtctaaggagagattataaccatacaaacaccatcccataagactgaaacaaataagataaagttacaatagggattcacctttgtatcatcagcatcacttaacacatatgttaatctcttctctttgcgaggccgagtggaattggttgtgtttcccgcgctacccacacggtgcattgcagaagccactacaaaaatcaattaaagtccagataatgaaatccacattcccatagattccattgacctacttaaactgaattttataatcaagaacatagtaacaataacaataaaaataacaacaacaacacaagtaagcatcaagtgcaacgattaaaacttaaaaaataaaccaagaaaccgaaaaagataaacacataacccagcaaatatttcaaatgtccgaaaccctcgttaacaccaataaattaaagagaaaaaccattggatcttcgaacaatcaaccaatcggatcatcgaatgtaaggtttcatcaaataaacgatacacaagcatatataattactaattccctaaaattcaaccccccaaagtaaacgatcaagcaaacaaacaattacgtaacattaaaaatctaaggaaggagataaagctgaggagtgataaaggaaaccagaacaaaccctaaccttatcaatcagtaatgtaaaaagaactcgaactcttttactgctggtgtctactgctggtgtcttcttgttctttcttcttgttcttcttgttcttcttcttcttcttctactgcgaagctgctattttagagagaggacagaaatgagagagtgaaaatttctgttgtgggttttcgatttattgtgtcgagagctttgactccgttttatgctgcgttttcatcgagaggggtattaccgtctattcaccaacagatagactaagcggaacggggattttgcttgtattaatccacccggtctacgcacctacgtgggatgtgggtcccacgcttctgagctggccgaggagagcctcccaatctggtgtattgttcaatcaccaaactaccctcgctaagtgtagaaagcttcccttatattttttattttttttatgcctcctcggtaagtagtaatattttatttctagaaaacaaaaagaaattggcattttatctatttaggattaccgataaatttaataaaatattttaatttttgtttgatacactaaattttcaagatatttataagtagtctataacataaacaattatacacaattttatccacttatcaaaaaaaaaatacacaattttatcccgtgatggtatttgagggtatacaatctgttattgtactgtaaccgttgaattgagaagttacatgatctgaatgaaggctaaagttaacataggggtatttagagcaactctaagatagcactaaaacttggatttagtgtataaaatccatccaacgtagcaccaaaatttacagcatatatgtcgtgtggctacagtgcacggtatatatgccatggcactgtagctacgacattcttttttttctttaattattattatatattatttaatttatattatagatattgatatatattattatttgtatttataaaattaaaagtgttatttttacaatacactcccttaaaatggatcaatcgatgcaattctatttattgtatctgggataattttttagcttaatttttgtatagtcgtctatattatagctatttaagccatcttacaaaattttgaaaatttagaaaaatttaacatcccgaaaacaagattcaaactgtctattacacgtgaaactcttttattttatatgtgcgtgaaatagactgtttaaaccctatttttggcgtgttaatttttttttaatttctcaaaattttacaggatgtcctaaataattgcaatgtagacgaccatgaaacaaattagactaaaaaaattctctcatatgctgaaataaataggggtgcatcggtggacccctaatgcattgtagaattttagtttatttttttatggtcatgtacgttatagttatttaaaatatccggtaaaatttcaaaaaaatttaacacgccgaaaataaaattcaaactatctattgcacgcgtctcttttatttagatgggtgcattgtaaaagcacattttaatttattgtgtgtaaatttaaatgtgaatactataattattttattttattaaaaaattaatataataataatgaatattttttagtataatttttggtgttgtagttggactgaaaatagtttttgacaccaaatttagtgatagtgtgacaccaaatttagtgagctcgttggagatgctcttaggcttaaaaaacttagtaaccgtttggtttcgtattaaaatattaatatttttaaagatgaaaagtgattgatgtactgtcagtttttttattcaatcatcatttctctttccttctcattttttgtcttagtttcagatcatggtggttcttttgtagtgttagggttgttagaaataatagagagattataatggaagaataaaataagatgaataaaagactaagacaattacaactctaaataaaatattacaaggacaatatattaaataaagagttataatcctaaagcacaaaatacaaataaaagaaaagagttacaactcaaaactcaaagatacaagtaaatgtaaattatacaaaagcatatatatgatatagaatatatatatatatatgatataaaatatatatataatagagtatatatatgatatagaatatatatatagtagatg

SEQ ID NO: 26167 - DNA, 2415 bp, Cannabis sativa
aaatatatagatgatataatgaaattactaatttaataaaaaataatataaattatgtcacatgtatatatttaaaagaaaaagttctctaacttgttatatactcaatttttgtaaaaataataaaataatgataaataaaattcgcccacaagacaaaaatacaccttgaaaacacacaagccaacaaactttggccaactcttaaaagaccaaacaaagtgccacgtggcaaagagcaagaaaaatgtgatcaatgtcctaaccaaatagcatgcttaaggtttggcccttagggtttatcttttcaataatttaagaaatagtaactctcttggaaagcgtaacccaaggagaattccaactaggggacaacaattcttaactagtttagaatataagagtacaaaaaacaaaatgacattatcagatgcaaaggaaaagtgttatacacgaccactgaaacatttttagtgtcagtggtcgcatattaaagagaatttaaaagggaagtgacacttgaaggaaaataattcacacatgtactaaagacttaaatcctaaaacacttaataatgttgcataagaagggggaaaactagtgtcgtaagggtgtgcaaaaaatcatccaatccaattacaactgactgatccaataaaattggatatctaatcataattagatgggatcgaatgtaaattttgaaaatccaatcagatcagatctatcatccaattatattatatatttttataatacatttataattttatatatttaatatactttatttaaaaaatatattaattgatttaatatatatttaacccataaaattaaagaaaaaaaaccttaaatttaagatattaattctcatcttactaaacgctaataaaattgtcaatgcctattaaataagttttattttttggcggttttattatgggatgatgagaattaggttggactcaagtaatatttattatgtatgttggattattaggttttaaattatatattttttatatatatatattttaatgaaatcaacttaaatggtagctaaaatagactggatggatccaacccaatccaataaaaaaccagttaatgcattcaatagttgaaacccatgactcaatttggttgggttgtatcgaatgataaaatccaatatctagtcatcatttgtcggtcatcgaatattggtgcttcttttggttagacggaaggcgagagttcctcctctccttgcttatgtctctttctatcactcgattctctctctctctctgagtatattatataaatattataatataatgtatatggtcatggtacggtctgcttttgttattttaggttttcctttcagatcaaaataatgggtaaagtggccgcctctccgcttgccacaaagttcctctctcagcaaaggtaactaatggttaatggtaatttgtgttaaaattattttaatttagtattataattaggttaatcaatctttcttatttttcttatgatttcaaattttactttatttgagttttttttttagtatttttgattttatgtagttatatatatatgttcaacgccagacttgtctccctcaagtatttcagtacatttattaatagtctaattaaaatatctatatctttcacggtgatcttagacctggaatcaaaatagacaacattaatgactctgatttcatgcacctctatgggagtaggttggggctataataagagcattgctattaggcaccagtagtgcctagcacctttgtgacatgtcgcgttgcgattggttagcgatatttcttaaaagctattacattaaattatatgggacccgatacttagttggaccaatagcgatattgacacatagaaaggtaccacttgtgccctttagtatttctcctaaaataactagccacatgctgtatgagtttctcatattattaaacatattgaatccaaccgtagccaattccaatctcacacatttctagaatcaacaatgaatgacaaataaagcgcgtcaaaatgcttctaaatttcaccatctataagatgcctaagcaccctttcttgtgatcttttaaattccttgaactgtagagccttttcaatcttagagtggttggaaagtaccacaagactttatgtggcacattttttcttttggcactattttttttagattccccacaaataggacatgatttaaacttttcattattctctttttagaaaattgtacaattatatttgcatacatcaatatatagagtcataacctaacccaagattacccaattttatccaaacaactcaatcaatatggtgagtaacatgccaaatgaatgattacttcacctattaagcacttgcatcaac

SEQ ID NO: 26168 - DNA, 2214 bp, Cannabis sativa
tgaaagaggaggagaaaccagagtaaggccgggatgatcgccagaattcaagtaatagggacttgaactgtcttcgtgaacgggtcgactgtaaacaatcatttgttgtgtagtgttgtctccagtaatgttagaagctagaggaatgatcggaggaggaatgagatatagttttcaagggcccaacgagagtccttcccattgatagcattgataaccaccctcgagtcattctccataataacaaacttggatccgatatctaaggctattcatttgtaaattttaacttatattgatttgtattgacggaagttatacaagataaatcacataaaatattatttttttattaaatttttatatttttaaacttattttttttatatatatatattttttatggtcagaggtaaacaacaaaagaaatttacataaaaacaatactcaaataacaaaaaaaaaaaaataaataacatacaaataataaaaaatcaacaataaatcaataaatgtgcaaaataaaatacacaaaagactgtattttttacaaataaaatcataaaaatcgtaaaaaatatgtaaaattttatacaaatgtatttttataattttttttatttttgtatatttatgaaataatctctaaaataaatatatacatataaatttgagaagtattttaaatgtatatatccgtaacatctttagttcttatttatttatttattttcatttattataaattaatattaatgttatagaaagtttcgcttatcaacattattttttggcaagaactctggcttatctacttatccaaacacttctatcttttattcttccttgtatcaacagagttgttattgtttcttaattcatttaaatgtttttcatgatggaaaaaatatagtaaaaacataacaaagtcatattagggtcatggaggaaaaacacaacacaaatggttttgatcatgaactttgatttttcgtcgatgaaactgataatataaggatacagacactcgtaaaaggagatggaaaagaaaagaaacaaagcagaaaaaaaaaaaaaactagaaaaggggcacatctaaaacaggtccccaagacagaaaattacaacagatacttaaaaatcatatacataaacaccaagctcgatccaaatgaaacctccttgtgagaatttagaacatgtaattgatcttttcgtttttgaaatatactagtgcccagataagagaaaaactgatactttgattgctctctgttccagattacatggtgttggtgcttctgaatgatccaagagctttgacagcggctgctctcaatacaaattggtggtagaaagcagcaatggcagctccaatgaatggtcccacccagaagatccactgatcgatgatggaaaacacatgcttattagttagaaatatcatcaatttggtaaaagatatagtacaaacaaaaagattgggttttaagattcatacgtggtcattccatggcttctcctggttgaaaatcactgcagctccgaaacttctagctgggttgataccagtaccagtgatggggatggtggcaagatgaaccatgaacacggcgaacccaattggaagtggtgccaggacctgtcattttgacataagaatgttattaataagttgtttatgataaagggtttttagttttggattgggtagtagagtagtagtacttacgggaacatgggagtctcttgcgcttcttttggggtcagtagcagagaagacagtgtagacaagaacaaaggtgccgattatctcagcggcaagtccagtaccggtgctgtatccatcggcaagggagttggctcctccgccgtatttatcgtagtaagcactctggaaagccttcactagcccacacccgcagatggctcccaaacattgagccactatgtacaaaatggttcgtaccaaagacaccttccttgccaagaacagtccaaaagtcacagctgggttaatgtgtcctcctgctcattttaatcaatcacatcatcagctcaaaatccaaaccaaaatatatgtgtacccgagttaaaaaaaattataaagaaaacagagtggaacattttatcgaacagaccatgaactagaaatacaagctaaatacaatgtcacagttagagagtaccgaccagagattccggctgtgcagt

SEQ ID NO: 26169 - DNA, 1216 bp, Cannabis sativa
atcacttcaaattccttatattgataactaatcagattgtaaagagttttatttatggcataaaacctagcaccaaccttatccactttgccattccaaactcttttaatgaatccttcaagaacatataagggaggattggccccaagaacataacacactatagaggagctcaaaaaataaatctgatcttttatatcgtctaaagttattttgactttagcagcagtagcagtgttcttgaatgaattttccaaattacgaactacagttccagatctaagaataggtagagtagtattattaccttgctgaatgctagcagcacaatcacgatttgcactaaggaagtattcaaaatccctgctaatctcttcctgcttctgaatttcctgcaacgacgaacgaggcgataatggaggtttgaataaatctgccattgaggcaatctgtgacgagcgtactcccttttcaccttctccttcatcctccgagaaattaatcggctcaattcccagtactgcatccatggatttcgttttccgagcatctgccgtagaggttggacctcttttcttaggtttctttgcttccatttgctgcttcccctgtctcgccctggttttcgccatagcaccagcccaagagctttacaagagagagagagagagagagagagagagagagaaaaagcaattatgcaatactaatgaaacgataattaaaaaagtttaactgctaaaaacttaactatatatttttgttctcttaatcacgtttgcttttttatctacccataaatctctccatttcattccaaattcgtgcatatatgcaaaaataaataaataaataaataaaaaacaattattcagttcacaatttcggcagtttttgctgaaaaagtataatctttgtttatgataaataattatgcatgtattcaaattaatttttcgctctctattagagtgatttcttattcttattaacttagttttgtttattttgatattttggaagaatttgaaaatgaaaaggaaaatatgataaaaaaaattgaaaaatatttactgcatataaattaacaatgaagagattgacacaaaaaaaaaaaatgcgatcctttctaaaactttctattaattaaaatcataagtaaataagtgagataaataagaaatcataaacaagatagtatgccatttcaaaataa

SEQ ID NO: 26170 - DNA, 3953 bp, Cannabis sativa
ggcacgcgtggctgtgtacaaggtgtgttgggatggagacatgtgctttgattccgacattctcgccggttttgaggccgcgatagccgatggagttgatgtgctttctgtctcccttggcggtgctgccgtcgagtattttcaagaaggtattgcaatcggctctttccatgctgttaagcatggaatgaccgttattacctcggccggtaatgatggaccgagtgaacagactgtcgctaatactgcgccgtggttaataaccgttggagctagcacaattgaccgcgaattcaccgctcccgtcactcttggaaatggaaagatactcaaggtgattttttttttcataacacaatttaaattctcttttattaataattcatccaattgtaaatatgacagggtcaaagtctttcttcaataccattaccatctaaaaacatgtttccattactaactggagctgatgctaagttggccaaagcaaatgcttccgaagcgtaagtaaaatatttaataaattcagtttatcagagctcgtttggtacgtcgtattacaatacgatataatacgttaaacacttattgatgacataattttataacagtttgttatgtaagcctaacactcttgacccgaagaaggctaaggggaagatcttagtctgccttaggggcgacaatgctcgaatcgaaaagggtcaacaagctgctcttgccggtgcaatcggaatgattttggctaatactatcacagatggaaatgatgtcattgctgatcctcattatcttccagcttctcatctcaactacaatgatgcaaatttgctctttagttacatcaagtctactaagtactaatattttttctcttctttttttttttaatcataatggaagaaatttctttcaataacataattaatttttttttttatcattatttaggtctcctttggcacacattgctcaagcaaccactctatttgatgtcaagcaatctccttctatggctgggttttcatctagagggcctagtttcattgaaccttctattcttaaggttttcttattaattaattactaataatttttcaatgatttatgggattttttttaaatgtttgtttaacttttttttttttttttgatatgttgtagcctgacataacggctccgggagtgaacataattgctgcatactctgaagctacggcaccgactgatgttgaaaccgatcgtcgtcgagttccatttaatgtcgattcgggaacttccatggcatgccctcatgtttctggtgttgttggccttttgaaaaccctttatcctaattggagtgcagctgctataaaatcagctatcatgacaaccggtaaacactgtcaaaaatttttagtcacaacataaatttttttatgactaaatatgacttcaagtcacaaaattacaattttttcacttttagtcacaagtcttgttgtgactaaaagtgagattttttgtggtgaaaagataacacttttttttgtgttacaatagacattctataacattttttttaatgtatttacactaaatttctcaattgaatttcagctagaacaagagatgggactaagaagccaatattggactcagacatgaaaaaagccacaccttttgcctatggtgccggccatatccatcctaaccgagccatgaaccctggacttgtctacgacatggaaactcacgattacttgaacttcttatgcgctcgtggctacaacgcaacgactattaaattattcgcccacaaaccatacaattgccccaagtctttcagcttggttaacttgaactacccctcgatttcaatccccaaactaggtaagcgaacgttggttgttactagaagagttaagaatgttggcgggccaggaatatacaaggcgctcctgagagctccagcaggtgtttcggtttatgtcaagcctgcaatcttgaatttcgacaaagttggtgaggagaagacatttgagattgttttcaaggctaatgttgttggaaagcctaagacatacacttttggtgagttgaaatggtctgatggcaaacacattgtgaggagtcctattgcagtgaaattctaagttgatttatgtgaatgaaaaaaagtagttgtgtagggattgagcataaaattctgtacaataattttacacaaaatcattgtgatttcattgttgacagaaccccattattcaatgttggattttaatcaataaaattgtaaatttcaaggtgatgatcaaatgtgcattcttatgtatatattttaataaaactttccttaaatttacttttttttaattattattattaaatgttaataacaaatccatttgttgtttcatcaattattttacgattttgtccttgagttttcgaaatagtagtgtaaaaaaaagtgtttcaaatcattgctatttgattcggacctgttgttaaaaagtcgaggcattttgaattgtttgttgacacgaataaagtcacggaaaacctctgaaattatttcaatattggaccttgaaatataataattccgaatagaatctctttagaaagaaaatcttttgtctcaatatagtagcctgctccgtacaaaactttcgttattgggttagccataagtttatttgattgctcctagtaatttttcacataattagctaattcttgttatattatcttgtatttttcatattaattagcccataaactattttgaatactcaaaaaataattaataactaaggtcaaacttacaacccgcataacaagtggaattgctcacaaattaagctattaatttttatggtcaaacttacacatatatcaagctctttacaatattctccattaatagctaaagtcctaaggaaaaaaatcagtattacaaataaagcaataattaacaaagacttatttgtacttaaagtttttcaagttgatcatcatttttttctttattgcaaattagtccctaggcatataagatttggtaaaatgatcccaaaattttattatttataaacattaagttcttaatatttaaataattgtaatttcgttgatttttatttatttattcattttatattcattaatttattttttgtgttaatatttaataatttttggaaagataatgtttaatttttattttaacacatatgatcaaataattaaaatatatttcattttacgcgtttttagaatatgtgaaaataagaaatataattgtagaggtagaaataaaatatataaataaatgacttatttttcaaactaagtaacttatctttttttaagatttattttcaactatgctcagtttatattatttacatattttaaaaaattattaatattaaaataaaacaaaatatttaaaactaacataaaaaagttttcttttttgcaatttgacaccttcaaaacagttttctttttaacgtaaatctacataaaaacccatataacaaccaacagagaaatataaatcgcatctaaaatccacatatcaacccacacatagaaattaccgaagcaacttaagccgtaaatttgaaaaaaaaaattaaaaaatagtatataaagtaattcaatataaactaaataaataaaaagccaacacaactataattgtttaacaatatatattttttttttggatataaataagatccttgtattgcatcaaaagaacaattacaatcaaattgcaaataaaacaagcactttaagggttctcatctcacgagaccaaagggctctatttccttacaagagttaaaagacaagaatataagtttcattttttactttactcactttgatccctcttatatataattcaagatatatactttaaaagttgtaaatctcatgagagccaattccaa

SEQ ID NO: 26171 - DNA, 2237 bp, Cannabis sativa
caacgcccaggttgacattccagcgcgtaggttgacatatgacatatgctgggtaagtgtaaaactatccaaggggtgtgctttaaaatgcttaagtactattttgatatcacttagtctattttttgtttggtcaccaattctcagagatgttattgttctgcgaaaatgagagaatgcgaagttgtgaatttaacttctctgagttcatggatcttagttattgtaaaaaactagatggacggtcaaaatagaatcaaaatcggataagccaacgcactaggtcatttttctacctaggcgttgggtactcattcctgagctctcaggatgttgttttgatacttccaaggttcttgaacttgaggacgagatctcctaccccatttttgaccattgcagattcattggttgaatcaaatttaacatttgagtgatcgaaccagtgtactaggttcattgtcaacctaggaattgggcccaacaccaggtcaacctaggcattgggccttatttccaagggctcgagtttatggttttctccctgagtttacttgaatcttcattatttctgaagacaaaaaaatacccagaacacttttttgagaacttaattagaaacagcccatgttgacatattgttggggctagacccagtgccaggtgtcaacctgggcgttatgtcccagttatggcccattagaattccatttggtcccaaaaatagtttaatattaatattttctaaaaatagagaagatgctcaaaagagttctcgatgaacatcatcggaattggcccaggttgacaaaatatcaacatgggcactgggccttgctttagccacccataaagtgttgtttcttccctaaaagtacttattccttgttttaaatgaagatgaagaagatgcaaaagtcagatcgccaatttgatacttggaaggttccgagattgataaattgtcaattagggtgctaggtgcccaggcaccaagtgctaaaaaataaacttactttgaatctaattttgatacctcaaatatgtccatggtatgtctagttgatgtcccaatgaaaagtttgacccatttgcactaagacggtcctagaaactgaaaccttagttggaaatgtcaacttgggcgttaggtgaaatcctaggtccccaggttggtttctgggatacaagttcatataattccagctcccatggcttggatttgattgctccatgtcttcatggtacagatgactaaagatagtgagttggaattcaagttattgaagtccaaacttccatcctagagctcccgaagtcaacttgggcacagggctagggtcccctgctaggtcaactagtatgaatcaggtctactcaactctgtgacatcatctttcttatcatagtcaaatattgatgtccacgtcaccaaggaatgttgtcgatatatatataaaaaactatatatacataaatgtatataatttttctcgtggaacctaaaaaatcaatcatttttctctaaaacatcagcttcaataatagtaaaatgggttaaagtgggtcaatacgaatacgacacgattttttatgggttgggttgtggttgtaaaattaggcatgagtcaaaaaatagatcgatacacttgccacgaaatatagatgcaagtcacataaaatatgacatgaacacgacacgatgacatattttgctacccctacgttttagtttagcagtggccacttctaagtttgataccacttacgcacagtggaatgttaggatataatctaggtgaggaaattagggaaattataatgctatgtttaatgtgatttattaaatacatatattgtaggaaatttagctctaatacataagaattaatctctgtaattctagtttcaagatcacacttaaacaaacagatgttaaatcaaaacaaacaaatcaagaaccaaaatcagcaaacacatattaaaatagaaagataacacagatgaatctagatagcttccagacacaacaacacacgagaactatactggttacgatcctaagttcaatgtgaacttggtcatactccagtttaaaaatactgccaccaatctttattgataaagagaattaaagatatcaatctcaggagctacaagaaaataatcacagtaagtcattcatggtgtaatccctcaacactcattaacttactaatccgagccaacataatcga

SEQ ID NO: 26172 - DNA, 1801 bp, Cannabis sativa
agtgcttttcattttatgttggcaaaagttctaataccaacgttgatttgccaacccacttttgccaacacatcacaagtaaattctattttaccacttttgccaacccacttttgtgtgctggcaaaagtgatatttcttgtagtgtgtttgttctcgaaactgactatctgcatgtagttcaattgattcaagcaggtgaagatggttgtcgcgacattattgggttgttcaatcaaattagagaattacttttgcaaccttatgttatgggttgttttgatttttagagaggtcaatcatgtggctcacactttagccaatctaaagcttgcactatgtgaattggggttgcacatccttatgtttgtcaagatgttcgagttgatgagccatttcttttgtaattgtttggtttgaatgaattctatttttttaaaaaaaaataaaattaataaatcaaaacttatttattaaatcatatcaatgtcgtctttaatttgtgaattaagattacaactcaataatttaatgtcagagaccagggacaattcaagtaatagtaatataggtgttttttttcttaaatgacactgaatataagtatttatctaattactaaaatcttatcatagagtatactcacacaagaacgggacaaacacacgtacacatgattctttatttaatatatgatactaaatatagtatttatctaattatcaaaatcctatcaattaaggcttggtagctactaggtaacataaacaccacacattactcatacatgaacaatgtgggacaaacacacacaattttttttttttaataaatcacactaaacataatgtttatttaattaccaaaaccctgtcatgagttttgtacgaggaaaatacacattttataggtttatttacaatgtgtgcaacttttcatcagagaaaggttattctaaaaaattaaaaaaaaaaaagggaaaaagatttgggtaaccacttattttttagggtaacgagttatcttcttaaaataactaatcaccttatagtatttttttccaaaatttttaacttttttttcccataaaaaattacattttttcaaatttatatcttaaaaattataaaaatgaaaatttccctatttttgttttattttattttattagcatttattttttatatataattatgtaattataattaaaagaaagtaaaataggtgttttttttttcttgaaaaggtaagtaaaataggttagtgaaattgaagttagagaaaagtaacaacttaattatgttgtctttttttttttttttttggtgtgaaaattagcgtaatacttcattagataaaaacataattagacctcacggtcattacagagcaggttctccgacaaggcggagaccgaaatacatccatatatttagtggataaacgcccacttagccacattatgggcagcatagttatattgtctactaatattcataaagttacaactaataaaagaaagagtggatctcatacaaaaggagacatagttctcaaatgcccaatgggactccttcccattgagaacattgatagctagtctcaaatcactctcaataataataaactttaaccctaagtcaattgccagagaaatggctgaacaacaggccgctgcttctccgcacaaagcattcaaaaagtccaattgagtcgtgtagattcgaatcaccttatccaggtggttcctagcaacaacagttgtgtacatgcatcccaatcccaccctaatttagccttt

SEQ ID NO: 26173 - DNA, 1380 bp, Cannabis sativa
tcttcttatgtcgaattactctgcttgaaagactcgacattccttgataatataagtctgcacaggcaatcatgcacaagttctgcccgaattatccctgctaaagatctaaccttgaaaattttaagtagaaagttctctggtcgggccatggagttaaaattatccatctaggcttcataatgttctacacgtatccccatgctagatgtctcttcactctgtgcagagtttgggataacaaaaagtttaattattaattaggcattctattgtcataaattaaaaatgaatatttattttttttttaaaataattattagtatatatttatttaattaaattggtgtttaaatattaaaagtttaattaaatataacaaaaatgaaaagatgacacaattttaagtctattgggatgatgtgaacaaaagaaaaaatctgtctaatatccgcatgctgggttagctcttttgtattttattttaattttaaaaaactctttcctctttatctctctctctctctctctctctctctaaactactatatttcttgagacactatagtgttgtaacacttgcccatataattttgttatagcacctagatcactgaggaaagttgtgatgaaattagctacaaatttgagtttatggacatttaggttcaataactggtaatactttatgacaaagaggaacgaggattagatcattaaacgagagaagttatattctgttatgctacaaccactgtaagtattctgaaacccacacatataattctaagattttagaaaacatattatagaaaattattatttatgttaaataataatttacttaaaaaataatatgatcgtgcaattgtattcccaacagtttgaatgtttgtattggttttaattatatgttaaatttaacattagttaattttaaattaattaattagttatttattaaattatatatattttttatttcaattaattataatatgctaaaatgtgtaataataaaaaaaaacataaacaattataattagcagcgaaatctgatgttaacgtccgccactaatgatgctagttagtctcagaatttgagacttgaaaaagcaatagcaatagagtcctgtcgctgttaatttttattaggaatgggacccttctccgacgctaatactcattaatgatgagctgttcttagccgcaaaatgttgggaacagagtcctaccgctattgatcagtagttgttgaaggggttaaaagcgactaaaaaaccgagtttttgcaaatgtcaataatatattcgaaaatataaaactgtatacgcctgcagaagcagaatgtaattatgttactgcagaaaccaattttgc

SEQ ID NO: 26174 - DNA, 5188 bp, Cannabis sativa
taaataaaaccaaataaaagtcactaaaataaactaaaaatacttgagaacaaagctaatttaatgcccaaaaaaatataaataactctattttcatagagttatcagtaagattgagttggttgagtggttcaacatttacaagcaaccgtgaataatgaacacgaacaaggcattaatcaacgaaaagcacttagccaagtgatctcaaataaccaaaacaattccctcattagattgaaagctaaaaaagataaccattgagtctgcactattgtctactacatcatacactaaaaagaaaaaaaaaacaccatcacgcttttacaataacggataagtgtgcaacataaacggttgcagaggagtcttcgactctacaaaaaataaaaatgaatatgaggagagtatactatatacatcatctatagagagtgtttctttgatcatcttccacgttactgcgattatcaactatccatgcacgcttagattagactgtgttgaacaatttctgtgaagaagttgaatggataatggataggctcggctccatccagtttttctttgcaaatatacccaacacatccaattactaatccgtgcccttggtaaagagaagtttcagtaacgccaaagatcctcaaagtatatacatcaggtacagagaggaacaaaagagttgtcatttgtcactagaaccagccacatacgaaacaacgactgtgatatcatcaagctttcccccatagtagcggaaaccagcatcttgagcagctgtggaaaaaggtgtctgcctgtccttgtcctgtgctcgttgacgcgccaatgctgctattttttgagcagttgcctgaggccctaggccagctcgcatggcatgcactactactgccgttatctcattgttgtacaagttgtcaaagagtccatcagtcccagcaatgatgacatccccgggagctacaggtactgtaaaaacctgaatcaaacagtcaacttagcaccttatcattcagcttatgaaaacaaccaccgaatgttaactattcatgaaaattacaaaatataactactcatttaaagctttacaatcctagtgataaacaagtttcaagtgtttactatctcgtttgtatatatcatataattagaaataactagtactcacaaaacttgaataaatggcaatataacttcgaaagacaatacgacatatacaaattaacagacctggccagagctaggtaaatcgccattatttccactttccaattgaaaagtgaaattaaaatcatgctgctgcactggtgatctgaagattgtacatccatctcggaccacaataaacccactgtcacctaaattaatggcatgaataccctgcaagatgaggccaaagatatatttaagttgcccacaaaatgttccataaacagtatcaatgatcaaaataggataccaagtgacaaaaaataagtctcagttcccaacttcctattgttcattcgaaaacaataaattgagtccatccatgtgtgcacatatacagaaatagaaatgggcctccaatccaagtgaacgacattataaattatactgactaattttacatttgaagttcaatactcgctccaagtgaagtcactgctggggtacaatattaaaaacatcatgcttatgttgatcgatcagattacatagcattccatttatcccttaatagattaaattcataattacacagtatctgctttagcagcgagattatacactgcagtatcatgaattctcatcacatataaaaccttctcaaatatttatctgtgagtaccaaatgtccacatatcagacgccctaagttgtgtaatattaaataaagcctattattgtgacatgctaaagaatctggcataataaaagctgcatacctgctcattaagtgctataatgcacgctgtggaagaaccctttgctttagtacttgagtgagctttctccaaaacccttgctgggtcaatggaacccttgggttcttcttgcacagcagttactgaattagacatgagttctctggaatatagtcctgaatccacaccatgatctgcccagccaccaacaccatcggcgacccctattgcttgttcatcaacgcagataaagtgagcatcctcaccaccagtttcttccttatctgggtggggtaaatagcatgatgctgagaccagttttagagcctttccaggcttactgtccctgtagtgttgtaatatctttagtaattggtagcactaaaaatggatattatgtaacacgaggttttaaaaaggaaaaaaaaagggtcaaatcatcaatctgatatccaaatgactcaaccccagttaccccactctcccactaatatagtatcttttcgcagtccctttcatgttagcacccataaagagaacataattcagtcatgatgcagcatataactatagaagtatttattgaacgtttatatcaaagagcaaacaatactgttcataacataatacggggaaaacacgattatgattttaacaagataagtaacatactgataagatgaatctgcagaactagagggttgctcctcgcgggaagaattgtcaaaagacacatcatgagcaggaccagcagagaaacatgaagaagatgagctgtgaaactcctttgatcctgaatctataactgggtaggaaccaaaccacctcctcccaacttcatatacgaaatacccatagattgcactattgttgggttggccatgatttttcaaactcatagtagctttctggaagctgtcaaaagttctgtttttgctgctgtatattacactgttagtgttactatcagttaatggcaggcggtgttcaagccttgatgtcaaattacttacgtaaaattcaccaaatacaactctagaaccggaaacagccataggtttgctcaacttttccttgtttgaaaatggattagggtcagagacgaggcaatcgaagtgatacccacagacctgaagtgaaggccctgacactgatggtatagagaatgtgcgcgaaatagctccaacaacagaaagattttttctttgattaactaattgtgaagctgcacttgcagcaactacattgcctggtcgtaaaagtgcttcaagatctgaaagacttgatagtgatctggaaaacaatctagaattttcaaaaagagatcttcccttcccaaataaaactgttacggagtcctggagggcaccatcatcacctacaatcgatctctgaactgcagatctaagccttgaaaaataaggtgggggcatcttaacctcttaaatgaaaaaaaattgctacaactcgtctacaacagagaacaaaaccagcaccagaacgtgcggaagtaaatctcataactccctataccatctattgcatcctaaccactctaataacatcaccagattggaaaacctgaaaatgacaacaaaacagggctagtgaacaagctaatagcgttgtaaacaaattaaattagaagataaactaattctaacaaaatattctctaagtaagcaaatatgatagtatttcaatctaagccgagtattttttttttccagatatatggcaatgaattacataaacaacaggatatttggacagatataatggaaatactaattacataaacaaatctcaatacaaataatcaaaaattctattaattaattatttggcttcaccataagccgattacgccgcttcaccaccgctttttgttcaatattaaataaagaaaaaaagaagaagaagaaagattaagaggaacaacataaatctgttagaaatctcacctggctaggcaatcggaatcagaaacctttaaccctagaaatccaaaagaaaaaggtaggctcgggctccacggatagactggagtcgactctgtggagttaggtgggagaaaacgggcacgagctcctctcctctgttcttctttatctatccatctttctttcccaatatatttgggatcagcttcaaccagctaaacagataaacactgtttgggaaccaggaaaatatttgaccagctgagattaaagctagggttttaattttcctagatttgtaataatgatgtatttatagcgccgacttattaaataaatctcctgaatagttgttaaattggcggtacggatggttgtttgttgtgttggatttacgagagggtagtttagtcattttattaatgctagtttaacagagacaacgtccaatgggtaagacttttggatttgtggcttttcaatttcaagcgccatctccatttgccttcatttctttttattcaaaaaaaaaatataaggtggataaactatgacgattccgggctttgaaaaatagaatatggagtaccaaagattgttatccatcaattatactatttttttaaaaaaaaaaaaattctaaaggtgaaaacaaattttttttttaaaataaaaaaacaacaacaatgtggttcctaaaatttggaataattttttatatttgtttatgataccaattaattcaatttttttttaatatatatatatatatgtcaatctcactgctaaaattcaactctataattgctgatgagggcagggcaggctttagttggcaacttggcatggatttggactgttgagtgtgtttttatatgtaattgctgccgagtcaaatattaatttgatactgtttcattttaataaaataatttagaatattcttagagtgacaatgaatgaaatgtaatatttttttagaaaaaatatatattgtttttttccccttcacatagcttatatgcaatcaagccaccaacggaacggctagtcgtttagccaaagagacaaaaaaatttaagtgaagaaacataaatatatgtggattgataatgtttgtacaaacgagataaaacaaagcatcaaatatttttcaagttttaaaaagaaaaattcttttttctttttttcttgaaaattaaaagaaaaattatttcttacaaaaatatatatatggacacaaaaaaaaaatatggagaatttgattttctatacttagaaaatcaaaaaaaaatttccctaaaccaaaaatttaaaacctaaaaaaactattcc

SEQ ID NO: 26175 - DNA, 4697 bp, Cannabis sativa
  modified_base (924)..(927): a, c, t, g, unknown or other
tgaaacaaaaatcgattttgatcaagctgctttgcatacattcctttaccaggtttctagagattagccatcagattttgaaagattcgaaagtcggataccttgcctgtgagcagccgtccaaccaaacaccatgtggtgtcaataaccagatcttcttctgcatcgttttcatcatagaaagtctcctctgcctcttcttcttcaagttggatacctttccaacgttcctctatattatccatatcagtgctacttgatgccatgagaaaacacgtacgtacccgtacaggataaacaacaatacccgaaacaagacagaacacgacaaaacaatcaaaactcacacaaaacgagagactgacaaaaacactcaaaaagagagacattttaagatgtttgtttgaatattgtactgaaaataatgtgattgaaaaattaatatatatatttgtatattaaaagtgactatacgataataattcttaatttatcagtgtttgttttaatagtaaaatttaacaatatctcaatgcttaagtgaacgcttgttaaggttttatttttaacaaaaaataaaaccaataatcaaacgacaaaataagatttctgttccatgcaaattgaaactgaagccccaatcttgaagctgaaataacgatttgtagagataaaatcaaaaggtaatcaaacaacaaaagatggtctatcttgtgcaaattgatcaaagattgaaacccaaattgaagccctcgtcgaacctccctctaatgccctccattcctctatctcagtgcaacaagggaaactagattcttcgccatctgttgatgccacaattttttcaattttctgggcaagcatattgattaaggtatcaatttcattgactaggatcaatgtgttggaatttattttactagnnnntagatttactaacatgtatgttaattgtaaaagtataatctaacaccttaaagatgaatttcctaaaataataaattaaacacatataaagttatagaaaaccttacattggtggcagcagaatataatgtctccttctgtttagatttctaacccttgatcctttctatcacagagcatgatatggatctaaacatgaatcttcttttattgttgaaattcttcacaatcttccacactatatttgagtattgacttgaaatgtgcgggcaaatactcttcactatggggcacgaaatttggagaagaagaagggttttcaaaaattataaaaaacctctcttttattttctaatttgtctaagaagaagtcaattaggttatgaaaataagagttataattttatatttataagatgtctattagggttaggttagaatttaaatatagaataataaaaaaaaaagataaaatgcctatggtcgaaacccttgtgagcctcttgggtttcaattttgcaattttattaaaaacgtatcttttttttttcttctcaaataccatattttaattctatctctataaatatcaattgtatccatttaataattataattaattatcaaataaaattaccatttagcttgtttattaattagacctttcaaagtttattaattaataaataaactctccaaaatctaagggggttgttcattggatgacatccaatggatttggacccaacagatccaatctaattatttattggatattgaattttgttatccgatccgatctaattgaattgagtcatccgatccaatccgatccaatggatgtattggattgaatcagtttcaaccattggatgcattgactgattttttattggattggattggatccatccaatccattttagctaacgtttaagttaatttcattaagaaaaatatatataatatatataaaaacataatttaaaacttaataatctaacatatataataaacattagtttagcccaatgtaattctcatgatctcttaataaaactgttaaaaaataaaatttattcaatacatattgacaattttattagcatttaggaagatgagaattaatattttaaatctaaagtttttttttctttaatctcatatgttaaatgtatattaaatcaattaatatatagttttaaataaaatatattaaatatataaaattataaatgtatttttaaaatatataaatatagttggatgattattggatcggtttggtcagttatccattggatcggatgttcgatccaacaaccgatccgatccgatttttaaaatttacatccgatccgatctaattatgatttgatatctattggatcgattgggattggatcggtcagttgtaattggattggatgactttctgcacatccctactaaaatctctcttcttctcaaataagcctctgcttagtaaaaattcataaataagacatagtttaatttagaattctaattgattaattaaattcaattaaccgagtctacaagataatattatcacaactagtgtggagaccatgggcccatgtaaccaagctcccaataagtagatttgaaatttactaagtaaatttcttaacttattaattcctcctgactccaatatagattcagaatcgcactcctgattacatagaacactccaaatatagatacactatgaataatctattgtttcaatccaaataatcaaagatcctttatagataatttacatcgagtagggataaatttactgttctacccctcaatgtattttatccttaagacacttaacttcctataattgatatttcagtaagctaatataattattgaaataagagctctttcatttatttctattaagccaaactcgaataaaatcatcatttcacttctatataattataaaactatagattctatatctatgattagtggtcccactcaattgtactatcatgtttccaagatgtaagtattaggaggattttttttattcttttcaaattctcccaatttaattgcacagagacataagtagcctccactccacattcaagaaaatgctctctttcaaattctatatttttcaactttgagaatgaattggaacccaaacatggaagttcattagttgaacaatagttatccgtatagttcagttgttagctttacggagtattttgaaagtcttacctacaaacatatgaattttatattttctggtgcttcacatgcttaggtactttcttataaaatgtctatgaatatacttttgtgagatacaatgcccttaatagattcaacaatagcctcagaaggttttttcttgttatgctacatagtttggtagagagacagtaatttattgtttgtgttagtggtaaggattggattttttgaggtttgatgttaattgttattataagtaaattcaatttttttgtaccattaaaacttgaggtgtttgtccacattatgtttttctttgtttgctcaaagtaattttttagtcatttgaaaattaatgtggctataagcactattttttaagtaaaaattgaaatactcggacttatttctagagtcctcgtgaatgggcacacttttaaatttcttaaaactggctaatattccttatatatgcagtttagattaatgattaggtttaaaaatcaataagccaagatacgaatttgtatataatttagaatacaataataatagataataattagatatgtgtaccagattgattaataacaattacctcaatttgatagtgtattactatcaactaagtctttctctttagttctctaaattagtagttattttatttacctgattatcaaaagatatacaattgtgatgagacaatatgtatttatagagttagggaggggagttagccacataaccctacttagattaggcatgttcatcaaagcttcaattaactaaaaaagcctacatttctgcttcaaagcccaaataaaaagtctaacaaattaataattgatgatttgatattaaattgagctatattatgtgttttaatgttaatttagtcttagtttagcccagtttgcctaaggtctttatagcttttaagattaaattttaattttaatttttatttgaagaaaataacctatttaaaactagaataatttacataatttatgattagtaccagcaaagttaaaaacttatagccactcaaataccttttctttcttgttgtagtttgtatctttgttgtttggtaatttgagcttatagatgaatgtcaagtgaaattcatagcttctgaatgtaggaatgatgggactctgtttgaccacatgatcctcatacaggatggagctattactgtgttattccttcttggacttgtctgcccaaatcaagaggttcaacatactcttgtgtgtttggaggtaaaatttaattctcgtaacctatctttgccaagaatcaataatatatttgtttagtagttgaattgagtatataaatgtgaatttacttgagcggcttctagaaaaaactctctctctctctctctctctctctctctcgactcttgcagctctctctcgactcttgcagctcgtgctggagcaatgaagaaaacaagaggaagaaggcaagggaaggtgaattcaactaaggttgcgaagatgaaggtgttggaaattatttta

SEQ ID NO: 26176 - DNA, 1610 bp, Cannabis sativa
cacccaaaatatacaaaagaagttctgaaaaataacacaaaaacataaacgtactttctcaggaaatggcacagtctcatcttctttcccagcagccttattggcactcaaaccaccactttcatcacccataactgctttatcgtcttcttcttcttcttcctcctcctcttcttcttcttctttttcttcaacaacaactttgtcctcctctcctacaggctccgaatcgctctccttctcttcttcttcttcttccgatataacaataacctgattctcctccttcaccttgttcctagccgccaatccagtctttggcctcaccaaggccttggcggcttctctagcaacagctgcacgagtctttacgtaatttcgcaaaggaggcgagttcgatcgcttatgggttaccctagcgcgacctcggcgaactgccctgcgaagctccggcattgttcaaacccataaaataattgggaaacgacgacggaaacctcgacgcttcgaccattatcttaatcgagcgaagctttcaaacaatcagtcatggttatatatatacacaaatcatatatatataagaataaggaaaaaatcgtgacgaatttgggcgatggatcgattgggaatcgatttggggaaaaatggttagagaacaaaaattagggtttgccgagagagagagagagaaaggagaggaaaggtgtagtgagagatggacttaggaaaaagacaaatgagtaaatatgtaaataaaaataatttcttttttttttttatttttcaagtaaataaataaataatttatatattatatatacatggttgagaacttgactaggtttaggattttattatttttaagttttactctttgaaatttgtaacaaagcctctctaaattctaatatgtaacaaatcgatagtgggattgtgttgagatggtccctatttgtaaggactgaatatcgagcgagttgattaggttttgagttgatgggtttcagtgaaaaaaaaaaaaaaagtaaacttgaacacgtcttggcgggttcgggtcgagcagaacagtagacttgtcaacttttttttaattttatattttaaaatagaaaaaacaattgtaaattataacctttactaaaaagaatagaataaaaaaaatttataagaaaataaaagaaaatataactttataatttctggtataacaccgaaacttttaaaagttaactttacaataatcttaaataacaaacatagataaaaacttggattacatgtaatatgtaaattcttaaaaagatacataaaaagttagatcttattttaggtttttaggaaaatttaaaaaaacaattaaagtggcaggttggtaagtagatacagattcaacttgaacctgagcatttgtagaaaaccaaccagagtctacccgatgaaaatgaacgggttggagccgacccacccgtaaaaaattgattttaccacacaatcgaatttaggtcataaaattcatgttttttttctttttttccacccctctctcactactaagataggcttagtggcttaaattaagtttacataatatataatatataaatata

SEQ ID NO: 26177 - DNA, 3381 bp, Cannabis sativa
ttcctaccaagtttgagtaaggtacatttttcatgtagttaagatcagactctgttgagggagcttgtgtgtgaaataattttatctgctaggtcattggtgtgccaactggttttacttctgaaaacccaaacttctgcaacacctttgaaatgtaatccctctaacatagcatgagtttcctttccgtcctatccccgagtatctcaatcccaaaatctttctagcatgtacgagatccttcatttcaaactctgaacttagcatgtctttgtttttccttatctcgctcgttattttacttgctattaacatatcatcaacacacaaaagtaagaacatagtctttgtatttgatgttttgacatacacacaactatcattggcccttttcttgaatctagatttggtgatgaattcatcaaatcttttatccctttgcctaggtgactattttaggccatatagagaccttttgagcaagtaaaaatgatcttattttcccttctctacatagccttcttgttgctgcattagaatctcctcatccaattcaccatgtggaaaggttgtcttaacatctatttgttccaattcaaggtcattcattattattagtgctaggatcaaccttatagaggtatgttttatcacaggtgagaagctttttgtgtaatctaccccttctctctatgtaaattcttttaccactagccttgtcttgtatctcacctcttctactccatgaattccatttttcatcctaagaacctatttgcatccaaccactctccttcgtacaggttttaaaaccaaaacccaggtcttgtttttctttaaggaatttatttcctcgtccattgatttcccccatttcttcttatcagctgatttcatggcctttgcaaagcttcaatgttcgttgtcacactgttcaattatcaatgcatagtaaataatggtagcaaatccaaacctttagggagctttgtgaggtctttatctgtgtctcttgtcagctgttagtagcttcctagctcatttcatactccaaatcatcatgtggtatgtgttcatcatctgagatattttgtttatcatctccttgtgcttgtaatggttgtccctgctttgaactatctgatagtaacacctcaaattgcattctctcatctctgagtatagaagcattcttgggttgagcttgtatactttatcttcctcaaagatcacatctctgttgatcacaaatctgttttggtttcctggttcaagactccaaagtttgtatcctttaactccttttggatagcctatgaatacacatttcatggctctaggatctaactttctcttcatgtcatgaacataggcaatgcatccaaaagtcttcaaattttggtaatttgcatgatgactataccacatttccatgggggttttaaagtttgtagctgaagatggacatctgtttatcagaggacatgttgtaagaacagcttctatccaaaagttcttaggcaatccagaatagacgagcatgcatctgaccctcttcatgatggtgccattcattctttttgtaagtccattttgttaggtgtttttatcacaatgttatgcgtcatgatcccaactttcttacaaaagttcttacattgatcatcacagaattctaacccattgccagttcttaactttttaatcttcttgacagtttgagtttccactagagttcttaattctctgaacttgctgaaggcttgattcttagtttgatatatgtatacccaaacatatttagagtggtcatctatgattgataaaaaatatctatatccacctctagaaattatccttgatggtccctaaacatttgaggggatatagtctagagttgccttagtagtatgcataccaataccaaattttacccttgttgactttcccaaagcacattgctcacaaaattcaaaatttggcaccacattctttccaagcagccttttttttgtcaagaatcccaagccttttaaggctcacatgaccaagtcatttatgatatagcattgttgagttgatcatgcttttaaaagccacaaatgcaaagttattggtggagtttccttgaagaacatagactccattaatcatggcacccttcatcagtaccattaagcctcttaacaccttcaatatcctagattccatcttgaccaatcatccctccttatccagcatagctccagagatcaattttttttattattaggaacatgtcaatttatgagaatttcctccttttaattgtagcttcacagatccaattccaataattggataagctctattgtcccaagtctcacagatccaccatcaatttccctatactctaaaaattgatccatatctagacaaatgtgaaaagagcactctaaatctatgacccaatcaacacccgagtaagtcttggagacaaccattatattagcactctcataccaatcaaagttattgccctcaaagaccatatcgacattaccatgtctcttattaaagtcttgtttctctaattcagggcaatctcttttaagatgatttgtcttgtgatagatgtatcatttttttcttgtattgagaactgtaattaaacttacctctcgattgtccatgagagttccctcttgccttgttacctctccaatttgttctgcatcgtacaatcagcaatccttcactaggattttcttccttcattcattcaaaataattattgtttggtcttcatcctcgttctttatatcaatattttcaagatcaagaattattttattaaaatcgtccaaatgatcttcaacagatttaccatgtaacatcttaaaagcatacgatttttgtttcaacaataatttgtttgcgattaatcgagtcatgtataaactctccaactttgtccataacccagcaactgtagattccttcgaaacctcccacaagactttgtctttgagactaagaatgatggcactatgtgctttgttaagaatttttactgtttctttgtctgtttgtctttgatcttctcagctccaagcaatgcatctagaataccctactgtacgagtaaagcctcatcttcaccctccacaaaccaaaatcattctttcctgtaaacttttccaaatcgaatttcacatttcccatgattctcactatacggtcttcacacaatctgcaggagctcctttgtcgatcttcaaagctcaagaatactttcaacaaattgccaagctccaagaacatctctgcactgataccagattgttgggaaataatcgatttcaaacatatgcatttacactcacacaattacacattgaa

SEQ ID NO: 26178 - DNA, 1837 bp, Cannabis sativa
ctgctgacctacctggatacaatcttcaggtatatacatatatatcacatatttgttattcatacacactttactactctctgtcttaatttctgtcccttaacttttagttatatatattttcaacgatatctatgtatcacaggattcagacactggtagggatgaaaaggctgtcatctattctgttgctaatcttcaagacattgtcgaaatcccttccaggattaccagcgcaatttcatgcgaggtaataaatatatataggaaaagagaaatattgttgtgccaagcacacaaaacattgcgtaatcttacgctatcccgttattttttgaaatacactatagacgtacctaaaatgtcatcacatatcataaatcaaaaataataaaggatgatcgactagttatgtagcaaattataatacaaacaaataagtgcatgcatgcatgtaataaattaataaaattattgtaatattttgtattatgacagattctaagcaagtgctcagctggggtagatgtgcacaccattacaatggaaatactacaattagtcaagcactacggttgggactcgaaggtgttgctagccttggtcgcatttgcagtcactttcggcgagtttcggctgatcctccagcaattcccaactaacccacttgccaaagcggttgctcttctcaaacaattgcctgaactcttagagcattctggagctctgaagccaaaaatcgaagctctctacgatctcatcaaggaaattcttgatgtgaccaagaaaattgttgagttctatgatcttccaaggaacgagtattttactgctgactcacccgaaattctagctgctgcttctcatatcccaactgctgtttattggaccattcggagtataatcgtttcttcaactcaaattttggcccttaccggcatgggcatcgagtatgtataataatatggcttataatatatgtcttgtatagggatctgtgaccatattgacgtacgagttttgacatgtttgatcagatatctaacggagccttgggagctatcttcattggctcataagcttaacaacataaaagggcatgttgtggacattatccaacgttgtcacaagtttgttggtgagttttgcatttttcttataaaaattaataacaataattcagatttgatttattttaaattaactaaaacgtatgaaccttataaatataagtatatatttttttattaagagtgggccgtggctttaaaaaatgatttttggtttcaacattactgttatttattaatataataattttagtttaacttttaaattaataaacaatatattttagtatgtttcgtaattatataaattttttgtacgtgggttaaatattattttgtatatactcacattaatataaatgccatgcttttgttgatatagagaagaagaaggaggatgaagcatatgagtatcttgtgcgtatgttccaacttacacacatcgataactcaaagcctctaagggttttgttcaatgaagatccgaatgcactctacgatggcttaaacaagaaaagggtatgctcaaaacttaataatattaattcaatttcctattgattttaaatttggttatcttctgaacaaactatatttcatatttatttggtattttaaacagatcattattgaggatttgaagagaaaggtggtggctctattcattacagaactagatcctgaactcattcattcctctgaatttgcaatcttacaacaaatgtacgctgaaaagaaacacggcatgacaagatccgagagtcaat

SEQ ID NO: 26179 - DNA, 5276 bp, Cannabis sativa
attaataaactcttatgctataaattcagcataggtgaaattgtgttttgtatttatttttaatattctaaatgtgaaatttttgcttaacaatcatggaggtcgattaggtcccacaattggccaagtgttgcatccttgccgtaaccttggaagataacgcacacgagtggtttagccagttacccgaagcctcaatttttacctgggagactttgtagacttattcttggcacacttctaggcgaccatgacctacaaaccactatacacaatgttgtccaacattaaacaagaagaaggtgagggtttacaaagttatttcaaacattttaatatataagtaactaaggtcgagaaagctcccgagtcttcttttgtatacatgttaattacaggtgtattaccttgatttgatttttggaatacaagcatgatgacttgaatctttagtggcgttctttgccatggtcgagctccataagcagatagagaattccctctcagagtttgaaaaaacaaaataaaagaggcaatctctaggatcaaaaaatcatactagaagtcctcgacaacagagtctgagaggatgcaatcccaagagacgcagcctagcaagacgtcgtagtctgaaattagcaaaatctcctactcgaaaagaaagttcccccaaacgcaagagaggtcctcgatttgtcaactatactgagttagcagttccccgtgaccatatttatgcaatcgaagaacacaaatgagtttttaaaaaatcaccacccatcaggggcaaccgcgacaagagagacacgcgaaaattctataagtatcacaaagatattggccacacaactcttgaatgttgggtcttacatgatgaaattaaagagttgattcgtcaaggaatatttgtcaaatataagaagaagaatgaagtacggacagatgatcgaaatccccaagcaaataatggtggaaaccgtgacgaagaagtgagtggctccatggctccttgcaatattctcactatcatcggaggcgcgcacattggcggagaattgaagaagtcgcgtgaaagatatgcaaaagaagcaaaagagaagttgttgaccaatgtcaacaacctcaccgacagaccagtcaaattgttcaaaaaaagaatgcaatgacataatcttgatgaaaaacgatgccagatgggtgcaccacccacatgtcgatgcattagtgatagacgcgaatataggaggtgacaatgtacaccacattttagttgataatgtagctcgattaactttttcaatttataggcttttaagcaaatggggttgcacaagaaaaatctcaaacccatcacatcgagcatttatggctttgcaggagataccatccaaatcaagggtatggtaaagttacccattacccttgaaactacaccagtaatagcgagatctatggcgcatttcacagttattggtcaatattcggcatacaacgcagtgataggaaggccaatttcaaaggagatgaaattttttactccaattgatcatcttacaatgaaatttcttacacccactagtgcaggatttgtgcgatgagtccagtctaactcacgagaatgttacaacctagcgatcaagatcgcaaaaaagaaaacatgcaatgtgatttatatgctggaagctcccctgaatcgaggaagttccacatgtcaaaagactcaatcttgatccaccgcccctcgactattccaacattgcacaaccagttgaagaaaccattcgatacctactgactcttctgacattttaaaagttttaaaaattagttctaaactaaacatacaacagcgagataggctcgttaccttcctcaaacaaattttggatgttttcacatggaaacattcagatatggtagaattatctgcgatgtcatgtgtcatcgattgacattgacccagatgtgcaaggatacgacaaaaacactgtaaaatggaccctgctaggtactaagcacttaaagaagatgttgaccttctactcgcgagtggcttcataaaggagtcattctaccaaaactggttagcgaatctcgtccttgttcccaagcctaatgacacatggtgcacatgtgttgatttcacaaatttaaaaaaagcttgtctgaaagataacttttcttcaccaagcattgaccgacttgttgatgcaactacatgtcatgaacttctcaattttatggacgtgtactcaggtacgacaaaatcccaatgtacgagccagaccaagagcatacctccttcattgtagatcgaggtctgtattgctacaaagtaataccatttagctttattaatgcatgtgcaacctatcagcaacatattgacatgatgttcgctaatttattaggaaaaaccatgaaagtttacgtcgatgacatgcttgtcaaatccaaacaagaaattgatcatgtcgcacatctaaactcgatgtttagaatcttgcatcattacaagatgtgactcaacccagtgaaatgcattttcggcatgggatctaagaaatttttaggcttcatggtgaaccaacgtggaattgaaataaaccctgcaaaaatcaaagtcttagtagagatgggatctccaactaagcttaaagaagttcaaagtctcactggtaatgccgcaacttttaaatcattttgtttcacgatcttctgataagtgtagataattttttttagattttaaaaggaaacaagaagttttaatagattgacaaatgggaagaggctttttaggctttaaaaacgcatttggggcagcctcaattctctccaactcattgcctggagatgtgttatatatctacctcgcagtatcagactatggtctatagactatgtgctatctatgctatcatagaattaataaatatgattatttggttgatgagattcaataaataatctaatttattagagcttggtattataggtctatagtctctagatcgcctctatataacactgtcaagggtatggatgacacgagacaatgatgtttaaaaaaaatctattttgaattagcaaaatagtaattatttattttgtaataaataattttaattttaaacttattatttaaataaattggggagacaaatatgttgtcaacaaaaacacagtcttgtagtaattattacaaggtggtgtctagcattgtgttcctgcatattattgcgcctaccacaactggtgtcctctaaatttattaattaattaaaaagataaaaatttatttaaatttaaatttgaaaaatgattataaatatttaatatgactaagatattcccttctcggtcattaaatatttagtttaaacttaatatttaaatttaaagttaatatctatagcaaaattaattacagatatttattcaattatttaaatgttattatttaatatttaatttaataaatatcttatttaactaaacttttattattattaagaaacttaaaaaagtcactttatcattttcttcctaaaataattcatgtgttatgtgttagacaaaaacaagaacatcatcattattatgtattctattagcccacactaacatatgaaaaaatgacaaagacacttgataagtttcaagcgataaatatatttctattcatcttatgattcagggtttattatcaatgtaagttttatcatcaccatgtagactaatgaaatttttcatgtgtacacaagtgtacttatcagcaattaatgttggcacttaacaaacaaatttaacaaagtagtaaatagcataatataagtaagatttgaaaagtttcactacaaaaaaatcaatttgtaaggtgaagtgttataaatcatatagttcatgtcattgcaaaacttcaactgtaattgaagaagctttcttccattaaaaaaaataaaaaataaaaattgaaggggctttcaatttcatagtgtcataagatatcaattcctctctcttttgtgcacatacagagataaatcaaacaatgaattatttatatttttccaaagtcaaattctacaaataccgttggactaagttccctatcaaagtcagttgactcctttcttttctcatcttcctccctccctatcagtttttgccgaaactttaaataatattctataaattacagcataacaaagacaataaaaacaaacatttagaaaagaatgaaaaagagcatatacctgttttatgaacacaataatgacacaaatatacagctaactgtaaacaattatctaggcttcaccaataggcttaaaattttcaagttgagatttcaaaaaagaatgctcatgacgcattctctcgagccgagcctcgaccatgtacatctcgtctttgaggtgatgcattcgcttttccaaccaaattaaagcttcagatgataatctcccaccacccaatttgctgtccatgcccatattgtactctgctggggcgtgtacatggatgtgttggggtctagctaaaagcgcaagtatgctcaactgaaaaaggtaaataaaaaaaaacaattagcttactcccaaaagaaattaaaagtaaaatactggtttcggtaaatacagatctcacattttccagaacaaacacatatcactagcatactactgctcatattgtttagaaacagccatacctgcattagaagaatcacgaaaaaaatgatagccacggctagggaaaggttgctttgagttttcatggatgaatacattctcgtcataaattctgttaaccacgatacaaaagaggaaacaccgcccaatttcgcttgacatagactgtttacatggcggttaacagcaacaaaatctgagacattctgtactctcaattgttcactggattcatttatcatctctgatgattccaaatgttttgcttctctttcagagggtacttcactagttggaacaacagtagccacagcattttcttctgcacaatgaaggacataataaacattaacataaattaaaaatataattgtatcaaaaggctttacaaaaacatcataattttgctcttaagcaaatcagaaggtgcacactgagaactctccaactatgcaagtgtataacagtcaaaacctttttgttttgcaaggttcttcttctttaacagctcatgcgcctgaaagaaacaacaattttacatccttaatcaagtggagcaaagtcaaactataaactgaa

SEQ ID NO: 26180 - DNA, 1042 bp, Cannabis sativa
ggatgtgccttacaaggaagtcatggttgattgagaaccggtatagaaaaaccggctccaacatgccatctcgcacccatcttaaccacagatgatgagtgtgatatgcttaaattacacactatttatatacaatgatgtataataaatctaaattacacaattaaaagtgatataatatctatgaataaaaatctatagtaaaaattaaatatatatcattgtgtgaagaaaaagaatgtgtataatgtattctatttcgtttgctttaatttatctaatattatttagtaggctaagtgagacatgtcatgtctaaaaataaatcatacaacataaaataatctaaggatttaaataatagcttcacacttgtatgaattgtattattaaattatgagatttagctagtctaaggggttgaggaatgaaggaaaaccaatctcgaaatcaaaatgaccctttgcatgggagctttggggagagggaagtgatgctggaggtgtgatgggcacaagggcatagacttttctaaggaatgcactctcttttggattaaaattctattatgggcacatatgtataatgtatatggaaggtcggctctgagggtaggcgggctaggcgtgcgcctcgggccctcaaacgctcaaggctctgaaattgtgaaaaaaaatatatattaatatataggtaaaatattaaataagaagaaaatataatagaaattatttggtgtagtggtgaaaagtcttactttaaactaagagatcatgggatcaattcccaacctctattttttaatttttttttaaacatatttaatgtgtagttatgagggattgaactttgaagctctaaagagtttttaaaagctttattatcattacactaagtactactaataaaactataataatttttatataatagttattaaactatatatagggccccaaaatttgattttggcttaggccccatataccttaagaccggctttgtgtatatgctattataaagtgtgatacaaaattaagtg

SEQ ID NO: 26181 - DNA, 2530 bp, Cannabis sativa
taacagtttcctggttttgggggtttacccgcagaaatttgagttgtgggggtttaatgaaactaaaacgaaaatattgagagttttactgccatttattttttttttatatatataaaaaataaaaaataaataaataaaagaaataaataagatatataagattatgatagaaggctaaatccagttaaatatatatatataaatataaatgagtaaatgagagtcgagttattaagagagttgaccagtacttaattgacaactttataagatagatattagggtataaataagtggatttattatcaaacagagagaaaattggcagaattaaaacagagagaaaatgaaaaagagagagttatcaatatttaaccagtcaatataaggataaagttatcaatttctgattttattaagagcaaaattgtcttagaactattaccttattaagacacttttataatagtaagatatatattttaaatttaattaaagcatattatatatatatatatatacataattttgagttacataattggaattcgttcaaaagcattcccaataatgtggctatgaccatttaagctagccaatgtaatttgagataattttgtcattctgattcattatatgttaactttttggaatactttaatcaatggtataagtaataaaaaagaaaattaaaacattgcatttaattttttttttctctaataatttattataatcaaatattattaataattaattttatttattgtgttttttccttaacatttttttttctttatcaaaattagaagaaaaatatatatgtgtttagatgtcccactaaataattgatttatgctttaaattctataaatatatttttttttatgttttatttacaattttacgatataaattttttatttacagttttgtaaatttaattttttaaaaataattaagattttaatgttttaaaattactaaaatatgactttctcattagaaaaaaaataagcgtgagaaaacaacgaaaaatgaaatcaatctcacaataattgtaaacaaactataaaataataataaaaaaaaaaaataacctcatgataactataaataaactataaaataacaaaaaaaaaaaatatcgaatagtttatcatttttactaaagaatgtgtctttgtaaataaaaaaaaaaatcaaactatagaaattgaaattttttccgtattaacgtatttttgtaaattttttttttcaaatttttagtgcattaagtaaaaatttcttcaaaaccattgttttgtctttaacatctccctaaaatttaactagtagaacataatcttgagctagttcatcttcttcatcctcattctcattctgctcttgttcgacagaatttttttttttaacagatttgatttttgcttttaatttatcaatatctcactctttctgagccacaacattagaaatttctcttttcttcctaccaaaaattaaagacgtcttggcaatgaacttgcaaagtaataaataaagttaacgaatgtcattttggaaggaatgtcattcgttaactttatttccagcagcattgacacgtccaggatgctctattgccccgagcgcctgagtgagaatgtcatttcggccatggccttgaacttgtccctgactaacttattcctccaattgagcctatagtgcacatattcaacgattatatatattaactcattattactttatcaacgattaataattactatcttagcggtaatttccttatcgtaatcagtgataggttttgttttctattgtcaagatgatacaaacacggtggcgtgagggatcatgaacctcaagttccttaatctgcattattttacacaacttaaatgagtactattacagtttgatgtacattgctagaaattcgttatagtaattacttaccacatcttctcttacattttttttttgtttatctttccctaattcacattaattgactcatattccctcattgatatcatttctaatgtattgaccatcttcttcttcaaaggttacacttaatttccataacttgttcatgaattagttgcccaacaatgaagtcatcataacataaatcaagattctcctcatcctcttcattctctaagaatttcttttctagtgttgataaaacaacaaaccatttatcattcatcggattagaaatgtaaaaaacttgtactgcttcactagccatgatggatggatcattcttgcttcctctcttacttaaataaaccaaagtaaaaccaagcttgttagtttttactccaacattcttttcgacccaagaacatttaaaaagtggaattcaaatgcaaagtaattgagctcccatatttcttcaataaccccataatacgtcatggtacctaaaacatggtttttatcttttgcacttgcaaaaagcatggtttctatgacgatacttatgcaactattttgaacctctcgagca

SEQ ID NO: 26182 - DNA, 3864 bp, Cannabis sativa
aagtaaattattttgctcatttttattctactttattttgtgatcaaagggccccataattttctttcgccgtaggccccaaattgtctaggaccggccctgaagcttgggtaagcttcctacttcattttctatggtttctttcgtttaaacagcttctcttgcatcaattttgaaatgctggattctgagttgttaaagttgttggattttgtattttaatgatatattatggttgtttgagctgatttgaagttaattgatgggttaatttggtgtttagacaaggtttgagtttcagaactcaaactttggtctctaatggtgaatttttgattctgtgcatcttgaggtgttttattgccttggatatgtttattggagaatgatatgcaagtctggaaggttcggtaagctttggatttgaattggttaggttttcaaaagttttgagttacctggtgtaaaaccggttaatcgattttacaggccctgtaaaaccggttaaccagatcagaaaccagtttcctaaactttttgtgtttttgattcgggttagtttcagagccttagttggttaattccctgttggtttagggatttccatgttaagttttagtagaaaaaattttggtttaaaacctaagtccctggttgtgatttagcgtgtcacttatctatgttatgaacgatgtgatctaggggcatgtaattcgccaagcagttattctactccggttggccgacacacctgaatttggaaacaaggtaagattagtataatgaatatatgtatacatgtttagcgtatatgttagttgccgttagaataacatgtcagggtatcggtgaggtgtaaatggagttgcaccgagatactaacatatatatgttaggcaaatatatagccatcagattagcatatcagggcatcaatgaggtgtagatagagttgcaccgagatgccaacacatatatgcgaggctatcagatagtatgagttatctgctaccacatctgtacgactagagtactgagtataggctggatttgcagttagtcatacattgtcgtatgaacgttgtagactcaacaccgtgttggacacggggatagggttatcgttaggtgtatgggcgcctgattataacccaggttattattatgttattacttatgcttttcttactaaggttgttgactcacagttgctatttccgtgtgtaggtaagggcaaggctaaggctgagcagctgtgagagcgagcagatggagattgtacatgtcggggcggttgggcctggagcgtacgatctttgggacatcagggcttattttatcgctaggcgacagacttttgtatatgtaaagtgaaacttttgtaaatacttttgtaaatgggatcctggaattatatatgtatgctattttatgtttttaattaattaagcaaaaattttaattaatcacgattttcaataaaatcgttgattagcaacgagctgcacagccagttaaaaatcacttaacatgcctaaaatagttagggtgttatatttgcgaatacaggtgtgctggtcaacttgagtggaacagctgttcgacgatttacaggccccctaagtcacaatatttgtaaaattgcgagtgacacgctaaatcacttttttggggacttaaaatcaaaactaaaagtttccctatcaatggataacatgtaaataccctaaaaatcgtaaaaatgggaaaatctagggtgctctaaaatgcccccactggtagaccgattccaaactggaaaactggttctgtgggttctactagaggaggaactgatagaccaatttctacaggtccacactgaaccggttgatcggttcagtgcaggaaacccagaaaaaccttctaaataaacaaacgcaaccccaaatgaaaccaaactttccagaccacctatttataccacaacaagtataattagagcaataaaacccaacaattcactcaaaaattaaaaacaccagtgtgagctcttaagctcaaactttgcccaaacacaaccacaagcacccaaatcagcttaaatacactaaaatcatcaaacataaaattcaaaacactctaacaaacctaaccaaaccaaacagcaaccctaatctagaaattaagctaccaagctaacttgaaagtaagaaaacaaaagggaaaagagtgtaggagcttaccttgagttgattccttaaagtcctaggaaaaactttcttacacatctagcaattgaatcagcaaaaccctagcttcagctgggttccaagaggtcgagagggagagagacttcaagagagagaatgctatcctattttgtgttgaactttttaacttcacataattattaaattttaacttaataaagaaaataattactaatatttagcaataaggaaataagagaatataaattctcaaaatttcactaaggataaaagaaggtaaattacctattcgccctttttctcaccaaaaataatcttgctaataaagggaatttcggtcaaatctaaatatttctaatattttcgacattcctaatatctatctaaattactctgctatttctaaagtactaaaccataagtaacgtgactctaacaaccaaagctcgcgttccactattaccgggcataaaatatgaaaaacataaaatttcacatataacataaataacacatctagacttcaaatatatctccataaattcataaatcataattaaaaatctaattccaaattgaaccctaattatctgcttattcacatactaaaattaagggatttttacaatggccacactcttatatgtcattctccatgagatatcaattaatgtgggcaatgtcatccaacactctaatatggatcatgtttgcaaaatcataaagagattttctcatccaaatctaattatggtgttgtgtgccaaaggtagagtaaaatactttacctcagaacaaagtctacaacctcagaacaaagaagacattggcatactcatctaaggaagagccaccatctgtagaggaccgtagccaaatgactatgtcggagcgctttgaaataatagagaataagttggcttctgttactaaagacatgaagcaacaccgccaagagttgagggagtgggcaatgtactagaatgcttgtgctcaaatgaatgttatgagatttggagttgatatgtctactaatccctaaccaccacaagggatgcaacaatacaatcaatatgcaacatgagaagatgaggcggaggcagcagctgacatgagagattaccatggagatgccatggagtgattggacgctttattcaggttgtttttctttacttgtttgtgtcttttcttatttttgttgttacaataagttccattggggataatgtcatgtttaactgtgggggtgtacctcccaatttactttatgactttatgtctttattgtgtgttgtgttaaacaatgattttagttgacaacattgagtcgatgatgagacttttaattaatctagagacaatgctaggcaggtgataaattcttcatgaattgagtgcttaactgtggtgaatgattgctcaagcttagttcttaaattttttagataattaaatcatcataattgctaacattttaaaaagataagtgcatgtgtaattgttaatttttcatctcaaccactctagaacttctttaaaaatcatttgaggcgaaatcgaaaaattacatatgattttgagatttgatataggcagtttctttggatcgtttgagctttttaagcctaccctatttgtaaattcccta

SEQ ID NO: 26183 - DNA, 998 bp, Cannabis sativa
gtgtgctaagtactgatgctttttagcgattcttataaataaataataagtaatggtagatatacactcaaattgtacacaagtattacacacaatgatgtataataatagtttacagaactaaaaacagagttctcaatattacagtctactacatatgtaaaaaaatttaaacttattttgacataataaattattaaaaaaatttaaaattttacaaaaataatgttatatctataatgaatattaccatatgaaaaaagaaattaatatttagttttaaaagttgacaataaattataatagaaagttagaagttagatttattcaccctagctacttcacaatcaccatttatacatccatcatcaaattccatttaaatttctcttacttatttggtttggggcacctaacctaactatattactattcttcaaaatggaacaacatcacatcacatgtattcaatgaaaaaaaatatatataggaagcttacataggtggagaattacttttctagctataaatgtctaaatagttagtttatgtataaaaaagaatatatacatataaatgcaactaactaatattgaaattttttaaaaattgataaaaggtctgttataatttaatatacactcttatatataaaaaaaaattataatttaaagagtattgttattggataccaatggtgcttaatatattttatataaatggcgcctcatgattagttaataatattctttaaaaactattttttaaagttaaataggatctaatacttaattacatcaatagtagtatgatatcgaagatggtattaagtaccaacgagagcattactattgagcacctgtggtgcccattaccttctataagtagcgtctcatgattagttaacgatattctttaagctatataaaacccgatatttaattacaccaacaataatatgatagcaagaaaagtgttaaatactaataatatttttt

SEQ ID NO: 26184 - DNA, 930 bp, Cannabis sativa
tgtactgccaaaaaataaaagtgcttttacataaataccaaatatgtacatgcatggttcataaatatataattcgtccactctttttgttaaattcattgaaatattaacttgtcaaccattttactcaaaacaagttttttttttcttcatacatatatataattgataaagaagaacaaaatcttctaccaatcttttttgtttaattatttctttttacgtactatatatgatatatatataatagctgtcatcaccgctcatcataagcatatgatgattttggcatgcatcgaatattatttgagtttattataaaacaaaatttatacactaatatattaatgggtcattttcttcataaatttaatatatggagtggagagacaagcaaaaagcgattccaattttttaattttaattttaatttttttttaaaaaaaacataaacaattataattgctttattgaaaaaaagagagaaggaaatattaataatttgttttttgaagttgaaattaaatttgaaacatatatagatatatatacatgcatagaaatcaaaacttgggactttatcttatgattttctcctcagtacgccattttaaagcaaggatttttgttcttttccaactcttttgattctatactgattacagggtcccaaaccccaataattcacttcacatgcatactacataaatacatatactttattatatatacttgttgttaattatttttatttgaaattataaaacatattcatatatatattatttgatgaggacgactatatataaatatatatatttcttttttgtgttggcacatggacaaaggaaagtgataccttttagcctatgaaagctgaaaggaatggggatgatcatgtacttgaatgggcctatcttttgataaata

SEQ ID NO: 26185 - DNA, 1810 bp, Cannabis sativa
aaatgaaaaaacccctttattatattttattaatttctaaaaatctcagtaaacctaattaaataaagatatttgtgattttacaaaagttatagtttgatggaaacttttatttattgtttttattgacaattagctgggggcattcgaacatgtgatcttttgtgaagagaggtgtaaaattattatattatgtctataatcacaagtattctatttatttattattatttcatttatattaatgacccttatcacaattatttctaagtctctcaaataaagttgttcgaatttcatgtaccaagaatgtgcaattatcattacaagaacaagatcgaacaattgtcaatatataatttttcaggtagtttcggattaaagactaaaattaataatcattgacatagtcattttattggagtttatgcagaaagcatcctttattatagtaatagaatatgtctattatttaattatttattttagaagggagttttatattcgaagactatccatgattgacttcacacaaaggttgttactctgttgaagttgcatataatccttatatttcatcccaacaaatgctggtgattggctttcaaccagctttgatgctgggctcacaactgcctcaagtgctggtccatttgctatgcctactgaaattcttgtctcattgttattcactatggctcgatgaacaacactcttgtacttcccattactcaatatctaaatcacaagacaaacacatttaaaattaaaaaacataccaaaacaaaaagttctcaaaactatagctaatagagtgaatagttatttggatgtgtacatatttaatcaaaatacatattttgtactatatatttgtacaaaaatacttgaaaggaacgagtagtgtctggtactatctaaatgtgtcatattactattagtgtaattatatattgggtcccacataatttataataactgatatgaaatatagcttaccatttacaaggcatcaccacacctagtgttaagtatcacaatacttattaacaatactcaattatcttaaaatttgaaattgtgcctattccgtatcatatgaactcaaatttaatttaataaaatttattcactataagtgcattaagttatatatataattaagtaatcaatgattaaatttataagactaaagaccgttttgttttgatgaaacttaagtctagaataacaaatatttataattttaaatataataagatatataaatgatgagtattcataaaaacatataaaaataaggagtactttgtatttggacaaaacacaagatatcaaataaatatttagggaatgtaatgtatacctcaaggtggtctcctgtgttgaccaagaaggaattgggaatgggattgacattgagccaattacccttatgttgaatttgaagtccaccaattccattttgaataagaagggtcaagaggccatggtctgaatgaggtggcattcccattgtaagttcaggctgaggacatggtgggtataggtttgctacaaatacttgtaaacctgaatccaaattcagtgttttgtatatgtaactctcttccaactctaaactctttgatatcccttcaagtatcatcacagccacttcccttgttttcttcaggtactctaatgcaatctcacttcatgaccaacacacaaataattatgttataaaatcaaattccttatgtgaaatttgggacttcaaattataaaagggaaatttgataaaatatacttaaaaatttagactatt

SEQ ID NO: 26186 - DNA, 2713 bp, Cannabis sativa
  modified_base (1933)..(1947): a, c, t, g, unknown or other
atcgctagccaatcgcaacgcgacatgttgagaaggtgctagacagtaatactggtacctaatagcaatgttcatattttaaatggtaaaatattaagatcctatagataaatatcattctaaaaatttatatagatattatacaataagattgatatcataaaatatttttattagagatgcttttagtaaacatgcaataaatatatacttattgtattttattagctctaatggtctaatttaatgtgacaattattaatatattaattataaaattattgtcaaaattatgctttaatgactacgacacaaaacaaaaaagggtacgacaacatatacgaagcaaaacggcaccgttttaatatttgaataaatggacagattgaagccaccacgtggttgagtggaagttaccattagctccacttgtacaattttcttatacataacaacagttggcactcgccaatggcattttcgtaattaaacacaaatacaaggctatttatatcacccctacttcacctcgttaccatcgatcaaaaatagactaaatacgccaaaaaaaataaataaattaattatttaaaattttattattaaaaagaaaaaatataaataaaataaagttggaacctttctctgtcacacactctcttctgagtctctctctctctctagagaaactagaaaaccagtattttgattttctagagagagaaagtttcgatctttttcaattttttttttattattttgggaagacacagaggaatgatgttgaaggtttcgtgcaatgcggcggaacaaattcactccttagcccaatgccgattctttgggccgccaaagtcaaagcccaggcccatttttactcgccggagagttggggtctcgttctgtaatccgacgacgaaaagttccgttcttgctgtggtttctgaccggagtagcggtggtgttgttgcttctgaaggtgttgatactggattggggagtttggctgaccggttgagacttggaagcttaactgaagatgggttatcgtataaggagaagtttattgtgcgttgttatgaagttgggattaacaagactgctacagttgagaccattgctaatctcttacaggttctccattgatctgaaattttagtttttttttttttttttttaattagatttgttttctttggctttttcttaaacaattgtgtttgagtttgttgttgttgttgttgttgttgttgttaatctatgttattttgtttttgaataattaattaaagagtcgcatagtttaatttaagtaagtttaagttaaatttttgttgtgttaagatttttgctttaccaagttcatgtggatgtgattagtaaagttatcatttttttcttatctaggggaattaggagggagtctagtagggaatggaagatttgaaaatctgggttttcattattcttagtgaccttgtatttatgagtcatagctacttagcctgtcctgtatttatttataaattatctcaagtcactctctctctctctctctctctctctctctctctctaccttgtattcatagggactagacgctattgcaaattatgagatttttatttaggctgcattgtattcataagctaagtctttcactctcttatttcctgtactaatgaattcaatggtaattaggtactgttgtcaaagttggattcttgggtattgttaggagggagtctaattacactctctctatgttttactcattttctcccataattcataggaactaggaactcttagaactattggtttctcactattcattctctcacctaactcaatagggattagggacagttagaaaagttgagtttattgctcctcgtattcataagcaatcattctctctctctctctctcnnnnnnnnnnnnnnnctctctctctctctctcttgagagtcctcactcacaagttactgcacgaagtttgtataggatcaaacaaatacaaacaaaaaatgcaaaattaatacagaaaatttcctactaagatctaagaaagaaagcccctcaaaattttttgctctttaaaaccaaggagcaatccagaatttaatcttttcccacaaatattttgctgtggaattctcatttatccatgttgtattcgttttgtctcatatatcatcaacagagacaggtgattaattccaagtaccttctggtcataaatgtcctctctctagtctcatactgtcagtgtgtattcatttttctctgtttgtctcaatggggggactaggaagtattgctaaatttgggtgtcagggttacatgtcttttcattgtctctcttactctcatttaatagatagctaccttctactgttaagttccctcaatctcttccctcatttagtagatagtccttttactgttaaggactgatagtgttgccacatgtaagtttcatagctaccttgaactcactcatacacctctctttctctaagcttcttttcctattttcattcctcttgtcctgtaactgtgtcatgctttgattactgcagatttgtgattagaagattatattttacattattgatcacactagtagactttgtatgtcattatgggaaatttgtaaggttgtcagctttgcaaagagccagttactttattgacagtagataaattg

SEQ ID NO: 26187 - DNA, 1667 bp, Cannabis sativa
atctctattgcccaaagaaccaacctccttgaaacaggctctagctgatcctaagtggcacagtgctatgaacaatgaatttgttgccttagttcgaaatgggacttggactcttgtcccttacaaaccagggatgcacattgtgggaaataaatgggttcacagggttaagctaaatgctgatggcaccctggccaagtgcaagtccagattagtagccaaagattatcatcaaacgcctagaatagactattcagaaacgtttagtttggttgtcaaaccagccaccatccgtatactactcaccattgttgtttcataccagtggactgtcgcccaacttgatgtgtcaaatgcctttctaaatggcacattgacagaaacagtattcatggcccaacctcctggattcgaagataagttgaacccaacccacgtctgcaaactgaacaaagccatatacggcttaaagtaggccccgcggacctggaatgaaaaattaaagaccacccttctcagcaaaggatttacggcttctcgagcagactcctcaatgtttatctatggatcaggtgctcatctcattatattactagtatacgttgatgatatcctcatcacaggacctaatgtctctcgaaacaagtgcattatccaggaactaaacaacgaattatctcttaaggatctggggccccttcattactttttaggcattgaagttcttcgaaactccacaggcatgtacctatcccagtcaaaatatatcaccgatctcttgactaagctcaatatggaaggggcaaagcctgcatcgaacccaaccagctctgctcatgttctcaccttaaacaatggggagccttttgatgatcatactctgtttcgcagtacagttggtgcgttacaatgtttaaccttaactaggcctgacatcacattcatcgtgaataaactaagtcagtttattcatgctcccacaaatgtccactgggaagcatgcaaacgattatttcgatatcttaaaggcactgtacatgagggactccatttcaggccatctcttcatctttctctccatgcctattcggatgctgattgggcgagttcaccagatgatcgaaggtccactggtggctatgcagtgttcctaggaggcaatttaatctcatggtcagcaaaaaaaaaacaaaatgtagtagccagaagcatcacagagagcgagttttgagctctagccaatactgcagcagaggttaaatggctctgctatgtcttatctgagttgcactttactttaccagctgctcctataatttgggttgacaaccaaggagcagcatctctagctgcaaatcctgtatttcacgccaggtcgaagcacattgaaattgatctgcactttgtgcgagatcaaatcctggccaagcaacttgaagttcggttcgtgccttccattgatcaaacatctgatatacttacaaagccactctccaaagaaaggttcagctacttaaaaaccaagcttccagtgtgcacaacaccatttcgcttgaggagggctgtcaaccaactaactccaactgtcaattagttactttcagtttttactgtttgttttcagtgtaactaattctgttacaattcttgttggttccctctgtaaa

SEQ ID NO: 26188 - DNA, 4042 bp, Cannabis sativa
  modified_base (3976)..(4000): a, c, t, g, unknown or other
gttcaataactcgccattgatcttgatcgatctgatttttggagtaactatttaaagtcaaattagcatatagactaataaatttgagtaatttttaattaattatatatacgattgatagtgtaagatagtttgatcatgttttgttctttgttcagtgctattatacaaggttatattaaaaaatattaaaactattgcagtaataattagtgttctgttttttttttttcaataagtgtgttaatttttctagcatatataattatttgtgtgtaaattatgtatatatagttgttacatgcgcttccgagaaggaatgttctatatatatattttagcattaatgaataataatattgaaaaataaatcataatgttatacaatttttattaaaaattttcaatataaaagaagtctcctcaaaccatataagctctctatattcacttggaaagtatgctgagataattcatttgcagtcttatatggttgttcgatgtacataaattaaattaggaacactctaacaaaatttgacattaaacttgctaaatcttctaataaagaacaaagttcattaaggaaggaagaacatttagaaaacgcattaacaacggctaaacactgtgactctataaaatataaagaaagaccaataataagagccgaatccaatactataagtagagttatacattctgtttaaataactgaaaaataatctccaaaaaaaccatcaaaagtaacattaaaaaatatgaaataacattagaaattgcttgcttaaagaaaagaaaaaaaaacttatacataagtatatttatatattgtgtacatataatgaaggggagcataattttccttggtttttcaccctgataatagctactatacaattatctgagaatgattatctattattttatccaagtacaacctttggtcatacgagtaacacaaacaatacataattaccaaaataaagtcaagaatataacttataacttacattattaagactatacaaataattgttaaacaatcaatcatatcattaattttatatataaaaaaaaatattataaacttgttcgactatttttttttcttgaaaaaaagctattttggaaggagatagatcggcaatctttatgcaaataatatatacgtagtatgtaatttgtggcttcccctcaattttgttttttgttttttttttaaatgtaaactaatatttaataaagttaaatcctttgaaaaagtaaataaagtactatatttgttgattgatttaacttaattatgggtgatgaaaggtaataaatgttaattgtagatatgtactagtcattcagttgtgtgttttacttagtgtttggatttgatcacacgtgattttttcaacgatggagaaagtcgtttattaatttggcatagatcagacacactatatatacttaattaataattattcaatgcaaattttggatgaagaatgttaagaaggaagtttgatagttgaacatgtctcctattaatttatttaattccactccgcatgctgaggtgatcgtgtatcattttatgaaaatgtcaattaatattatgtaatttgacattaattattttcgtccaaactttgactgattttcatgtgcatgtatctcctacttttagttttatctcactatattatatatatatagatatcacgttattattatttgaacggagaacgtaattaattaatgttataaaataatttcaaatgaagagtaagaaaaaaaaatgaaagtgaaagataattttcttaacattatttcaattgctgataaatataaaaatatgagcccgtctttctagtatattgatctggttcacttttagtatttttttttcatgagcgcatacgttgtagctatttaagataacttgttataaatttttaaaaattttgaataatttatagtatcgaaaataaggtttaaataattatttatcacgtatatacgaaaaatagtagcgtgtgaaaaaaatatgtaaattttatttttaatattgtaaactacttagatttttttttgaaaaagtggtcctaaatagctacaacgtatgcgatcataaaaataatttagagtaagaagttctcctcttggatatcgaaacagagatagattatctactgaaaaactcctttacaggagatgcactgtagacttaccatatattatttataacaattaagataattataatagggtgattctgcaattcaccccttaaaaaaatgtgcactgatgcacctcttatctgtttcggcaatcaacaataaatttagtccaattgtttatattcgtgtatgttatacttatttaagatatcatgcaaaaatttgagaaatttagaataatttataatataaaaaaataatgtttaaacaatctatatcacacacgcataaaataaaagagtcatgactgcaacaaactgtttaaaccttattttcagcgtattaaatttttccgaattttttaaaatttataagatgtcttaaataactacaaacacgaccataagaaaaaataaactatttttttttttattttatatgtcaaaacagaaaaaggatgtctcgtagaatttccattataataaaacgtctacaattaagcaacaaaattgcttgaacaataataattatcacgatttgaaagttaagaaactatatagaaatgtatctatgagaggagattttaatagttacatcaaatatataactattatggttatatttatttgtggttattaaatcactattgaatgattgtgattaatttaaaaattaaaataaaataaataataaataacttgtaatctaatactttattttcttataaaaacttaattaaattaattatatttaaaattaaattactaataattagtaatcaattttatgccatttattactaagtaaagatcttttagaaattaattttttttgaacttaaataattgaaatatttgtaacaaaactctttataatttaaaattattacacacataactttaattaataaaaaatagtaagaataatgacctctaattacaggtaattttacactcaatcttatttttaatgtctttaagtgccaaatagtgcgtcgattccagattgattgatcaagatattagttttttttttaaaaaaatgaaaattaaataaaaatagtttaaaatataataataattacaaaattaaagactagttaactattcctgctccccgttgaaatcatctacttcaatttagagattgtaaaaaaattaccaaagtaaattatcaattaattgagattgttgcttcttttttacaaataagcataacagtataaaactaacaagcaaatcactaaaaaactaaagagaaatctaactgtagctggtggattggagtaatgagtttgtgacagagatgtaggaaattgtatcgaagtgaaaaatttacatgatgttagataaagacagactgaaatcttaagttttgaaattggagatttttttttttattagagaggaagataggtcagttattggaaaaaataattagatgccatttttaaaaaatttaattattcaaaaacatattttggaaagggtggaactctaattttgtaaaataatagaattttatcattaatatcatagttaattaatggtttaactgttaaaaaaaattatagcaaggacttaattataaaaataatttgtttacatatatttatggttaaaagggttttgttaaatatttaaattaaaaattaattattttaagaaagtaattaattaaaatctaaataagagatttttagttattgttaacctgctattacaggtaaaaagaaaatgtaacgttataataaaaatataaccattgagtatagttatctctatatctattctatataaagnnnnnnnnnnnnnnnnnnnnnnnnntttatgagaaattcatgggtgtgactttttatttatatttaa

SEQ ID NO: 26189 - DNA, 2610 bp, Cannabis sativa
taccttccttttataattgaattacccaatataccctcacctatctatcaaattcttttcagtccctactgcagccacttcagattcaaccctagcaactaaacgcatgcaatctgtagtttgccatagccaacatcgatcaacctcctctgccatcttcagcgtcccttaacctccagcacaaaaacactacaccttcgcaaccgcaaccacaaaagccaaaagtccttaactatttgaaggtatgtaactttctctttccattctgaattagtattagtttctttctccatatcttgtttctccctctttcaatcttctattatattctggtttgtaagacctatgttcatatgtataagtttatatgtatttggtttgatcattttatgagaatatagtactttttaagtgtttgttgaaataactaatagaagttataaaattgtgtaagaaatctaggctcgctcatcattgtgagatggcttcttttatttatcattgcattcacaaaagtttaattaagtactcttctatatatatatatatccactaattttgttgtcatacatactcttgtggttattgtagttactcttgtttagtgaaaatggttctattcatctttaaataaatttttctaaaatactttatctttccttttctctcaaaaatatttaatcacaccaacaaatccaatagcttgtttattagttaaaatcaaaattatttttgaaaaaaaaagactaaatttggaagcccctctccatccattatcttgttcttcttctgctgcagtcaattttagctttcagtattgacccaccaaacttttctgccaccaaagtttcatctcatgaataataaacaacacatacttactaatggtttagaaaatttcattacgaaaaaatagtcaaacttatagaattgataaatggttaaatactttagtgaacttgagcttagtacacaacttcacatttactcaccttgaatttagcaaaaaagcaacaacttcctcaagtgaggtttttctctttcttctgtaaattccaaatatcattagcatatagataattttatttcaaataaattaaacaagttggttaaatttaagagataaatcaagtctttgaggcatgagagaggttggtttcctcaactagaatctttctcgtcttaggagaattgagaacaagtaactcaacagactgcaattctccaaacacttgcagctcttagacataataaccatagctgaattagtaaaccctttggagcatttttatcaagcaattgtaaaatatctttcaatcacagagttctatgttgactatgctcatttagattgtagcctttttgaagaggatttgaaaagcactatgttcaatgaatgaaatgatcagtcatttgtgtgctctagtaattagtatttttcttattttggtttcacttttattgtatccaatgtgtttttatttatctgcttgttattaattctttaacctcagatcttttatgttgtgtttaatacattaaagtactcaatttactttttgtatgtttgacattgttcttccttcaatggaaacaaaataatattataagagttgttggcatgtttgtgtggtatttatctaatttgtttttagtcaagcttctactactattcaaagttaaactatgatgtcctaagaaaagaagaataccatcaataggagaatcttctaacttctaagcactgtcaacgtcgaacgatcaagtgtaaaaattgtggaatattgggtcatattttaaaagagctgcacaaactaatcaattctatattctcatgctgctagctgctagctaacatttatattttttttttgcttagaaatctatatttaacaatgcatggtttggaaattgtataaacacaattattttaatatttataaccagaaagtttatgttttgtattctttcatttcataagtgtaccttttgaattaatttttcttttgataaagaaaaatttaaaattataacgatttacattttaagcattcgaatttacttttgcaattaaggtgtttacttttttaaggttattagtttacttatttaaggagatgatgaatcatgataaaaataaaatgttttaattaattttgaatgtttgtgaagaataatagaagacctacaagcttataattttgtatagtaaattgttgacctctaaaaaattacttaatataatattttagagtcattagtgttatgtcgaaagtttctcaaggggagctccatgcacctgtctctctctgtgtgcccgcgcccctctgcgcactcgtgccccttcgcgctctcgcgcccctctgcgcgctttcacttgcgccctccgaacgcctacgcttccctccgtgcgtgtgcgcgccccgctctgcccgtgtttggcctcctgcaccccgttgatcttatttgcagtcctgaccccaacagtgtaagtaaggagtatttgacgagataatgacagcacaatgagcaacgataatggaggcaaagttcatttcatccatgatacaaaattacaggggtatttttagtataacttagaaagttagg

SEQ ID NO: 26190 - DNA, 1793 bp, Cannabis sativa
tttttttttttttgaatgaatatgaattgaaagaaaaaagttataaaaaattagtacaattaaaaatataaattttatcccattcataaaaaatatataaattttatataaaataaaaattatcaaaatgggggtgcttttaaaactttttggtagtaaataaaatttccgtactaattgtgtaatttttaaaatcagaagatacccattgattattatacgaaatagaaggtaccaactaccaagtgtgtattttaacaaaacgggtaccaaatgggtatttacccttttatttttactgaatatttttttttcggtgctttaaaaattgatgtctgcctataaatacacgtacacctcgaaccctaaacgtatcctctctttctccctcgcatttcaggcgccgcgcagtgtagtgctttttcgcgtcttgggttttcactgaaaccctaatttaactttcctcttacttggttagccgtaaaagtttgtttctttattcaacaattttctattttctgtcgtagtagtagatgaaatagatggggctgatcttaattcatatatgataacaactcctccttcgtttgaggttgggagtctccttgaaattttggcagtttagaattgaatcgtggaggttcaaatgatgaatttttaacttggatgaatgcttagactatgttgtctgagcattttgaatcatcatttatgaataggaagatctgatgattctcctcgatcacatatgtttttttttttcttttaatttttaaaatatttgaacttctgtggatgatgagatcaaaaatttacagttatccctgtctgacttaagtgctgataacttcataatctgacacagttcttgctctttttgatgtaatcatatattttgcatcttcaaagttttcttttgttttagtttttaattcaattatttttttcaacaacatggccagtgatgcgattcaatattgagactgaaagtgcagagtgacaaactttgtataaatgtcgatatttatgaactaggacggtctgaggctttttgttgttcatttcatctgatagtgtaattttttttttaatattttggtttcggggatttaattttattcttgaaaatttgtattgctgtgggtgatgagactattaaatttacagttatccctgtctgacttagtgctgacaatttgtagtctgacacagttcttgttcatctatctttttaaagctttttctatactaacaaatccgttaagtcaatcaaatcttctatagaatgatgatactgggaaaagccacagcgactcttaaataatagcaaaatcttcaatgtaaagagaaaactagagtcttggtatcttccatatcctcataaattgagcccaatgtgggattgggtaaacaaatggattattggtattgtttttcttagaaaaatggtggattggtaatttggtattggaactggtataatgaagttcgattgaccaaaagagtaaaggaataagtcaataaattgctaaggagactggcttctctatttataatatttttttcaaccattattcatatcattgaagatagcgaaagaactaaaacaaatgggaattgcaaaggaggattgattaaagccaagacgacaaaaccaagttaaagaaccaagccatgataatcacacaatactaaaagaaacacaaaagaaaaaaattaaccacctaaactatcacaccaatcaaaggaagtaacactctcattcttaaaatgagaaaatatttaataatttt

SEQ ID NO: 26191 - DNA, 1475 bp, Cannabis sativa
ttatttattgataattgaatagaaaagattacattggaatgtgttttatttagggaataaacccaacagtaggatgttcgggtttatgattgtgtatgatactcccgtgtcaaaaaatgcagctacttttattggtctcgagtattttgttgggatgacatgcatttttgcaatcgggatcggttgaccagcggtgaacgtatgcatgttgaagagtctgccatatttgtcatcgtcgaaattagaactcagttgtaatgcgcacatagtatttggggatatttcatcttcgactgggaagagtgactcgacgtcattatcggagagagacaccccagtggtgtcttctatgtgtgttatcattttggcaattttttccttttcagacattgttttgcaaagtgacccttttttccacaaaagaaaaaccgatttgatgattttcttggatttttcttttttcgaaggaatttccaaggagttttattttttgaggatttgtccttgaagctttttctcttttcgcccttccgctttgagcatgagcatgtgtctttgatagaagatttgattataagacctttttggctgcatgctctgtcgagttgaaattacaatgaaaatgtatttggtaatgctcaactcatttcaactatgagtctgttgttaatttataggaaaaaattacatactcactactacaaaaagtacaatttctgtcggtttgtaagtgtcttttaaagaatttgcatcagtttaaccgacgtatatgtcatagtcgcaaataaatttttattagcgtcatttaaaaaatgatgcaaaaaataattatcttcatttagaaattgacacaacatatacagtcttcttttttctcttctgcatcggtttggaaatgacgcaaaattatttgtggcatttcgaaaccgtcactaaaaatttataccgtcagttataaaatgatacataagttgctatatactttttttttcacctattgcgttggttataaaataaaacataaatataggtaagaaaaaattgtaaattttcacaatttttcctacctacattatcaaattttagaatgattttatataatagtaaatacataatacaaaaaaaaaagttaaaataatgtttacaaaacttatataaaattagtaattgattctattaactgattacataataccaaaatgatcataaaacttatattccatgtatcgtaaaaattgactataaactaattacataatgtaaaagttaatagcaacaatcataaaatttgttacccatgtattattacaaaaagtagtaatcttgtacttaatcaataattaaagattttataaatttgactcattcatcctgtactgcattgatatcctcattactgtagagagcgtctaacttaaacggtaaaacaaaacgtaaaaaatattaatcattatattaaaagtataattaaaata

SEQ ID NO: 26192 - DNA, 2066 bp, Cannabis sativa
  modified_base (2008)..(2035): a, c, t, g, unknown or other
tttctttgttgcatctggttcttgaagcagtctctcatggcgtcttcctcaactgctggtcttaggcccgaaggttcatcgtcctccgctgctacacaaacaaatcaactcccggtcatgcaaatcattaccaatcatattgtccctctcaatcttcctcttgaccgtaataatttattttattggcgatcacaggtgttatccactgttcgtgctcatcagctcgaaagattcatcaatggaaatcgtccaagacctccggccataattacagatcctaccaaatccatgccaaatcctgaattagcagactggttgcgccttgaccagtttcttttgagctggctcttcaattcgatctccgaaaacatgcttggtcatgttgcaagatgtgaatcttcagctgaactatgggaagttcttagacaacttttctcaaacacatctcgtgcacgtattctgcaattgcgaggactgcttcaatcaacaaagaaaggctccacacctatcgatgaatacatcctcaagatgaggtgtttaggtgatgctctaatggcggctggccatgctctctccgatgataaattgatcttgtatattcttggaggtttaggcagtgagtatgactcggctattgtcacactcacatccaaagaatcaattacacttcaagaagttcagtttctgcttcaaacacaggagcttcggatcgaacaaacgacatccgttgctacattggatcgcgcaaaatcccacagcaaattatgctgctacaaacaagaaaggccctcctccacctaactccaccaacaatggtcgtggacgtggatccactcgaggaagaggtggacgaaatcaacccggtcgtggaaacaatcgtccaatctgccaggtgtgtggccgatctggtcatacggccataaaatgataccatcgttttgatctgagttatcaaggagaaggacactccaatactcaagaatctcccactgaagagcctcaagcaatgttggctactgcctcctcggtcacagatccccaatggtactttgatagtggtgcttcgcatcatgttactgcccatgcctctaccttgacacacaaatctgattaaagaggcaaaggaacacttactgtaggtaatggtgcctcccttcccatattagccattgacaattgtcttcttttctcttctccaaatctacttcttaaaaatgttttgttagtccctgctattcataaaaatcttataagtatctctcaagtttgtactgacaataatattgtcattcaatttgatactgaccaatgttttgtcattgataagatgaagaagcaggtccttcttcaaggaattcttactgaaggcctttacaagctgtctctaccatctctccagcccactgtcaatctcctttctcataacaaattcagtttgccctctgttaatgctactactatgtcttctaataaatctgcttgtattgcttctagttcttgtaaaaattctgattgtatctctaatctttggcacaataggcttggccatccttcctttgtaattgtttccaaagttcttcaagaaataaatgccaaagtttcaaaatcagatttacatttctgtgatgcttgccaatttggtaaaaatcatttaatgcattttagtagttcttcattaaagaccaatcaacctttagaacttgttcattctgatgtttggggaccttccccaattgccacagctgaaggatacaagtactatatattgtttgttaatgactttaccaaatattcttggatatatcccatgaaaaacaaaaccgaagcctttcctatcttcctcactttcaaaacatttgtggaaaaacaatttaaccaaagcataaagggtttgcaaactgattggggtggggagtacggaaaattacaacctattttacaacaattaggtatcctatttagacaccctttccctcatactcatcaactgttggatattattttaccnnnnnnnnnnnnnnnnnnnnnnnnnnnnttattaacatcctaaataagaactttctaaa

SEQ ID NO: 26193 - DNA, 3621 bp, Cannabis sativa
tatattattgacaaaaatgatcaaatatgaaaagaaatttccacccagaagaaggtattaaaaaaaggaggaaaactaaattatcacctgatttgctttccgaccaagacccatgaggaagttgtctggttttatgtctctatgcaaatatccttttgaatgcacatactctatcctcgtaatctggaccataaagaaattaggtaagcaaatataaacttcagctttcccaataatatgatttgaagcagggagagggatgatgatcagattgacggtgtaaatatgagaaagcttcacaaccgaccgcagaccaatgatacgccaattgcagagaaattaaacttacaggatgttatatacattgaataaattgtgtaaagataatgcttaccatctgatcggccaacattacgactgtctttaatgaaaatttccttccacaatacacaaacaaatcctccaaactaggtcccagcaaatcaagaacaagcacattttcctccccatctacgccagaccattttatgcccggaatgccacctggattcggtacgtagaaaaagaacacaaagtattaaccatcaattataagtatatcaatacacccaacaagaaaaaaaaattaacagtctcgtaagagctcatacttcctccttgaagagtaatgtatagcttggcctcgtatattaattggggatgctttgttttgctattttcctgcaaccacaaaataaatacttttaaagttaagcaaattgctccggagtccagagtccattaacaaataaatttgccaatttgtttttaaataaataaaataataaaataaagatgaaaatgaaaatttgcggcttaaaattacagaaacgaactaatataaatatatataaatactttaataagtttttagcaaaaaataatactttaataagaatgaaattccctatacatgaacatgcatatacatagacaaaacacatcgccacatattaaacaaaacgcacataaacagtccattaaaatatcaaaaaagaaactgcgatggctaattcaaaactcacaatcttgacagcaacgatctcgaatgtgtcgatattcgtagctgcaacaaaaaaatcgaaacaataacaaaaagttaaattatcagcttcgaacacatatacatagaagttctatgatagaacgaacaggaggccggattcatcactaaccaagaaatatttcaccaaacgagccgctaccgattttccggccgagcttgaatttgccgccaacgatcctgtccatgacgactagtcgaatggatcggatcaatcagatcatcgaagtgcagagatgagatccaaacgaagtgaatcccgattttccttttagctatggagctgagaaaccgaaaatgagctctgattgtgttcgtcgcgtttgtgtggctttcgggggttagtgaggcgaggaggataaatagaggggtagtttcgtaatttagtgtaggaagagaacgcgttgactctttgactaatccgaatcgggttttaaggtccgggaaggagggaccggattattattttctaatcacagtcacagagcgtcagaagggaatgtattattacaaggattattactgcgtaatcacaactcgccacgtcgacgacataatgttggggcgttgaatttactatattgcccctgataggttatgaaatgataatagtggggcccggtttgatcagaacattaatgggcagatgggtcagagtagaaactagaaagaaaggtctggctaatagggccaccacatgatttggacgtagtctacaaggtttacgttacttaacaaggcccatctagatgatctatcatccattgttgaaaaaaattcccctagccttattatgtttagtaatgaaaatgaagtttgtaatcaaaatacttacacgacctaacacaaaaaagggtatgtgattagaattactcatgaatttataatacatatatctataaatagcgcatgaattttgttgaacctagatagcttatcatctaactgaatgacgtattttattaaactataaactactaaagtcagcaagcaacatgagacaaaactgtctctaaaaatttaaataataaagctataacgttctcaaacaacacacttaaagagctatagctttagcttgtatcattgaatactacacaccaactcattaacatattgataatgatccttaaaatatctacaaaataaaataagataaaaataaattaatcacatattaatattaatttgactgataaagattaagaaaattagttctattgcacctatgaatttgagctaagataattagttttgattacattataagttgttggtgtcctgtgcttttatatattacaattttcatattttctattatgaaacttttttatttggtaccattatgttttgtatacaggcgtacagcaatgacaattgtaagaggaaattatagggattaaaagtttttattataaatatggtacatttaagtttgatcaatttatatggtattgtttttatttttaggtctttttatagtatttgatatgtcatatatatgtaaatgtaaattagtttttcaaatctcatatttaatgtttttatttgtttaggtagttttatttgtcactgatgttgaaaaagtcgtcggagtttgctgtcggtgccgaaaaaatcactggaatagcggtcggtgccgggaaagtcgtcggggttgctgtagacgccagaaaattcatcgaaattggcattgtcgccagaaaaattactgaaaaaatactaagaaaccgatttcttgatgcagaaactggcttcttgatgaagaaactactttcttagtgattttttcggttacaatgtcaattctgatgacttttctgacactggcagctactccggtgacttttccggcacagacaacaaacttcataaaagtcattgaaattggcatagtcaccgaaaaaattaccaagaaactaaaaaaaccagtctcttgatgaagaaactagttacttgataaagaaaccagtttcttagtgattttttcggtgatttttctgacgacaatgccaattattacgacttttctggcgttggcagcaacttcgatgactttttcgacaccgacagctacttcgatgacttttacggtaccgacagcaaactccagaaaattcgtcagaattggcattgtcgccggaaaagattatcgaaaaaataccaagaaactggtttcttgctgaagaaaccagtttcttggtgatttttttgtgatttttccagcgataaagccaattccgatgactttttcagcaccggcagcaactctggtgactttcctggtgctggcagcaactccggcaactatgccaattccgatgatttgtttcagttaactttattgtttagcatttatatttcgttatgatttttcatagtgtcgaatctagtttcacatggttcataagttcgaaattggttttacagggtttaagggttctgtaaggaggttgctctattttatgatgttattgtatatttttttttttaagtttctttttattattttatttata

SEQ ID NO: 26194 - DNA, 1708 bp, Cannabis sativa
agaaaagaaaaagtgaatacccttctttcccaatatggaagaaagcaaacaaagtcatagacggattcaatggaagacactagtacagcattgactccagtgaacaccaagagtgcagtcataggtcgtgttctatgcggcatcttccttcaatactaagctgtcaaatctgtatgtacgagtgtacattaaaatgaaaaacaaaaaggtaaatattgcaacatgtaacaagaaaaccttatagcctaacacaatccacaattagtctgaacatgagttgccaggtctaatagttagaaatgagagaaaatcagtaggtgttgtattaatttaaggcaaaacttagttctcaagagtgtttcatttcgtttctacctttatgggggcggtttcctttcatatataaaaaatagcataccatgctaaccattaaaactacaatatgatcactagcattgcagaacctcaaataacttgaaaacgtaatataatagttcttaaaacattggagacaatacattttcagcaacccaatataaacaagtctacaagaagaaagtcaatactaaaatgttctaatacacatgtcatcaaggctttttaagtttgatacatgtaattcagactcgtggggaaaaaaagttacataatcagcacttcaagcaaacaactatcaaaatatatagaggaaatacttctagttaatatctattgaactataagcgacatttgcatcaatgtaaatattcatttcagtttgaaatctactaggaatgacaaagatcactgcaatagcctcatcacagatttatttcaaaatttctatcgcactcaatgagagatctccatctagatcactctaagtctctaatttcctaacagcatcaaatcaaatacataattataacagcataatactatattgtttcaatttaatttgaaacctgtcataagtcataagtacacatatgattaaattgtacttacacattccaaaagcggagaaaaaatagacatcaagaggttgacaaaagaaagctaaatcaaactcaatatttaaaagaacattatcagttggttaaagttcacaacacacacactcctatttctcaacgctaatcaccttccacgttaagaactttcaattaaaaagaaaaaacttggatgcaaccttaatatactatgatagtcaatgtgaagtgtaaaatagcaaatgaccacaatcatgtgtgtgtgtgtgctgagtgttttagaactactattgatgattataaagagatacatcaaactccttcagcttgcatagtcaaaaccataaggctaatcataattataacaaaaataatctcttagtataaccttagtacaatatacaatgttcaactgaaatgagacactaagataagttcaaatagatgaaacccaaaaactatggaatgctttactcagaagcactacccagaaaaaacgacaagagaaaattagaataaataacaaactcaagcaaacagttgataactcaccaggaataaaatggaggcacctcctggattgacagatgaagagtttgatagtggtggaagcagaagagaccactctggaatttagggtttttataaatatgagagaaaacacaatcccaaataagtaaacaaacactcaagcttctcacggtttcaaacccagaacaaactcactcaacctataa

SEQ ID NO: 26195 - DNA, 3943 bp, Cannabis sativa
tttgtcactgtagaataggtgtcggttttatgaaccgacactaaaagtataagtatcagtttaaaaccgacaccaaaagtgtgttttgtagtagtgattgttaatgcaatttgagtgttatcaaattgaaattgtttagcttgatgatcctaatagagtgaaattgtatttttgatacaattgtattgtcaacctttttcttgactcgctactccactaagctgtcagcttgggcttaagtttccatcaacgcagccaaggcctcttccttcttctagtcagaagtagctcactccatcctaagagtctgtaactctacagacatcttggccatgactggagagcacctctctgccaataagttcccctagaagattggaaggtgattaaatataggcacaagtgttaaaaaaatcattgttaagtaaaataaaaaataattaccctagctttattgtgtcgaagacagtcattatgaaaggttatatcttcattagccgccttagcccaaccaagtctgcaataggtgtttttggtttgatcgagaacatttgctacaaacggagccaaatcactgcaaaccttggtttgaagtctccctacgattacttgacgatcaaatatcagaggggatgactcgtgtctaactttcaaatcaaccaactcagcattccacctagtggcaatcaactaactccgatactggtaagtcgagtgggcaaacaggaaaatttagagaagaaacatggagtggaggaagattcatccttttaggttggttttggacattttttctagaagttggttgcatattttaggacttatggtctgaggcttccttccgacacgggagcccttcctaggttccaacaccttgcctttcttatcaactccttgaggctctacctcgttctgtacaaaaacttctttactctacttctggcgggcagccaactactggagatcctccatagccccctacttgctctctctgctaaggtcagaccctacctttttagttttgaaagataagtctttcagtgccatcttcttcatcaacgttaattggcacctgctataacgacaccactgaaaagggtagttgttataactgctccttgagaatgggtttccactatgactaaggtggctaatatctcggaatagattcttgaatagaatcttccacaacaactattaaagcctaagatctcaaaataggttttgaagtaggaacatgagtaacaatttcttacccttttgtcggaggtattggttccttatttccagcatgggaagatgattcagactttcccttccccttggaagccattgtagcttccctagcctctgtagtcctattggagatgctctctaagaagttgttgaggagacccatctggatagtttgaggattcactataaaaaaacatgaaagagttagtcatgcaaaagcaaccaataaaaaatatacagcaaaatgaaaagttcatgttttgttctaaccattaacactattacgtttggaatcccataaaaaaacgaggagatatcctccctacctaagaagctaccatactagaagagcccatgatactttattaaaaggaatggatctcctctaacactttgcgtaggcagaaggaaatgatttaggctcatgactatctcatctatcctatcgaggtatcaaatcacgagatactatgaagatctaactccaagaagtataggttaaagccccctaatcaatttgatccagtctaccagacttggagcatagaataaatcaaagggagaattacctcttccagacgtactcactcccagagtgcctccatccaaaacaaccaccttaaaatggaccgtgagctccacttcttcgctcatgggctccatatgaggttaggctcagtcttctagccatctctggtcataaaaatagaaaacctcttctggattagggacctctgtcttcttggctttgcagagcacaaaccaacccacaagtattctataaacttagggaataaattggaagggggcgatacctactactatataaaaatttggaaaatagcccctgagcaaaagatgcgctcctatctcaatatgggcccaactctagatgccatggccatctgcacatttatagggcaactccaaggttggaaagcatgttctagaacaaacgtaaaacactctagaggctacgttttgtcgtatacttcttgagattgtcccaaggagaggaattgcacaccactttgagagtttcaactacttcctccaaaacttcatcttccttgtgctggtgaacctccgccgtggtagaaactggaaaagaataagaaagagaataaccaagcagttaggtacccacactaaaatagatagtagagacacgggagattcctcccctataacttcttggagtgttccccactggaccctacatttgaaagtaaaactctcaaagagtatcgattctggacgatcagattagaaacagataaggccaatcaaaaagaagtatcaaccagaaccataagggttagaggaagaaaatttaaatatccatattgctaaaatgtggatatttcaaatcaaatattaaaacaaaaagggaaaatttttggaaaacctagtcaagactgcaaacgatatgtcctaaatgtcctatttctacaaaacatttagaatcactccaaggcctaaaatcctattcatcaacaattcaaggtgaacatgcaaggattgaaagagaatgccaaacccagatagtaatcaagattctaggaagttaaaaaaggaaacatacttatcgaagaaagatgagcaagatgtcaaaccctagattgaagcaattgagttttactgatgaagtcttcaacctctgcttaaatatttagcgttcttgatcgcattgcagaactggtagttaaaactgggggtggtgctcctggattctctcccccacaaatttgaagaagaagatgaatacaatgatcgttgtagtacttaagggttctctcgctcatcatcaccttctctctgcaagttcaaactcagtttgaaattggggtaaaagttgtggacggacatggttgtaccatatttatacacacaaatgggaatccacgtattcccaaatcaacgaccaggattacgtttaagaaaaagcaagaaatatccaacggtctagaaaaattcacagttgggcatttaatacaatgttttgagtcgagaaaatttgaaagatgatatttctggagactcgctctgatgtaatcaactaccattttttcatgcttcaccacatgcgcctcatcagtgagagttacctccacagaccgatgatacaatgccacgtgttgctctatttcaaaaaaaaaaaatggaaatttttaaaccagaaacaaaatcaatacagaattcttaaaggtttcacctttagcctcaacctgtttgtcctcgaggaagagtgcaagcttctgcaacccctagagttccagaagcttggggttaaattttattcgtatttcgagatggagacacatggaattccaataaagaatactgtttaattattctaggcccactagtaggcccaaataagatattaaactgggtccataagcaatgtcagtccttccagatgatgagcagaagactcgtctaggcaagatatccatctagatgacattagataaagcatctaggagaagtaatcagtgagtatttggatgtctagtaacgtttctcatttattaattaccaaatcccacaatattatgaattaactctcaaggatctcgtctaaagatcatatcttcctaaatatctcatctaggcaagatacccatccaacatgcgtgcattcaaaagacattacataaagcatctgggagaagtaattagtaagcatccaaacatccagtac

SEQ ID NO: 26196 - DNA, 2894 bp, Cannabis sativa
caatgattgtatacttacagtttatttcaatttcaggttattgatttccatcaaacagttgaggtaaatggtattagattttggtgctacacagctggtcatgtcctcggggctgctatgtttatggttgacattgctggtgtcagagttctctacactggagattattcacgtgaagaagatcgacatcttcgtgctgcagagaccccacagttctctcctgatgtatgcataattgagtccacttatggagtccagcatcatcagccccggagtatccgggagaagaggttcactgacgttatacactcaaccgtttctcagggtggtcgtgttctgattcctgtgtttgcccttggtcgtgcccaagagctcctcctcattctcgatgagtattggtctaatcatcccgagctacagagcataccgatatactatgcttctccacttgcaaagcgttgtttgtctgtttacgagacatacactctttcaatgaacgataggatccgaaatgcaaagtcgaatcctttcatcttcaagcacatatctccattaaagagcattgagaattttaaggatgtgggtccatcagtggtgatggcaagccctggtgggcttcaaagtgggttatcgaggcaactctttgatatgtggtgctctgataagaaaaactcttgtgttcttccaggttatgtcgttgaagggactctagcgaaaacaattattaatgagccgaaagaagtcactctcatgaatggcctaagtgctcccctcaacatgcaggtccactacatctcattctctgctcatgcagactctgcccaaacaagtgcattcttggaagaattgaggcctcctaacataatcctcgttcacggagaagctaacgaaatggggaggctcaaacaaaagctcgtgactcaatttatggaccgtaacactaaaatcctcaccccaaagaattgtcaatctgttgaaatgtatttcaactctcagaaaatggctaaagctatcggtaagctagctgagaagaccccagaagctggtgaagttgtcagtggtttacttgtaaagaaaggcttcagttatcagataatggctccggatgatcttcacgtgttctcgcagctagcaaccgcgaatgttactcaaaggataactattccgtattcgaacgttttcagcataataaagcacaggctaaagcagatatatgaaggtgtagagtcttcaacagatgaagaatctggcgtgccaacgcttcgggtacatgaccgagttacagtgaagcaggaatctgagaatcatatttcgctacattgggcttcagatcccattagcgacatggtatcagactccattgtcgccctagttttgagtatcaaccgagaagtccccaaagtcgtcgttgagtcagaggataccaaaatcgaggaagacaatgagaagaaggcggaaaaggtaatttatgcacttctggtgtcactctttggagatgttaagcttggagagaatgggaaattagttattactgttgacggaaatgtggcgcagctcgataaactgagcggggacgttgaaagtgaaaacgagggtcttaaggaaagagtaaggacagcattccgccgaattcaaaacgcggtcaagccaatccctctcactgcttcttagccacctcaatgctgtagtttgtatgtaactgtaatccctcaatagaaagaaagaaagaggtcagttttagggactcttcacttctcataatactttttaaccataagagtttttcttttacttgtatccaatttttttggttttttatgggtaaagttaattgaatatgtgtatgcctacattagtacaaaacttcaaatattattgccactgttctagtgttctctttacaacttcttgactactttatatgttattttgaatgttaattatcattttcaattataccaaatcattacttcaattctttacagttttttattttttctgatctgtttgtgatgttcatgtgaatgttattcattattttcgatgattttgaatggaatgatgactttcgtatatcgatatatgtatatatatatgtgtgtgtgtgtacttttagagatcatgtatagagaagttgttagagcatgaagtatagttatcctatcttgcctttcttgacatggttattggttcatatatataatttgatttctttttagattagatcgataggacttggcatgatgaataacaacattgttttgggtgaatagcccttccccctcttggtgttgagctgaattctctaactactttcttatcttttggtccaccaactttgggtgaattggaattgagtctttctcatgagatttgctaacattactcccatcctcaaaaaccaccttctcctcaaggtgagatatcaaatcttcctaagtagcatcctcaagtgagctcaagaaccactgtatcaatacttgctgaattggtttggcattgatcaatttggtttgggtagccaagatagctagaggaaccttcgatggcttattggctatattcatttcgggtaacaggtagtaggagtgttcattcgatccaattcatactatttttttcatagtgcatccgatctgcactaagtacatattttatattttgaatccaatccaatccgcataataactaaaattcaatctaatctaatttgcaaaagtataaatttgattaggtacataaaattacaccctacccccacccgattacccattaaggcgggtaatcccaccccatttagagtgggtatctgtgggtgcccattcccgcgggtcgaatttccatcactacctataaatgatgactagtatggttaacatacagataaggacccg

SEQ ID NO: 26197 - DNA, 3297 bp, Cannabis sativa
  modified_base (1896)..(1907): a, c, t, g, unknown or other
  modified_base (2081)..(2085): a, c, t, g, unknown or other
aaatacagtaaaaaagtaaaaataccacctgacagtatttttataaaaacatgacaaaagttagtataccatgtaaatttctcagctattatgcacatggaccatacatatcgttatcctactagtactatatactatctcaattacaataatattttgtcacatcattaaaaaataccttaattctaaaataatatgcatgagtaaaactaatcctgattttttttttaattttcctgcattttaaaagtaacattttggttacttatgatgttaataataaactaataagtaacattttcataaacaaatattacttttatattatataatttgagatacattttaattacttctaaaatttatatgtatgcactttaataatcaattaattatttaggttatattaatacatttgagtaactttcaagtttatttttaaaaataatgaattgtcatccagtaagttaatattttagcaaattgtattttaaaaaaatctatcataaatgtttaaatcaccaatattttaattagtatatgcattttgattagttaaataaagaattaaagttacaaataaattttaaatcattacaaatacgatatttttttgagaccaattagttatgatttcgataagataccaattggttacttttgataaaattatcaatcttaataaaaagacgatggcctgattaaaaattctataatcaggtatgtctatacccatatatgtcaaataaatttattagtttattttggcaaattgaaacaaatttattctttatttacatatttcgtatagcctatcatcgtatatgctaacaaatttattagtttattttggtatattaaaataaattttcatttttctttcgtatattagaataacaattaatttcattttatatagtctaccattatatatgtcaataaacatactaatttctatttgttggaacaatattttattttttttaatacaaagcaaactataatcaaacataatgattacattaaaaaataggtcacaataatactattttattttattttatttaacaagtaaatataaatataaaataattttatttagtataactcataatttaaatattatttatttgttggtaaattaaatataaaagaaacttttgaaaaaaaactgaaagaaactaaaatactaactttgatttcagctagtaaaaaaatatatgcttttcatgtatcaagataattattttaaagagtagatcataatggtgtaatttttgagaccaaataattattagtgtagtaaaaaaaaatctttttaaatataaaaaaaatgaggaaagagaaagttaaagaaaaagctaggttgttcacagaagaagaataaataaaattaaagaaaaaaataattaatgcacctcacatagtcacatcacgttattattgaaattaaatggagaaactagtattcacgttaaatttccctatatactaagagcacatgtccttttgtaaaaaaaatggtataaccttccaacctaattaatttattggaagtgttcatacgatttaattcgtactattttatttatagtgcatttgatttgcactaaatgaaaattttatattttggatccaatcaaatttgcatatcaactcaaatccaatttaatccacaaaacttcaaattggatcaattattttagattgattactttttaatatttataaaaaaataactaacgacaaaataaaataaattattattattttatgtctctaacaaaaaattaaataaataaaacaaaaataaaaaaatttaaagcaagaagaaaaaaattatgtgtataaagaaatattgatttttttttagattagagtaatttgcggcataannnnnnnnnnnnaactctcagttgcaaataaatacctatgtttaatttttgacggtaataatacctaagttgtaattctagaatatttgtaggtaccttgctgttaagtgttaagtaaattgccacgtggcaattcctagttggtccaagtcattaaaatttttattttttttaaaaaattaattnnnnnataccaataagaaaatgacacatggataatgatttaatatttattatttaccagtcagatacctacaaagttccaaaaatataacttaagtattattactttaccgccaaaaattaaacttaggtatttatttgcaactgagagttgaatttaggtatttatatcacaaattactctttagattatatttttcttataaataataatgaaatatatatttgaaatatatttttatcatatgtattaaattttaaattattattttttacattaaaatagtaattgtatatataatttatttttaaatatatatatttataaatatgtatggattgaattggattggttacttttatatgtcaatcaatatctaatctgcactttgtgaattagattgaattagatggcgcagatcaaattagattgggtattttatgaacacccctacatttaatatccttttgtctattttttctttttaatttgtaacagttactctatataaagtaaattatttttattatttttttcttggagaaagtatttaacattacatattatatattattacattttttttcaaatagattcttttatcttgtaaaaattattgattagatcttatttttttgttaaataataaatttaattctatatttttttttaaaaaaataatattaaatagtaccctaaattaacttttttgtaaaataaaattatgtcatttttatttttacactacaaaacagtttttttttttttgcatttttatagaattctatgtagaaatgcccatagcaactaatagatcaatctaaatcacaaccaaaatctacatagcaacccacgtaaaaactacaggagaaactcaaaccgtaaatttgttaaaaaaaattaaaaatagtacatggggtaattttctaataaaatttaataataatctgatatagaagtattatgataaaactggttatgtattctacatctggtcgtgctagaaattttcttcaagttgactatattaaaaaattataaaaaattaaactcaggatcctatttgtactattttaaaaaatacaaggtgtattttctcatttaataaaatagaaagaccaatgtaacgcccgtatttttttatttactaaactcgaaagataactttaatattttatagcttaataaccaaaagagtcgggatcccgagtatcaaaa

SEQ ID NO: 26198 - DNA, 2079 bp, Cannabis sativa
  modified_base (1897)..(1898): a, c, t, g, unknown or other
ttgttctattttgttgttttataaaaagatagtatttttgtaaaaaattccgtgtgagtaaaattataaacttttacccaaaatctaatatttttgtaaaaattccaataaagaatgtattgaattatttagcatgttgaaattagactttcaatagtttattgcatgtatttttattattatttctatataaaacatttgagttataatttatcaaaaaagaatcatgagtacatccttttactgaaaattttccctattttgtaaactaacataaaaaagaggttcattttgactaattatccatttcaaatcaggctagaaggtaaggtagccctgataacagggggtgcaagtgggcttggaaaggcaacagcccatgaatacatccgaaacggggcccgcgttatattagcagatatcaataccgaagtcggcccaaaagtggccgaggagctcggcccatcagcccattttgttccgtgcgatgtagccgacgaggcccaaatcgtgaaagccgtagaggcagccatgggccttcatggaaagctagacataatgtacaacaacgctggaataacaggcccagcattcccaccaagcataacagagcttgatctcaacacatttgaccaagtcatgaatatcaacgtacgaggcactcttgcaggaataaagcatgcagcacgtgtcatgatcccattgggctcaggctccattctatgcacagcaagcatgagtgggcttatgggtggtattgggcctcattcttacacaatttccaaattcactattcctgggatagttaagtctgcagcctctgagctttgcaaaagtggggtcagaatcaattgcatctcaccaggcccagtggtcacaccactatctgtggcccaattagccttgtattataaaggtgctaccatggagcaattgggtgagattgttaatgggcttggagagctcaagggtgccaagtgtgaggaaattgatgtggcccatgcagctgtgtatttgggctcagatgagtccaagtatataactggtcataacttggttgttgatggtgggtttactagcttcaaggatgttaaattaccttcccctgatcagttcttattgtaagaattataattagaaatttggtttttaaattatgagctttttggggagaccctactatggctatggctatgactatgtatttgatgtatgtttgcatttgatacttctggctagtgaaagaagttgactaacaaacttatggaataactttaatggcatgtgttttaggtaaaaggtatcattagaagttggtgtttagcatttttttttggtatcatatcgctagtggtgtgattaagtatcaggttctatataacttaagaaaataatttttagagaatatcgttaaccaatcataaagtatcatttataaaaattgttgtgtagtactactgatatccaataacaatgctttttaaataatgctttttaaataagagcagggtcagtcattaataatgaccttaatatgattatgacaacgagaaaacaatatcatatcctaaaccaatagattaaggggattagttaatacatttatagatattaatattctataaatgctcaagagcgaaactacgtacagataagttggaacggtccctcaatttgaaattaggactagtcctaaattatttggagtcaattaggtcaaaataatttggttttagcctttatatataaatgattttttcatcaaataatattaaataattaaagttatttggtctagcgctaatttttcatcaaatattattgttgggatataaattacctaataactatgtgtaaggtaaaaatatacatggtttttttatttttatattttaanntatatatttttttttgtatttttaagaaaatctacatagcaactaacgaagtaacttaaatcgcaacttaaattcacatagcaactattagaacagttcaaaccgtaaaaataaaaaaaataattaaaaaataatacatgagattgttagacttttatttgggcttacattaaattttatt

SEQ ID NO: 26199 - DNA, 3146 bp, Cannabis sativa
agcaagtgctagttgctcccgctctagtgttttcaacataacatcctattgctggtaaccgaatggagcctttatatgagaggttttgtaagtaagcaccttcagtcattttggaatgtcctggcgtgatgaaagtgacttacattacaaaattattaactttatgggtgtcactggtaatgatcaggtgacttgtggcacttttcaattctagaaggatgccttggtatggtgggagatagtatcccttactcgggatgatactagaattaccaaggaggaattccaggatctgttcaatcctaagtactacaaagaagtggttcatagtaccaagagaaaagaattcaccaaactggttcaaggagagaatatgtaagtagctgagtatacgattaaatttgatcaacttgctaagttagactcgagtattgtacccacagattttagcaagaaagagaagtacttggttaggcttaatgccaagattaagaaagatctggtaattactactgatgacactacgacttatgcttagatggtagagaaggatcttcgagccaagggtgcattagagttttttcaagagccccgagggacttttagtattggtgggaccactacctttcttacttctagttttggtagggatggtgctgattttagttttgatcaaaaaagaaagactccactagcacctggtggcccgagtcagagtaagaggtaacaagggaaccaaggtaggggtggtcgttagggctgctttgaaggtcgttacagttatccttagtgtccttattgtaagaaatatgaccttggggagtgcaacgaaaagatgtgctacaagtgtgttttggtggggcatttttaagaaacattgccctcacccaaagaaataagaacagatgaaagaggataaacccacaccaatccgggtgaataccattactcaggcagatattgtagctagtccttttgtggtaacatgtcagctttttctcaatgactccctgtactatctaatttttgagtattgagctacagactaatatgtggcttcaagagtaattaatatgggaagaccctacgattatgttgagataggtttggaacactattaccaagtggagaattagttatctccaaaaggtggattaggtttatgccaattagattgagaatagggagttgagcattgatttgatggaattagacttaactgagtttgatattacacttgggatggttttcttatctaagtatgcagccagtattgactacaaacagaaaatggtaaatatttcaaccaaagaatgaggaactatttgtgtttatgggatttgttcaaggctcttgactcccgattattttagtgttaaaatctagagatttattgcatattggatgtatgggattcctagctgtggtgattaactccaacagatcagaaacatttaggcttgaagatgtcaagatagtaaaggaattcttaaatgtgtttccagaggaattaccgggattaacaccgtagggtaaaattgattttgttattaatttggtacttggagcagagccttttttaaggcatcttatcgaatgtctttggttgaactgaaagaattgaaattacaaatttaagggatgcttgatctggggtttacccgatccaatgtattgctttgtggagccctacatttatatgtaaataagagggatggatccctttagatgtgtattgaatatcaaaattgaataaattgacgatcaagaacaagtacccattagccataattgatgatttattccatcaacttcaggggaagataatctcctcaaagattgacatttgctcggtttgtcaccagttaagaatctgagagaaagattatcctattttttcgtactgtgacgtgacatctagctggatgacacgtgtcttgaattttccaccttaggcggatggttttattcctagcagcccacaaggattgatatgaaggtccaagttgtacatacatagtaggatgcccggatagagtcattaagggacatccgacaagcttgatcgtgtgattaactcgcatgcaccagccaagaaatgtgagttggcaatttcagcaataatcaaggaaatctccaacctttcatgaaacaaactaatccctactttcgtgggattattcatatcttcagagaataaagacaatcaacctcgacttgcctaattcccatattataattatggaaacatattaatttcccattttctttcttatagattaagggaaaccattcctatgtaatgagcccctataaaatgtggtctcacctcactattgggggatacgaaatactcaagacaaaaatagtgatctaatagagaattactcaaagatccattgtaagagctttagagagagaatacttttttctttgtctcataagtcaatacaacctaaacgggagtaggctattaccactatcacggggccaaacttatagaaattctagtgttttctttatttgcagttatttactttatattatttattttatctaatcgctttaattaagactcactatcattggatagaagcaaagttaatattttggtgctttaattgagagcaagaaagaagtttttgttttaagtcttttacagcatacaagatggttgtgaaaattcaaaagggagttcaaattgatccagtcaatctgatggtgacaattgcaagcgtgcatacgtctagaaacgtaagagatctaccagggactaccccagaccactcctggcactgaagtctcgtccaccacaaacactcaaaggctagttagaggatatactgagcttcagaacttgtgagatgcattacaattaatgcacgaccacattaacatcctataccatgcccatcacgatgttcgagtggctatcaatcttgcctttgacaaacaaatatggcatttatttgagtggagggattgagagatggaagtcatgaaggctcaacaagcagatattgacaactgctccaagcaggccactatactgatcaaaagtgcaataccctaggattaagaaaatggattagcaaacactaactagttaattgtgtataattatggaattatattatgatataatt

SEQ ID NO: 26200 - DNA, 4466 bp, Cannabis sativa
cgccctgatcagcgtcggtagcgaattttacaaaaactgacgctaaaagggcttaaaaacaatctctaaagggggtttttgtagtagtgacatatttacaacctatacaatacttgtgtttaatcaagcttgaaagctacttttaaatttgcaatccatctcctgtcttcttgactaactttcttttgtaaaaaaaaaaaaaaaactatagttctattcttgacatctttttttattctttttataggtatatttatattgtaaagtatttagaatttcaaaatattttatttattttttttttgatcaaaacctgtatccattgcataaaattaaagttcaggatacaaattacagataaaattttgatctttccaaaagacttcctgatctaagcctaatgcaaactttgcaagacgatgagcatcttcattgtgctctctagaaatatgcctaaaagtagcattaggaagagaagataggaagcttttaatgtccttggcaaacctgttcaaaagtaaatggtgactagcagaattaccaatataatccacaaggaatttacaatcagagacaatgtaatccggctgtatgcttcactgttggcaccaagaaagagcatagtttagggcatgagattccattaacaaagtcggttgggttccttgccacggtgttgctacagtcaagagtaaatccccgttattgttgaagagcgccataccaaaacctgtcttgttagttgttatattctgggcagcatctacagaaagttttaattggaatgctgaaggagtgccccagctatcagaggttgcataagaatggatggtccccgaggtgtgttgatgactgttgttttgttgatataggtccataaaatctgtagttgtttggataatactggctggtgttgctagcttctggtggttgagaaaatcattcctgcaatgccaaatcttccagagcaaatagagaaaaaattggtattcacttgtcgtaagtgtggaagcagccacatgaagcatatccctgcaagttagtgacatatttttggatataaaagtagagaattgagttaatttccataccttctggacagttgaacacctgaaaataacatgctctagggtctccgtttggtgttgacaacaacagcaatttggtgtgggaatggtctttctcttatgcaaattatagcttgtgcgaagtatgtcataaaaagctctccagataaagtgttttactttaggtgggattggttgtgtccacatctttctccaccaggtttggttagtcatggtgtccgatggggtgggatgatcatctttgaaaagtaagctgtgagctttatggtaaccagaattgacagagtagttcccatgtgatgtgtatggccagtaataggtatcagggtatggggaaggcaaaaggggtatagatacaatggcttgactaatatcggaggggaaaatagttctaatgcgagtggtatcccaatgattagatgggtttataagatctgatacttttgaacttccgtctgaaagatgtttgaggtaacttactttaccataacctgggatccaagtatcattataaatcgatgtagcggtaccatcacctattgatttcctaaggccagatattaggagttccttaccccaagagatactgatccataccagtgaaggtcggcgccctttgctagcatcaagaaaggtggtgtgtggaaagtaacaggctttaagtatggttgcaacaagggagtggggtgcctgaagtaagcaccaagcttgttttgccaacattgcttggttgaaggccttcgttgagcgaaaaccaaggcctccatgaaattttgagaagctaagtgaagaccactttttccaatgaatttttcgactattttcagttcctccccaccaaaaacaagccatcatggactcaatcttagaatgaaaagaggcaggaaatttgaaacaagacatggcataagacggtatcgcctgaaccacagacttcaaaagaatttcttttcccccttttgagaagtgctttgagttccatttgttcaaatgtgaccagactcagtctttgaggtaattaaagacctcttttttagttctcccaaaggtttggggcaggcctaggtatttctcaattgaatctcgaatgggaatgcccaaaaaggaagtaatgtggtttttgatgtcctcattagtgttgggcaagaaaaaaagagatgatttgctataattaaccatttggcccgaggctaaactatagtcctgcaagatatccttgattgtggtagttgcatttggagaggcaggactgaatagaggactgtcatccgcgaagaaaagatgagatatgattggggcagtgcgagcaatcttaaggccaatgccatggttacgagagttagaatccaatgtcttctgagtaatgagggaagagagaccttcagagcaaaggaggaaaagataaggggagagtggatcaccttgacgaattcccctagatggtttgactcttcctaaaacctgctgattgatagagaaagaaaaggtaacagtcgaaatgcaagccatcacgaggttgataaagcgatcagggaaagcgaacttactcattatcttccgaatgaaaccccattcaactctattaaacgctttagccatgtccaatttaatggccatccatccagtccgaccatttttacgatgggttagtgcatggatgatttcttgcccaataatgatattatctgaaattaatctatcaggaagaaatgcactctgagcaggggatataatgcaactgagtatacgcttaagacgatttaccagtactctagatatgattttgtaaagagtcgtacagagactgatgggacgatagtcagtgacttgttgggggtgggagtgtttaggtatgagcacaatgacagtattgttaattacaccaatgtttgcatccccgttcaaaaaaccttttgcagccaaaagaacatcatgcccaagtatatgccagtttttttttttggaagaaagtgccattaaagccatcagacccaggggttttatcacttgcaagttggaaagcagctattttatttcattgtcagtgtagggacaattgagggattccacttctaactcagtaattcgctcagagataccagaaagaatacgatcagtgagctcttcatcaggattctggcttgcaaaaagttgatcaaagtattgctcaatagtgttcacaaaggagtcagtgtttttggcaatagagccatcggggcgcaagagagagataattttgtttttcgctcgccatgaggaagcgaagtggtgaaagtatcttgtattcttgtccccaagcctaagccagtttacgcgagatcggtgcttccaatattcttattctttgtacaaaaggcgatcaagctcgttttcaagttttcacccaagctcaagctgatagtcagtcagatgagtgcaactttgcacgttcttaagactagattggatatcccgaatttgtgaagatatggaaggcccaagggacttcttccacttcacgaggtgtaaggaacaatgcttgagttttctagttatgtttgtaattgggtcaccatcattactgttttgacacgatgtccaagcatgacgcagacaatcatcaaaacccgattcagacatccagagtttatcaaaaaagaaccgcgggttaggattgtgaagagttgttgtatgatgaaggttcagaataagagggagatggtcagagccaaagtaatcgccatggagaagattatgttttggaaacgaagaatcccagtcagaatttgaaatcccccagtcaatgtgctattgagtatggatcgctgcttttgtttatttgtccatgtgtaagggatgccagtaaaattgatagcatgaagggcgaaggtgtcaagaaaattgcgaaattgagtggaaggacctcgtgacgtgtccccccgaattttatcttccaaatttaaataatcattaaaatttcccattataagccaaggggaattgtgaacattggaaccaactctatgtagcactttccaagagtgaattttattagcaggattaggtgctccataaaacccagtgaagtaaaaagcgggaaaattattaggcttgagatagcaatgaaaatgacttatattataagagaatagagttacatcaacatcatgagtctagagcaacaaaagacaaccactaagctcgactcggggaacttctaaaccattaggaaaattaagttgcattttaattctacttaaagcaccaacttggagtttagtctccataataaacaaaagtgttggcctatatttcctagttaggagggagagagatcagaatgctcgtttactccctattccacgagcactccagctgatgacgatcatggcgcttggc

SEQ ID NO: 26201 - DNA, 3488 bp, Cannabis sativa
taataattatctttcaacaagcattgattaaacattaattattatgttaatttaccatccgatagtgataataatcaagataattattatggttctctcatgcctatacttgtttttggttgagctttgagtccataattaaaagacagtttctagtgatcattccctaggcaagatttcttcaagagaaatatgatcatgatgatgagtgaactataaatgttgggttatttatttatttttttttaataatgagcttacaaataaatataatttatagttttagatagtgtctcgcccgtgtacttttaataaacggttctgtcagtaaatctcactgattatatgatttgataatagtaataagtaatatgtatttattaagttaaataaattaaaataataataaaacttaaatataatattaaatattatgactctataagtaaaattattaaaaaaatatagaactaaaactatatgttaatttatttgtaaaatatcttaaaaagttgagtaattataagtaattaaattctaataattatttatataattgtctgtaaaatattgttaagaaattatataaaaataatcaaagttataaaaaatacatatgatttatgattagctcaataattgtgaaacaatatagaaaaggaaagcaggaattcgagcaaaaacaggtcgaactagttaagaaaaatggatcgatctaagtaaagtatgacacaaaaatattaagcctacaagccgtactggacttacctttaaaaatgttggtacagtatgacacaactttttgataatttttttttttgtaatataaccaacttgaagataatttctaatacgaacagatatagaaaatataaataattttgtcatagcacttttagatcgagttataattaatttttattttgacaaaaaatcaattcatggtcttatttgtactattttagaaaatatagggtctatttttttatttaacaaaataaaagattcggttggtaacttttacaaaatacatggttcaaaatagtatttacccaaattagaatgtgatatttgttatatgttattcacatgacatatatatcttcaaagaatcaaaatatataaagcaaagaattaaagccaagtagtagcactaatatgtagtaaaattaagaattaattaatattaacaaaaagattatcttataattaagatcaaaagaaacacaaggtgctccccatagggtggaaaatgggaattggtattttcctattcctttccccgcacaccatgctatacgcacgatctcaagctatatataaaagtagtcaaaaagaagacataataataataataataataataataacaacaataatatcatcacatcccaactttatatcatttcaaaaagagtgcactaattaacactatttcattattaaattgttaaaagttatggtgtaattaagtaagagactctatattactttaaaaaataatttttaaagaatattgataactagtcgtagggtatcacttataaaaagtattagatatcactggtattcaataacaatgctcaataataaaatatgtgcatctttctctctaagtttccctctaccagttcgtaacttacgcttgacttttttgtctagccagggcttgccgatcgtttctcgaccctacaatggctctagttaggttttattaatttctacactatttttgattttatcgggattgttgctatttttttgtctgagtgtttatttttctctattttctttattcatagatgtctctcgaaaattttcggtattataaactactttaaaaatttttaaaaattaatatgtagtcataaataactataaatctacaattataatgatacaaaaaaaactaaaaaacattcttatatgcttaaacaaattacaagtctacctaaatatctttttaaaagagcaccgtagacttactttaaatttttaagtaatttgattgccaacaaaaataaaaagtcaaattttgagagagatatgactgaatcaaaatggaatttttttccttatcatgctcttctttccctacttatattataattattagtgcagctatatatatagtaaaacccataaaattggccccacttaaataattattctttacctataaataacccaatatttttttgtagttctctcttcatcatatcttaacatatcattatatttatataaatgggtttgccatacttgagtcttattagaagaagtaattatattataacaactctaaaactctttcatcatcaaatcactaatgctacttctaaattttattcttcttctctattttcccatctaaaacactttctcacactcataaatttttttaataatactattaatcatgatcacgaggatgatcatgatcacgatcatgatcatcgtcgtcctcctccttcattagtggcagtcccggccgtgttttttatcacggccggtgagtcaatcaagaagcgaattccaatgatgccctacaacaccttgttggagaagagtaacactggatcatcaccaccaccatcatcatcatgtaattattgcattgtgtgtatgaatgagatagagggtaaggaagaggtgagagtgccaatcaactgttgccacgtgttccacaaagagtgtttggatgcttgggttgaccaaggtcaaccttcttgtcctctttgccgatccaagttgttggcacaaaatcaagatgatgatgatgatgatgatgatccatggaggaaggagaggatgatgtacctttttggagatgattatctctttggtcaccacaattaataatcattattaataaatagttacttcttcaattattttatgataattgtatagtttctcctaggtgtacctaacacatatagaatttatctatataaaaattgaaggaaaaaaagagatataaatatacaatatgattagacaagtgtaatgatattctatcattaattgatagcctttttttccaataacaaaatggggatcactatcacttgctaaaataggagtgtcatactttacctgttgtttctgttttaaataagtgttattggacaccaataatgtctaatatctttaaatatgttattttatgattgattagcgctactatttttaaaattattatattaaattatataaaattcaatatttaattagacaaatagtgatattgagatgtaaaaaggtattaagcaccattgatacattttagcatttctccttctttctatatcattgctatattaggtattagtagggcttgtaggattagttattagcaatctttttgtaaagtccttttttttggtaagttaggtgacaaaataatttttccatggtaagattgctatgcattcattttcgatttcttaccttttaaattcggtttttagttgccattttccttg

SEQ ID NO: 26202 - DNA, 2561 bp, Cannabis sativa
ggattgtggattggaccatctacattatgaacgacttgatctcaaaattgttagcatcaacggtaggtggccttatacaacatctgctccctgtcaagttaggcagcaaatagtccctcaggctacgatcattttgattgtgaccattagcttggtgttctacagcacctctattattaacattgtttctaacgttggtgttgtcatccatagcgacttcttgttcaacccctattacagctctttccaatcttttcctccttcttttctgtctgcaagtcttctcaatctcggggtcaataggtaatttgacagttgctccttgacgtagcataaactcattgtatctgagaaaagagaaaattttgcaataaacaaacttagtactaaaattgaaaagaaaaaaacaaattagaacaagtaagtatacatatcgttaacaagtaatagaatcacaaagagtgaggtcgatcccatactgattgtagttaaatactttaaaattaaacgtttacttttatttggctgtatcaaatttatgagaaaattaaaattggaaaacaataaagaaacagtacaaacaaggtagcaagtaattaatatgtaaattaacgataattaaaagttaggattttcgattttaattgtatctatctattaaggtataacataattcaatttcgattaccaaattctatgcaatggcatgtttactcaagtaatttatagtcttctcaaatattttttttgacatgagtcttctcagatatataaatctcaattacatgcaaattttctactctcgtgataaactaaacaagtaaaaggcatcaaacacagaaactttataagctatccaaacaacatatctactctcgtcctatatcaaaatatgtttctattttactacgcataattaacactcacttctcagattttgcatcaaaaacataaacatttaattggtgataagacaattaaaagtaattaagtacaaataaaatagagtacttaaaaattaggagaaaattaaatcacattataaccataaatcgatgtcaaacaatatcaattcctagctatacacacctccgtttttggacaaaactatcacacacaaaaaacaaagtatgaaaaggaaagtgtatattgattgaatgaataaatctctgtattacaatatataaatttgtcgtaaaaaatgatcctagttatataactagaatagactaaggtcctttatatattaggatgccttagttggtacaagtatacatgtcaactcaaaacttaagactttagacaattagtaattaactgtctatcaataataactaacaaccacttcacatatttccaccttggttgttatgtgttgacttcatggtagtgattgtgctaggtctaaaattccaagttgatctcaaaatttattgaattttgctatagtcactaactttgtaagtatatcagattggttgtcctcatattctaccttctcgagtttcacttttccttctgcaagtatgtctctaatgaagtgtagccgaacatcaatatgctttgttctctcatgatacatctgattcttgcttagatgaatcacactttgactatcacatgtaactgtgatgcttctcttgtcaatgttcatttccctgcttaagcctttaagctagattgtctcgtttattgctatagtacaaaaaatgtattctgctttagtggtggacagggccactatagattgtaagttggctttccagcttatagcacactgctttagagcaaatatgtaaccagtttgagatcttcgagtatccacatcccttgcataatctgagtcgataaagccctatatttcttgcttgagtgactctaatttgtacatgagtctcatgtttgatgttcctttgaggtatctcataacccattttactgtattccaatgctcttgccctagacttcccataaatttgctatttacacttaggttgtggcataaatcaagcctagtgaataccataatgtacatgaggcttcccactagacaaatgtagggaatagactccatttcttttaattcttcatctgtagaaggtgattgagtcttggatagttttaaatgttgtgctaaaggtgcactaactggttttgcatctagaaaaccaaacctttgcagcacttatgtgatgtactcactttgagatagtattaggctcttatttttcctgtctcttagtatatcaatctcaagtattttcttagctgcaccaaggtctttcatttcaaactcaaagcttaatagttgttttaccttcttcatttcttcattgctttttcttgaaattagcatatcatctacataaagtagtagatatgccacaaatttgacattggcacttttaacatacacacaacagtcatagacactcttcttgaattctaatttggtgatttactcataaaatcttttgtactatcgcctaggggattgcttaagaccataaagtgatctcttgagcaagcacacatagtcttcctttccctttacctcttat

SEQ ID NO: 26203 - DNA, 2780 bp, Cannabis sativa
cagtaatgtccatctcaaccaaaatccttgcaaatttaatcatagatttctcccttgttactttatcaatcataatcggtttaccaatcgtgctaacaagggcactcaaacagtttaaaccccaatattgcaatcctaagttaggtaatctaatccagagaggaacagatcgaactaacctcagagtgtcaagatcctgtgtccacggtctgactatcatcggcttcttgtcaaactgcacattccctagttcaagaaccatgtctctggtggcctcatccttgaacttcacaatagtaagtccctggttcatcctgaccactcgctcaatacccaggtaaccccaaattcgttttacaaagccttcaaacacagcaaatgggggattagctcccataaccatacaaacaactgctgagttccactctgaagcttgttcagccacctccacaagatctaatttagcaaccttgaaccctgcctgaataattggttcagcatagtgtaaccttgctgtaacattcaacttctgcccatcttgaagcttcgcccagtgactcctagccgaagcttgaaaatcaccattcccttcatccttcgtaatcccttctccatctgcttccttcatgatctctgccccatttggatcgtcccccattgcagaaacgtctagggttctttcagcagagaggtttttcaaacccatctccttgcacaactcttctccacccatcgccggcatctccggcgtctgttcattctccggccgttcaagaatcgctggaaaagtacccaatcgcaccactgttgctggctttcgagtcgaccgtttccttctcatcgaaagagactcggttgtcttcgcacgcccaaattaagcttgtcttcctcttccaagaacaatatcgattctcataaaatcataatcggaccagagatttaattaaagaaacgagcgatgatgatggtgggtcggccttcaacaacggagcgtttcttcgcagagagcgattatgatttgtattttaattttatttatatttattattgggtaaatatatttttctattattgaggattgagaatagtagtacttttaatttgtgtgtattgggttgtctatgttattttcatcccaaaatgtttcaaccacacatcctaattaaaagataaaatcatgttaccatctctatatttttcaattgagtaatgattttgctttgtctaagaataaactttttattaattaaataagctaattgcaaacaaatatgaattactcactcaaactgattacaaatacttagtatatttaagtacaatctgcttaaaattagaaaattttttatctctaacaagacgcaatctagttttgagattctttttaatgtttctatctatatatattaagtttggagctatacatttttcttaaaatacacaaaagttatagattgcactagttagaatagcataaaaaaattttgttaacaaagctctcgatctttttcttacagccatcaaagaagcaattgaaaaaaatttggccaaagccaatcccccaactgcttaatattttgtatcactttctaagagagagcagtcaaagaataaatatttatgggattccaaattctattcacaaatcggacagtagatactagtaatgggcacatgtttcttgacaaaattatctctggtaaaaaggttagtgtccaccacttgccacataataaaaatgtattttggtgtcaagagcttgcaccaaaagactttcttatgatcaaagcttgtcttgtcccattcgaaatgaggtattcataagcttgcctaatcaaaaatttgtcattagttctaacattgataatagcttcacaagagaaggtttcttttagcctcaaaattttcttctaataccaactaacatctgccttcagctcaagtgagcacatttcttgatcttttatatacaagtttttcactcattttacctaaaccacatcttgctttgtagtagtagttcatagatactttgccaaagccgctttgttccatttaggaccttctcaaaaatttaaacctccaagctctcttggcaaacacaccaagttccaagaagccatatgaaacctgctctgatcatctttttcctcccaaagaaatctgcaaatccagtcaatctctttgattattttttgaggtaattgaaatatgctcatccaataacacctgattcaaattataacagtgtttattagaagagctttacctttgcaatttcaaataagtgtcggcttgtccaagaatgcaattttttaaccatgggtgctatacaaaaaattattagttatttcaataataaattcaaaactttggatacttatgttgcaattatcgtgaatcttaattatatttatttaagataaatataaataggtaggttgttaggatatataatattttggtgtatatattattatgtaaatctacaatgtatccccataatgggtattttgatagaaccctatctgttttcgcatctacaaaaactttttattttagttttttttcatgatcacatacgttgtttgtatttatttaaaattacctgtaaattttcaaaaaaatttaaatactttaaaatgccaaaaaataaaatatacatattttattgcacccgtgactatttaatttataaacgtgataattaactgtttaaactttatttttggttttataaactattcaaattgtttaaaaatttacaaataaacttaaat

SEQ ID NO: 26204 - DNA, 2112 bp, Cannabis sativa
aaattttaaaaaaaaaaaaaagttaagaaaatagtatataaagtaattccccattatatacacttctcttatttattaattattgatagttactaaaaataataataataatgtaacaagttattttcttttttaataaatttataatcattattttatccaataaaatcagataattatatattcccaaataattacaatggtggacgagattaaaaaaatctatccccaaataatctctttgaaatgcaaaaactttaagaagaaaacttgatttctggatttagtgtgggtttgaaaccgaaactaaaatcaatagcactgatcctaaaaatttatcatcacaatttctcaacacattagcattagttatgcacttaggctactagagttccttgtacactaatgcttagcattagtgataggaattgacgttgttgatttaattctagtcaataacgttaattaacgttattgatcgacgcaaaaagacctttcttgatgtagtgcttcatatgtatatttttttttggaacatataaatatataatttaagagaagtaaatactacactttcaaatttaatcagtattatgtgtgctttttctaccatttacatttcaagagagataagttaatgtataaatatttatttataaaaaaaaaaaatagatatatttgtataaatgaaagcaaaaaaaaaaaaataaataattaagtggcattttatatgatttttttctatatttactaatttgttagactttatcattttaggaagaaaaattggatataaatgttttagaaacaattccacattcttaaagaactattttttatgttgtcatatatagtataaataagttttaaatttttatttttaattgtcacaaatttaattttttttatcacatataatggttgcataaaataatttttttattatgtaacgccctaaaaataaggaatgccacgtgttgagactgaacatacactaatcccgctaatcagagatatactagagccaagagcagaaattaaactttaaaatacataataaaataataacttgtaataattacactttaaaatacatctaaaaagagtacactttattttaggatcccgtaaaatattttcaaaatattacaagtctacacgctgacctaagcggtaaaagtggagattacaataattccacctggcagacccaaccctcgtggtttagcttggcctgaacatgtacaatgcaccgcaaaggccctcaaactcatggctgatcaattaccgacttaccctttcttacacaatagagcacacgtgagccaatgcccagtaagatagtataaacaacaatatgaataacaattataattacttaagtattgatgtcactgcatttatagtctatttaacatagacatacgtgttacgctcacacgtctatttacaataaggtcttagaatggtttatctcaattttagataccgagtctaaccttgttatgtcttaaccgcataactctttatatcaacatatataatacattattgcattcacattcacatacattctagagtaataaccctaaaccataaaatagctaaacttaaggtaataaccctagtctctgttttctgcataatatataaaataacatacttgagcaccattgcactaatctctatgtgctaactcactgtcttacctgataatcttagtgtgtggaaattctaaatctttgggtgttcctgagctagcgccagtaatcctagtcacagattctcgggatttcataaatagggttaatcttaaattcattgtaatacatatataaaatatgaactccaatcatagactaacacatagaacccgaaatgagttttccaacgataccaagaacatcaaaaatagagtttggagtcaaataaagatagaatctcctattaaattttaaataaggtattttttaatgaataaatgactgatgtcattagataatccttccagtaatgtggaaaagaaattttaaattttaaaaatattatatattaattataaataaaataaggacccagagatgtaaatccaatgactactaatgaaaagta

SEQ ID NO: 26205 - DNA, 1724 bp, Cannabis sativa
gggcataaaacccaacacttaatttgttaactgagacagaaaaattgggagaaaaaccttgtagtactccaatgaatcttgctatgcatctaacgagtgatgtagaaccatttgaagaccctgagaagtatcgcagattagttggaaagttgaattatcttactgtgatgcattcaaatattgtattcttagttagtgttgtcagttagtttatgtcatgtctaacaattcatcattgggcagctttacaacaaattttgtgttagttggaaggagaaccccgaacgaggtattgtttacaaggatcatggacagaccagattgagtgtttctcaggtgcagattaggttggttcttaggtggatagaagatagactttaggttattgtatctttgtcagaggtaaattggtctcttggaagagtaagaagaaaaatgttgtgtccaaatccaatacagaatcagaatatagggctatggcacaatctctgtgtgagataatgtgaatatatcaacttttgactgaagtaggatttcagacttcagtgccagtaaaattatggcgtgataattaagtttctcttcacattaccttaaatcccttgttccatgagcaaaataaacacattgagatttattgtctattttgttcgtgagaaaattcaacaaggcttgatctctacaggatatgtgaaaacttgagaacaattaggagacatttttgcaaaggctttgaatggggtacaggttaattatgtttgtaacaagtttggcatgattaacatctatgctccatcttgaggggagtgttagaatattagttgtaagttagctagaaaattagggtcaattgtaattattttgtttcctatattctctcatactttcctattttagtttctcctaggttatataaatacataaaatttacatgaataatattcacaattcattcactattttttacaatgtacaacttctcttctctcaactttctcaacgtcttcctcaagtgttgtaaattttgttctaacgaagctataattgacaatttcatcaagatatacgaccaaaaactcatacaatacatcattcatcagattgcagaatgttgcaggagcattagtcgatccaaaaggcatcaccggaaattttaatggcacataccttgttacaaaagttttctttaattcatccccccgcaattcgaacttgccagtaccctgacaggagatctaatttggtgaagcatcataccttcgccaacctattaaacaaatccacaacatttggcaccaggtatttgttctttacggtgaccttgttcaaagctcagtaatctacacacatcctcaacgaaccatctactttcttttggaacaatactggtgcaccataaggagccttggatggctgcataaacccactatcaaccattccagttagttgtctccttaactcttttaattcagaaggtcccatcttgtacaatgccttggtcagtggaactgcccccaattctaacttaatcttgtaattgatcgccctccttggaggaagctcttttaaaaaaaaaaatcaggcattgtgttagcaaactcctccaacaatgaagctatctcatcgggtactttgacctatgacccatttggtacgcaggactggattgaattagacaggttaatttgtcaaatccagtatttgggcatggcagaagtctggat

SEQ ID NO: 26206 - DNA, 3380 bp, Cannabis sativa
  modified_base (2781)..(2787): a, c, t, g, unknown or other
ttattattattattacaaataaaattaatataagattcttagaccttaatttataatgagagatagagttagtaaaatttaatacaattttttataactaaaattatacattaaattacattaataatgtcaactatcaaagtggttgtaatatactgtaataactatcatgcctatttgattgagaattgctaaaaggcaccattggtgcctagcaccctcgctattggtgcgattaagtatcgggttccatatagtttaatataataatttttatggagtatcgctaaccaattgtaagacgacacatctagaaggtgttaggcaccactggtgcccaatagcaattctctatttgatttcatgaaattgaatgtgctagtattaatttcttaagatccaaatcaactttaattataattaattaaggtaactagatctatatttaaggaagtttatgatattcttattattataatcaataataattatataagtgattatttaccttccttgatcgtcgtatacaccactgtcacttccatgtttaccacgttgtatattttttatctctataggaaagagtagatgaggaaattttccctgcatatataattaattattaataataactaaataaatattattattattactattattaataacaataatatatctataaatttatatataataaataaataaaataaaatttgaaataatttacaatttcgaaaataaaatttatatattttgttgttcgcacaactgtttaaattttgtttttagtacagtaaattactgaaaatttaaaaatgatcttaaataattataatgtaagtgatagtaaaaaaaaaaaaaaatttaaaaacttttttagatgccaaaacaaataaaaaatctgtaaaaataatcttttgaaggagtctactagagaaaattttaatactttatacagtcaaataaattaacgattttttcatttattattttataaatgattttttttgctcatttataaaaatagaaacaatatgattttgaaatgagaacttaaaatgaaaataatttttataaaataaaaaaaaatagtataatctgaagatagaaataacataactttaaaatagaaacagattttctagaaataaataaaaaaaaaaaattaaaagtagaaaaaaatgtaatatcatggcaattctctaataaattattattaatattattaaatgaggtgaaaaagagtcatacagggcgagttttgccactaagagtgatattgataaatagtgaagctacggtagacaacgcaataccactcccaattgcacgaaatcctgcaataattattttcattatttttttttattttttattttttaaaaaaaagagtaataaataagaaggaaaattaagaaattataattactaaatattaataagtaaattaattttttacctttgaaagtttcccaaggataaatgagaccatcatgattcctgtcgaagaatgaagcatgtttttgcagaacaaactcattacttggtacaaacttcttactttcttcttcttctgtatatatatatattttaaattactaaaaataatatgtaaattaaactcaaaaaaaaaaaaatggaaaaatggaaactgaccttgctgaatattattattagtagccatgataatttggaattaatattgataataagagagaaagaagagcttataatatgtatatatattatatagcaaaggaatggtttaaaatggagttgtggtatcaagattatatataaaggccatggatgaagatgggagttgggcttgggaccatatcatatcatatcatatagtaataactaataataaaataatatatatatatatatattctatacgcgacttattattctagctaacaataacagggcctttacttaattttgatttctatatatagatataaataaatgcatatgtatatatatgggtgtgtgaatatatatgatagaactatagttttaagggaaacgattaatttaggcgtaatgatgcatgtgcaggctacgccatacgtaattacgtattatatagttatgaaaggctcgcggagaatggatgacttaacactacacatctatatgtacatattacgtgtctctatacatatttgccaacccaaacttttattaattgctttttccaattttacttatttttcattcccaaattttattattttattatctttaaatgtgaatgtagaatgctcttttaatataccacttgattagaattagggtattatactttaggtgtaagagtataaatgttttatttctaagtaatttgcgacttaaatacttaagtttggttacaaataaataactaagttaattgtgttgctagacattcttgatattaatctgatcgtagcatttctgatatttttatttctagtgaactcttatatcttttgtatcaataatactaaattattcaatgaagttgatattttatctaaaaaataactaagtttaatttttagcggtaataatatctaagttatatttttggaacttcataggtacctaatcattatccatatatattatttttattattggtatattttaactaattttttaaaaaagaataataaaaatttaatggcatgaaccaataaaaaattacacgtgacaatttacttaacacttaactaagtaattattgaagttttaaaaatataacttaaatattattaccgttaaaannnnnnnttaaatatttatttacaactaaaattacttatttctaattaaatgacatattaaaagaaagtactttatatttaagcatccaaattttgcacttattttggtcattatttcctttctttgcaccgttcatagtttttaatatgctcaactactggatctcacaatattgattcttttttgttaattaattattataaaaggaatataatatagagaataattataacaaaaataaaagcaataataattaatgccttacctcctagttaattagtctttagtttgattaggatttaatttattgtgttggcatgaagactaatcctgattaattaacgttttttcagttaaatttatatttggaaatcccctcatgtgtgggatattttgagatatgatgaattgtgctcagaaggcaccaaattattaagcggtccatcttcatattttaatatcattattagtataatttaatatctgtgacagttatcagtcccgtgatccgtaaggggaaataccgagtaagctgtgcaatcccacatcgcctggggaaggtcaagtgggatgattcggagactgtgtaggtatgggac

SEQ ID NO: 26207 - DNA, 4945 bp, Cannabis sativa
tgttgaagtgcctattgagttgtctcgccattgttgaaccagaagcaagaaataaccaaaagcataaagaagaaagaaaagagaggaaagacagagtgaaagatatttggagagaaagaagtctcaatctgttattgatgatggaatcagtttatatacacatacaaacaataacagaatatgaaataacaacctggcaactaactgaattgaaactaacatctaacaaccaagacagctaagcactaacagaattaactgtcttaacaccccccttcaaactcagaatcgaatgatcttcgactttgagtttggttctgaaatcagagaacctctgacttgaaattgccttagtgaggccatcagctagttgttcaaaagcagtaacatgcttaatttgcaccaagttgttgagaactttctctcttacaaagtaaagatctaattctatatgcttggttcgagcatgtagaatcggattctgtgtgagcataatagtactcaaattgtcacaccagatagttggggcttgtggcattcgaatttgaagctcagagaagagatggtgtaaccatgtaagctctgcagtgacatttgcaacacttcggtattctgcttcagtgctggatcgagaaaccgtttgctgctttttacttttccaagctatcaaatttgagccaaagaagattgcaaacccagtcgtagacctcctgtcgtctggatctgatgcccagtcagcatcacaaaaagcaaccagatcataagacaatggctttgtgagatggagaccaaaggaagatgtgccactgatatatcgtaaaatcctcttgactgcatgccagtgagttgtaagtggctgttgcatgaattgacaaactcgattcacactgtatgacaactccggtctggtgatagtaagatattggagggcacccacaattgatctatacatgtgaacatcagctatgggatctccctggtgagcagataaccgaagtccactagtcataggagtgggagatgatttggcacctgccatttgagctttgacaagcaagtccttggcatatttagcttgacacagatgaataccagtatcagtgtatgtcacttctatgccaaggaaatagcttagttttcctaaatccttgagagaaaactcactattcagagcagcaatgagtcttgtaacagctgtagaatcactccctgtgataagaatatcatcaacatacactaaaacaagtgtaatagaggtaggagtatgtaagatgaagagagagtgatctgacttagatgagacaaaacccagagaagttaaactgttctgaagcttatcaaaccaggctcgaggagcctgtttgagcccatataaagctttgttaagtttacacacaagatgctcttgaccaggaacttcaaatcctggaggctgtgtcatgtaaacttcttcatgcaaatctccattgagaaatgcattgttgacatccaactgccttatttcccatcctttagacaaggcaagagttaatacaactctgatagttacaggtttgactactggactaaaggtttcagtgaaatcaaatccagcttgctgatgaaaccctttagccactaatcgagctttgaacctgtcaagtgaaccatcttgattttccttaaccttgtacacccacttacaacctatagcttgtctatcaggaggtaatttcactagaacccaagtgcgattcctagcaagagcaagaatctcatcactcattgcactattccagtgctcttgagctaaagcttctttaattgatgatggttccttggtgatgagaaagctctttggtttatagataccagacctcgatctggtgtgcattctgtgtaaattattcttcccaggtgcattcaaacatccagtaattaagggcaaagcagcaggagatgaaaccacagcagcctgattggtatgcaagggcatagactgagtaggagaggatgttgaggaagtagtgggagtctgaagctgattatcagcaccatgaggatcactaactataggcaattgtgtaggagaagcagcagtaatgacatcaggaacatcaaacatagcagcaactccagaatgttcacctgtttcatgcacagaaggttggctaggatgccagtgagtagcaatatgatcatgcatagtagtggtaggttcaatattgtcaatagaaacatgttgatcaatctcacatggctcggttacagtttctgcagaattcagcagatcagacaaagtgtaggattgtctaaaatgtgaacatttaggtatgatagcagaaataggactgtgttcagtgagacaatgtgatttggaatgagtaggatgactggaaattgactcatatgggaagttaaactcatcaaacacaacatctcttgatatgtataacctaccatttgtgtcaagacatttatatcctttatgattaaggctgtagccaaggaaagtgcatggggcagatctgaattccattttgtgcttattgtatggtctgatattagggaaacatgtgcaaccaaaggtcttgaatgtagtgtaatcaggtttagtgttaaaaaggacttccagtggtgatttgttgtgaagaataggggtaggaatcctattatggatatagacagcagtacgaaaagcctcatcccagaattttaagggaagagaggcttgagctaagagagtgaggccattttcaacaatgtgcctatgctttctctcagccaatccattctgttgatgtgtagtagggcaaggatgtctatgatgaattccttgttcagataagaacttggaaaaggatctaaattccccaccccagtcagtttgtagaaccttgatttgcttgccaatttgcaattcagcctcagctttaaaatgtagaaaggttttgaatgcttcagatttgtgtttcaacaagtaaagccaagtaaatctagaatacacatcaacaaaatggatataatatttatagccattataggaagtgttgtgggagggtccccaaagatcagacacaactaattgtaaaggttcacttatgacagtgttggaagcctttggaaatgggaatttatggatcttgccaagacaacaagcagtgcacacagaaaagggagaaattttattgcttaagggcatattacatgatttgagtacagtatgaacaactttctcagaaggatgccctaatctattgtgccacaaagtgaattcattttgcacattcgagttacatctaagacaacttgacacagtagctgttgtgttatttaaagtgacagtgtaggtgctcttggtttccaaagtgcagaccatgcttttggcttgagactctacagacagatcagacttgagacactggtttggactcgaagaaacaggtccaatttgagttgaatcaaaagtatataggccattcttgtgtgtccccatcaacaaagtagtatgagtcatctcctccttaacaaaacaaaaatcagcatggaattggaaatagacattattatccttggcaaatttagagacactaattaaattcttagtgattgcaggaacatgaaggagattgtttaaaacaagtgactgagatgagtgtttgggtgaaatgaaagattgaccaatatgtttgattgacaaacctgagccattgcctacatacatttgatcatgaccagtgtaatcaaagcaagtagcaaggttctgagcttgtggagtgcaatgatttgtggctcctgagtctggataccagtttgcatcactagcaacacctgtagtggtgagattggcctgctgttgaccttgttgtagtggtgtgctgctgtgtgtttgtgtgctgctgttctgtcctaagttttgacctgtgaatgatttgtcaaaacgataaaagcaatcatggacagtatgtccaaatctcagacaaagttgacattgtggcctgttattcacagctatagcagatctgccacctctgttaggattgaaattacctctacctccatatccagtattagagtaaggtgcagactcattacctcgcataaagaatctatttccagactgacctgagttgttgttgaattgtgagattcccctaccaccaaattgttgctgtctgaaccttcgaaaagcaagattggcctccatatcagtttcttgatcacttattgtcaggttggtactgacttcaatatctttgttgttcttttcgatcctggattcagaagccaaaagtaaggcctcgatctctccaacagagtaattttcaatgcgagtattcgaagatatgatgaaagtatcatattcgctcggaagtcccttgaagatcgcagctacatgatcacgatcagtaagtgtttctccaacagatgcaagaagatctactgtttgtttaactttcaagaggtaatcgttaaggctcaagctccctttcttcaggttctgcagtttagtgcgaaattcaaggatcttcgatgagacttgaagggtgaagtgtttctcgagagcatcccagatttgtttagctgaattacacccaaccatacgtgtgagaagactctctgacattgatgcgagaagccaggaaacaagcaattgatcctgaacttcccaatcaacatagattggatttactctgttctgtgttcgatcatcatcactgaggaattctgcaggtggtggttccttgatgaacttgaggaggcgatttcctctgatagctgccaatacttgttgcttccacaataggaagttgtgatcattgagtcgaatcgaaaggctatggttgaagaacacaggttcttgattgggtcgaggtctgttcatggtgacttgagctccggttgaagctgtgttgtttccaagagtagccatgttagcagagagcggagggaactgctctgatac

SEQ ID NO: 26208 - DNA, 3216 bp, Cannabis sativa
tgtatttttaatggatataattagcaaaaaaatttagtttctatttttaattttgttatctaatttaaaaggaaaaatttgcagtaaaagtctctaaaaaaattcactttgatgtagattagtccccaactgctaaaaatagcggcaataatctttaagcttacacttttcataagtctgttagttgttattttaacccgttcgttaacttatttaaaattactatgtgtcaaagcgttatttaaaattattttttgttcttattttcgaaagagaaatactgaaggatactagtggtgcttagcactttcttgcgtgtcaatatttctattggtccaacttataagtatcagatcttatataatttaatgtaataatttttaaaaaatactgctagtcaatcataaaacgatatgtctataaagtgctaagcaccaacgaaattatttaaaaaggaataaaccgcatgcacaataacaacccttttataaatacaattttaaaaagctaacaacaatatcaaacatgcatccgctacccaatcattagaaggcaattatcacttgttaaatcatagcaaagctttcaatatagtttcatggctttgaaatctatctatttatgtttctatagttatctaacaagacataaaacttatttattacttataggtacctatcatattctttcaaaaatatatttcattcaaaaataagatataaaaacaatcaaactaaaattccttaaaataaaaaacacatacacacatgtatttttctttgactttttctttttcattattttgtggttgagccagccaggagaggtccctaaaaaacaattaattaatattttaatttaaaatatttgcagcaagcttaagtatttaaaattttaaaattttaaatttataagaaacataaattcaataaaaattttaagagtaaaagtatctaatatttataaaattataattttcatcaaattctattagtattttaaatttataactaattttattttttaaaatttattgaaagaagctttgaaaataatcattactacatatacttgtctaaatttaataatttaaaatttaagtcttatgtgtcttatttttttaaggtatatatatcatgtttaagatattgatagaaattataatgttgcagttatttaagcccttaaatttttaaacattatgatgtatggaaagattagattagaattttgttagtgaattttaataggtatcttgaatttcttaatattatcgttgtttggtaggctttgacactaaaattttagactagagagatattttttttttgaaaaaaaagacttataatttggaaaatttatacaatacatccaaaaatatttttttaatatttttacggacttttttttatttacattttatggattttcttaattagttgttcacttgttttatttaaagaaaaatattactttgacattgcttttctgtagcaataacatcaaaattatattgttttgaaaatacggaataatgaaactctatattattgtataataaatcatgttactatctcgtagtagcaatgtgaaaattaatattttttttcaaaaaataacagaaaaacaacattctgtattttgtatatatataaaaaatttataaaaatataaaaaaattattatttttgtatatttgtaaaataattccttttaattttgcacaaattaagttaccaattggcttgatcggcacatatcctattaatattacaacattttgaagtttttttttttttttttttttttttttttttgcaacctaattatttattagttaaaccttttttttttgacaaaattagttaaacaaattaaattaattaattatttcatcatattataagaaactattctaatatatttagagactaaatcaatatacaaatattcaacaagacataattaaaaccttcttcaacttatagaaaaatagccaagcatatgcacaccaaacattgaaaaacttataaatacaaaagccaaaacattaccattacaaaattttaaagcaaaaaactaaaatcattatatgcttcaaaacacttcacacacaacatgttaataatcatatgtcatataacaacttctcaaattctttcatgtgttcaggttggagaccgattgcaaccgacaaactcccatcatcatcatcatcattcagattattcataaaataaactaaaccatcaaaaagaatcgcagcgggacccacaaaaattggtctgccccatccaaaatcagcatcataaaagggtaacttagtccagcttacaatcccaagattagggcttccgaaagtatgtggtcctctagttagggcagatatatcaggctgaagttccaaataatcaattgctgattttaaataagaatcatcaactttctttattgtactctgaatctgattcgcaacgtaccataatttcgattccatcaattcaccaaccctgattatcggcgtagtagagaaaattacattaccaaagtaaccaataggaagaggtggttgaagcctagatcttccatcaaccacaacatgcaattttgtctcttgatcatgcccaagtttccttgctttacatgcacatttccaaacatgacttgccaatatctcaaaagtgctataactaagtttgttaccacaacatttggctttcaatgtcttcacttgctcattggttaacttgtaaatagcaacatcaattatgttgttagttaaagattgaggagttgtagtgggtttgtattcaatgtgatcatatgtaggtttaggtgggttacgaggagatagtatagttctatctatatatggtaatgttttgagatcaataccacgagccatttctgaccatgaattgaaaaaatgaagggctgagaaaccatcaactacatggtgatccatggctacaccaatggatactcctccacatttgaagtaggtgacctgcaaattataatgacaataaatatattgggctacatttattttcctttatagctaaaccaataaattttcctaaattttaatgtaaaatgacatgaataaattcatactagtttattattgattgcaactaaagatatccactttatagcttttgtcagaaaaggaaaatagaactttttgccgttataaaagtttgatttgatatt

SEQ ID NO: 26209 - DNA, 2073 bp, Cannabis sativa
  modified_base (161)..(169): a, c, t, g, unknown or other
caacccatactttagaattttttaaattttttgaagtttttaattaaaaaacctttcccacgagaaaggagaatcaaaagtagtaaatgagatataactcatatgctacatgcgaagctgaatactaacgtcttgcattttgtaggaaagtattaaacgannnnnnnnnatgccttgaaaaaatacttaaacctaatgtatgaatagaagccttaactattcatataagcaatcaaaaaatatacaaagtgatgaatcattaagagtatattcaagtttgcttaaaacagattataactgtttatgcgaagcgaaattgataactgctcacaaatcaaaagcatagcagataaaaactgctcgcgcacatagtagattactaactacttaaataatatcaaagcaaattacgagcaatgaaaaggcttaaagtattttaaatctgttcaaaatataattatttaagttgtgaatgaaaacgcaaacaaacagatatattaagttcaaatataaaagtacgaagcattcaataaaaagataaaaacaaagttagccgtccaaccttacaaatttgtctttacaaaaagtgccacaaagggcaaaccattgtctcggccttaaggccattttcctagataaaacaaaaataaataaaaaccaagcctacatagtaggagacttggacagttcttcttcctctccttcttctattgtctcgacttcctcatcttccttcttggccttctcgcaataggcaagaacttccccctcagaatctcccatgaaacttgtatccatccctagattttccatccaggcatggtagatggaatgcagtccaacaacattgcatcactcaagagtctcagcttctttcccctcgagctttactttgactgcgtcaagttccccttggagtttctggcatgcatcgaccttgtcttttctcttcttagcagcttcaagcttggccttgtgggtcctcttcacctgctcgacttctttgattaggcgagtgttttccaatttggcatcattccatcgtttggtcacagcctcacattgacctatcaggttctggatctcgctctccatatactttcttttttccatgccccgccgttgggcaacaaaggagatgaaagatgtctggaaaccaacaaataaaaaagcatgagtattttgaaggatgttgaaaaaagaagtaaacagataagggtagaggaatttaccaagaggctatgggatacactcctttcaagcatctcctccagatccccattattgattaagtcccattcatgggggaggaaagccttgaaatgacgccaataagctgcaccaaactctgcagtgtactggtgccagtattcccgatctcgataggcagagtttcgagggcttggctcgaggaggcaaaagcttgagtcgttttgggaataggcttatcgatatgtgcgggggccggaggatggatcagagcctgagtctcaattttagggatcttgaggctagcactctcggaggctcgcttcttgttggcagtagtcttcttgagcctttttaagggctccatgtcgacatctgatggagcctccgagatggtcaacctcttctttcccttcttgcctgatgagtgaaagagacccttgagattcatttctgcgagacaagataaggtgttaacatttatttaaaagcaaataaaaggagaaattggggcataatttcctacctaaggaatttaccataatcataagaagatggagatgaaggactataatatccactaaaattcctacatcctgtgatcctgaatatatcataggaattaattggttctaaatcccagctcgtatctaagtgacttggcctatccagcacggtaccgtactgctcggctatgccatagtacgagtcagtacaactaatttggatgtgaaaacttgggtaccaactatcaaacctatgtgtaatgcaatctatgaggaggggattccaagtaaaaattataacggctatctcgaaatgacactaaagtgttacgctcggccctaagcactgtgggtgacc

SEQ ID NO: 26210 - DNA, 2520 bp, Cannabis sativa
ttatttatttatttatttcagaatgggtcagatgaatgcaagttgaatacactacaagcctgcactattaatgtgttgcatgatgtggtttgagccttattatatgctattattattctctatggtttatttatttaattgttgttcatcattggtgttaatttaatttaagtgatttattttcttcttaaaaattcagaacaagcattttgctttgatttactgctttgagtttctggccattgaaggaaggcataaggaatggggaagttgtttcacttcattgggtttgcctccaaaattggtcttggattgcttcaatagcttaaatggaacattggtacttcttttaatcttcactaaaaatctatttttgcataataatacttatacatagtaaaaattaaacagaatattcttattgttgttgtttgagttgtcaaaaactttattcgggttcgatcggtacaccatattatatttaaatttcattatctgactttgcagcttgaacaaaaacatgctatagaaacagcacagctcaatcctcctcacacaattttgccttgggtggttgttgataatcaatctattggaaatgtaagccatccttaatgcccctcttaattggtttttttgtttttgtttttctataagtaaatataattaatcacacttatttatctgatttaagcaggattatagaaattactctagctacatatgcaaggcttataaaggtaacaaagtaccaagggcatgtcaataaattttcttgtggcaagaagagctgattattttgggttgtctttgaagatggtcatggttaatcgtgtcacatcatatacatatatattcatatattggctatctttgtaaagcttggataaataatgaagcaaaaatactatattagcatatacatatacttgaagcattattttacactcaaaattcaaaagacaattgggaaatatgagtaaacctgattttgcaagaagccaaactattattgttaatttaagtgggccaggcaaatcaaatatgtagaagttgctttaatggagaaatatattaatgacaattgatgagaaaaaaaaggttcactaattaaacaaaatgtgcataacatgagttttcatcaaaatctaaattgagcttcaataattacatgtaatttatcaggaataaaaacaggtgtaattgatcaaagaaaggaagaaagaaagaaaacaacacaggcaattaggatttggataaaaattctttctggttctatcgcattaatctcgtcgctaatgactggttaattgtgtgttttcacacttcacatatggaagaagagtccacaaatcacaatcaagtgccataaacctgaaaacattaaaaagaataagcaattgacttgggtatatttggacatctttgaaatcctttcttttccaatattaaccaaattatgcaaatgcaaatgagtgatgatccaaataccaaatgacaccaaaagtttaatctggtatatatgccaatagaaccaaataccattcacatatcacagaaactcactgataacagcactaatctgagggtttgaaataacttacccctttatattatcattgcagaaggaatatgaatggtggatttcatgaacctatcatcttccaaatgctatcacacgtatcaaaggaagtcatctgttcttggtcaaattcaaattgcttgactagctttttatccctgtcgacaatatctgtaattgacatagctgaggagaacagaattatctaccaatgcctgaacatccttcggtgattattttttattagaaacacaagatattgtaagaaagataaaagaaataaagactagttgcaacacaaggatacggcctgaaactttcgatgggtcatacaggtcaggaataatatttgtgacagatgcaaacatagaaagtgttctcctgcaggatcagaagaacaagcatcagtttcggaccaagaaaatcgatgagtcataaaacttagattggaaataacttaaattcactttaagattgctggtcgaactactcacaaacattcatattttaaaatgacaaacttcaattattgtattacaaaggatggcaataatgaagcttgactaagctctttaatgaacagatcatctgattccaacaaattctaagagttgtaacttaacaccatgaaagtgaaaatctaaaattaataaacacaaaaggagaaaaaagaaaaagaaaaagaaaataatatattcatagactgcattgctcaaccaaagatgacatttttcttcttttgttaataattacactgtatgcacaatgagacataaaaagagattgctctacttactctgccctacgctcatcttgcttggattccctcaatttctctgtcttttcctgaatagatatccttttgcattctaattcattaatttcttcagtgataactgtgttaacacaaacaataccagaagcacaaaaatcagcaa

SEQ ID NO: 26211 - DNA, 2426 bp, Cannabis sativa
  modified_base (27)..(38): a, c, t, g, unknown or other
taggatgttaatcaaacatacttggtnnnnnnnnnnnntcctggtaaaataattctaacagtgtattatattaataattatcaattcgaaaatatattaaacatagcactttatatggtctttgacagccctgggagtcgtaagaagacccacctcttcgacagttggatattcttttggtgtttataagggacttggcccttattgtttagatggggttgcaaagagtaaaacatatcctgaaacttatctcccttgttagggagtgataggagttcgtaaaagtataaaatttttgtaagggtaggaacctcccaccttcgaaatgaataaaaaataaaaagtttatccatcaaagattggcctgcgagatcaattggtatggagcaagccccacaaaaacaaagaaatcaactaagtagtagcgaaagactggtgttagacatcagttgtgtctaactctgtgctctgaagcttccataggtgtgattcagagtctcctggtctctgggtagccagtggaaaatccctcccccgcggggtatgataccgctctttacaaaaatctcttcgagttggtgtaatcctttcaaggacgaatgcaattcatttgctttccaaccagtagcttgacgaacatactcccacactagaactggaccattgagaacattctttaatgggaccaaagggggcttagagacccccttaagtttcttggaactcttcttgcttctcggacaaaccatgtttccctgttcttcagtataccaagacaaaatctctaagtcaaaggagtaaaacccatgggtatgaagctccccttcgggaataaccccttcgggagagagctgaaagggcaatcaataacaagtcttgacttaaaaaattgcaagttgaaacttggggataaatgttgttcgtatttttttaccgaaatacttggccatttgggaattagccatgtgtttggtgggcttcaacctcgatgtaccttaaaccccgatgtgcttccccattctctcctataaataggaaaataatggaaagtaaatgggagattttctagagaggagaaaagaaactcctttgtaagactaaaaacaatattgcacaaataaatgcaagtgacacacctgaactacgtaaaaatatctttctggatgcataattaatttttagaaaataagattaaatagttgtcgaaaatagtggtcaacaagaataaatatatacatatattatttaaaatatatataaaaataaaaataaaaataaaaatgaattattgaaattaacacaaataatgtagaaaataattaaaagtcactttcaaaaattactttaaattgattttttttgtttctagtcctaggcgcttaaaagattgtttagaatgggttaatgcttgtaaaaaaaattataatattaaaattatttctttcaattaaaatattaaaaattataatattaaaattactattatagagaagagtaatgttaacacttcttatgatatgacgagcttgaattatttctttcaattatgttatcttaacaatcaaacaatatgattcaataaataacgggaattttgttaaatatggtcatgcataattaaatacaatttaaaagtttatgaacaattatattttctttcataatattctcgatatataatataattattttgaacaccttatatataaaatacccctttatataattttttaagatgtaaatataatacttatttttcaataaaaataaatctaagtttcgaataaaaggatatgtgactgtgaagggattcacaaacaaaatgtaattttattcctcatttataatatttatcttattttatttttatagaaaaaatttcttcataccaaataaaattgtaaatgtgtcatgtcgtcctaacctagattttgaaaagaccataaaatataggtggtgctgttagaccataaaaaatataggttggcttgtgtcatccctttattttatagggtagacctgatgtaatgcccgtatttaaaaatggactaattcagatttaaactcattttagtatatttataaaacatcgtaagtcgggattccgagtttaaaaccactgttgaaaatacatgtatataaagttacacatcattaataaaattttttttacaacaacaacatataacttaaaatagtttatgatcgaaaccctccaggttgcactgccgcgatatgtacaatccttgccgagtcccaactcactgctcctcctaccaagccttatctttacctacacaaggtagcaaactgatgagtcgacagactcagtaagataagcatacaacaaatcatataattgacttgagtctagggacacatacacccattcacaagtctaaccaaatgattaagagcgttcttaa

SEQ ID NO: 26212 - DNA, 5424 bp, Cannabis sativa
  modified_base (825)..(828): a, c, t, g, unknown or other
attaagttagcactcaactccctatcctcaattctaatcggcatagacctaatccaccttttggagatgactaattctccgtcaggcagtagggttccaaaccctgtttcataagtatcttgcggtctacccaacttactactaattcttgctgccacataagaaggactggccccataatcaaataacaaagagaagtaagagttgtttgaccaagagctgacctgttacaactgaggtgctagcttctgcatatgtcttagttgactcgaacacccttgctggagcaagttttgtagcaatcttctgctcttctttcttaagttgggggcaatcccttttatagtgtcctagcataccacactggaagcacccttaccctctatactaacccatatgatgcttcttacaacaggggcatttcgggtaattgtatcgagtttcacagctactctgacaatttccttgaccctggttccctcagacctcttgttctatcttgagccactagatgtagtaggcgcctttcttttctggtcaatggtcgagccactacctctcctactaaagcttgaggtaggaggagtaggagccccaccaacaacctgagtcccttaagactcttgggtccactccactgcgccctcagtttgcagtgccttacccaccatatcaacataggtggtattgtcatcagtagtgatcattaggtcatctcttatcttcgaatttaacccatccaggtatttctctttcttactaaaatttgttggcatgattcctgaagcaaatcttgccaagcgatcaaactgagttgtgtattcnnnnacactcatattttctttctgagtctgctgagtaaattcttttctttttgtacttttgactgcttcattatagtacattgcattgaacagttcctggaacttatcccaggacatcgtagtaacatcttggatcagggacaccatgtcccaccatactagagcgtcttcatgaaactgaaatgtggcacaggccactctgtcattgccggtgatgcccataaagtttagaattctagtgataaccgttagccactgttcgacttcatgacgtcgggacctcccagaaaaactggaggtgcctgcttgcggaacctttcatacagtggttccattacattcatagcagtgactggtcctgcctgcacagtaggggcaagagttacctgcatttttggaggtgggattgtaaaagcatcctgttgtctcaggcgtccaatctcttcatcttgcttattaattttggcttgcatttttgcaaacctagtttcccaatcttaggtagcctgtggcgggttaacatcaccccggctgcatgccctacctctaggacctctacctcggccacgaacatttgggggaatttgaactccctgactacttttggatccgcttgagttaccctgactcctggtgttttgcctggcgtccatactattagaacagcctacgtaaccaagagctagtctagttagatcgtgatcaagtatacttactaattgctacttattttggaaatttaaaacatacacctattcaactatcacgctactaacatgcctcctaacaggcttttcttaaatcatactgttatccgaattttttcactctaacgttgcatcacacaacggtgacacgtggaatcaacttcgcatatctgttcgcaagagacatgccgaacagaacaccacatatattcgcacggacgaacccttcttaatcgagcagtggacagtccaaacagcatgccgacccttagcaatttcaacactgatttctgtgcaaatgatgggatcatcaaaagtttctctgcattgccgcatccccaagaaaatggtcaagttgaagcagtcaacaagacattgaaggacaccctaaagaagagacttgaggacgccataggaaattggccagaggaacttcctgaagttctatggtcgtaccacacaactgagaaaacaacaatcaggcagactccatttgccatggcatatggatatgaagctatgctgcccggagaactcgaaccaccatcccacagaagattaacatatagccaagaggccaatcatgtactccttgcaaaatcacttgatgaacatgaaaaaaagcgaaccgcaacaaacttaaaactgatagcccatcagcaaaaagtagctcagtattttaacaaacaagtgcaagcatggaaattcatcatcaatgcctgaggaattgaagcatatgcggagaagattcaagccctcctagatatgaaatcgccaacaagaataaaggaagttcaaagtttgactggtcggattaccgcactcaatagatttgtttcaaaatcaacagacaagtgtgttccgttcttcaacattctgcgaggaaataagaaatttgagtggatagaggaatgtgaaaagtcttttcacgagctaaaaatgcaactcgcaaaatcttctgtgctctcaaaacctctggacggagaagaacttgggatatacctggctgtcacgaagcatgctcaagtgggcagtggagttgggccatatgagattatctttcaatcacgaacagtgattaagggtcaggccttagcagattttgtagttgaatgcacgggtaaagaagaaagcgtttcagaaaacatcacagagccaatacaaatacctcagctgagtagcacagaaagacaagctgacttggaagctacatgcggacaggtcggctacagatcaactatccggtgcagggatcgcccttgtcatgtctaggggacaacacctgcacgctatagtcaaatttggatttatggtatccaataatgaggccaaatatgaagctatgatgccagcctaaaactagcccgagatatgaaggccaaacacattgagatctgcagcgattcacagctagtggtaaatcatgtttttggagaatacgaggctcggggagaaaagatgatagcgtatctaagcaaaatacacgatctactcgcacagttcagaagctatgctctcaggcaaattccaagggatgaaaacacgactgctgatgcattagctcgacgtgcgagcagtaatgtaaatgatagagaaaatctgattcctaatcagtttctcgaaaaaacctagtatcaccggcacggaagaggttgaaatgattgatacatccccgaactagatggcaccaatagcagcctacctcaatactggagaactcccaaacaatagaaatgaagctcgaaaaataaggagaaaggttgtgcggtacatcatagtagagggagtcatgtacagaagaggattctccatgccattacttaggtgtgtcacacaagaagaagttgtacgacttttgtcagaattacatgatggatttcatggtaactaagctgcatggcagagtttatctaagaaaattctaagccaaggttatttgttgccgacaatgattaaagattccaaggcctatgttaaaaaatgtgataaatgccagagattttcaaagatacctcgagcaccgcccaacaaactaactcagatgcaaagtccttggcctttccccatttggcgaatctacctgatttgacagttcgccaaaggcaaaggcggagtgtaatacgcagtggttgcaattgattattttaccaagtggacggaggatgagccattggcaaccatcatttccaaaaaagtgcaagacatcattgtgaagaacataatttgtcggttaagattaccgtaaaagatagtctcagataatggcaaacaatttaacagtcaatccttcactgatttctgtgcgaaccatgggatcatcaaaagtttctccgcagtggcgcatccccaagaaaatggccaagttgaagctgtcaacaagacattgaaggacacactagagaagagacttgaggacgctaaaggaaattggccggaggaacttcctgaagttctatggtcgtaccgcacaactgagaaaacaacaagcagagagactccattggcattgcatatggatttgaatctatgctgccggtagaactcaaaccaccatcccacagaagattaacatatagccaagaggccaatcatgtactccttgcagaatcacttgatgaaattgaagaaaagcgacccgcagcaaacttaaaactgatagcccatcagcaaaaagtagctcgatattttaacaaacaagtgaaagcacggaaagtagcttggtcgtaagaagagtatttttgaacaccaaatacagtacgataggtgtggtcggaccaaactgggaaggaccatatcaagtggtcgaagttctagaatcaggggcatactagttgggcaagtattgatgaaaaaatgcaactcgttcttgtaccaaggtattggaacagggaacatttaagaaaatactaccaatagaagtacctggtcggatgaccatatcaagtatgaaataaaagaacatttgctcttaagtgaatggccttctgggtggaccactcccaaaggtttaaaaaaaaatttcaagtactcaggtcggatgaccaccattgaaagtacgatttttattttctataatttgttttgttcatgttaagctaaagatcagatctgataagcataattgctttgatgtaagttactatagtaacagacacatttctgaccaataaatgaataaagatgtttattgaaattcaaattgagtcgagttcataagcatgttattaatttaccatacaatgcgtacaaatggtttggtcgaacccaaaaccccggacagacaaaaaaacatacttgtaaaaaataaaaaaaaaaataaccaagagtcataagtctgctcggtcacttggggggcacctatacctgtagaaagcatttggtaaaaaaaaaacaaaacaaacacaattgcacgatgattataaatagaggatgaaattcattaaggatagaaaaagcattcaaacctgggattaaaggctgcccggtcagctagttgttcgaaaatatgaaaaatatattccaagtttaaagactgcttggccggtcaccttgtcttaaaaaaaggccttatggccggacaaattaaaaaaaagatagtaaaaggaagtacttaaacaacaggagttccaggctccttgtatgggtcaacgaggttagaaagagcaggaggatcattagtctgagacgaaggcacttcaacactttgatcagtaggagaggtggaagtggtcgcctcggattccccgtaggccgcttgagcagcacgatagttgagaaaaatgtctttggaatcaccgagataatcaaagtttgccttgggattggccttccaaaagtcattaaaaaatctcgagaccagctgtctctagggcattcacttttcccccgagcct

SEQ ID NO: 26213 - DNA, 1676 bp, Cannabis sativa
gtttacgccagtgattgctattagaggagacgccaattgcaaagagagatcctgacgattgctaactagcaatactccattggccaaggactgaccgagccgacttcaccacactagaagctgaacacgatttttgctgccatagtacctcatttcgggtctttcaaatactccaactaaccattgctgcatctaatgtaacatcatcacgattcctatctaatacagaaaaaaaccagctgctaaaatcctagtttaaaccagaatttagtgcaacagctgataaataacagcaagaccgtgcgaattcacaaccaagaagcttatgggaaattgtctcatacttagcattacaaaaagaacagaataaatcaacatagacatgttttgaattaagttgtaccccatgttgggagataccctgtacatgccctccataaaaagtggtgaacctttggtgggacttcaagcttccacaactttttccagcaactatcttcttgcaaatgcaaccaattaccagtagtagattgaagatacttgtatccgctcttgacagtatataagtctgcatactccatgttccaataccaagaatcattatttgttgaactacttaactgaatgctcaaaatcaagtttttgtccctctccacaaacatgtcatctagtagttcaagtcctaagatctctcacccacaagcatcaaattagacacattcttgtctacaaggccatgatgatttgaaatgataaatgggttactatcatttagcagccacgggtcaagaagaacactgacagatgagccactgccaattgaccgcctagcaccattttaaaccaaagattgggcttcccatatactctgccaaataaagcttggattctgtcttagctcagcctgtaaaaaagaaccatttgggtaataccaagctttataaatcctttccaccagcgaacctttcttaatgagtaatcgccaaccttgttttcctaaaaacgaaagattataatcacgaacatcacgaaatcctaacccaccaacatgcttatgttgacaaaggcgcctccaactaaaccaactaacacccttacttgtagacttggattgggccttccaccaaaactttgtcagcattccttcgagacttgcacagatttccttagtcaaaaggaacacactcatagcataacttggtaaagcttgagcaactgactttaacaacacttctttaccatattttgacaaaaatttagtttcccaactaaagattcgtttcctcattttttcttttaagaaaccaagaattgcattattttcctccccataatgcaaggaaagcccaagtataagctatcttcattagcctctaccaatcccatatttgcacatacatgattctgagcctcctcaccagtgttcttgctgaaaaagactgaagacttgtcaaaatttaccttttgaccagacgccaattcatagctttgttgtaatattctgaaaaataaaatgattttaaatagacatattttattatatatgtaattattttggtaatgaagtaagattataatcttacttagggtaattagcgaagatttattaaatgattatattaagcgtaatttattaattacggagattatattgggatatgtgggtatcgaggata

SEQ ID NO: 26214 - DNA, 2105 bp, Cannabis sativa
tatctgacaatggaactcagtttgatgttgaatttttcactgagttttgtgaaaggaaaaaaattattaagagcttctcgtcgatttcaagaccccaagaaaatggacaagtagaagctattaataaaactgtaaaggatactatcaaaaagaagttagatgctacaaaagggagatgggtagatgaactactataagtactttgggctcacaaaacgatagagaaaacaacaataaggcatactccattcacgttggcatttggctcgaaagcaatgctgccagtagaagttaatattgcgacccacagacgtaaattctacaatcaagaagaaaactaagaactccttaagttttccttagatttacttgaagaaatacgtattgagctgcaaattactaatacagcttatcaatatcgaatcacgaggtactttaacaaaagaattaagaaaacacccttcattgttggagatttggtgttaaggcgagtatttgcaaacacacgagatgcgtctactagagtattgaacccaaactgggaaggtccttatgttattgaggcagtagtaggaatcgggatttataaattggctcggcttaaaggcttgctaaaaaagaactgctagaacagagaatatttacgaccctattaccagtaaattttaaatgtccatgttgtatttctctatgtaaaatgtaaattcctatcattaataaagttaaattttattcaagtaattacaaagtcttctttaaaattacttgaggggcatatatatgtgtatttcatctagaatttatctagaaatacatgatatatcgcaaacccagccatttttaaattttttccaagaaagaataattgattaaaattgtttatggacaatataaagtcaaaaaattgaaccttttcttcagaaaggaaaatcgaagtagtagttgtaaatgagattaactcataaaataacataaatgcgaggctgaatatttaacgactcgcattattcaggcatttattataaacgaggcatagagatgtcttgaaaaaataatacttaacctaaaaaataaatagaaggcttaactattcatataagcaatcagaaaatgtacaaaataattcataaagtgaattattcaaagtatgtttaagtttactaagttatgtatggcagatttaaaatgctcgcataatattgaatgaatggtaaaatactcgcatataataagacagactataactactcgcgaatcgaaaagtataagcagaatataactgctcgcacatacatagtagattaataactacttaaaaaatcaatggaaatgctcttttacagtatcttaagttggatcaaaatataattgtttaggttgtgaatgaaaatgcagataaacaaacgtattgagttcagacataaggtatgagataataaaagtaaagatagatatgtaaaagtaaagttggccgtccaacaatgaaaaattttattttcaataaataaagacacaaggggcaaactattatgttggccaaaaggccatttttctaaatataaaaaaaatatatatatatataataataaaacaagttaaaaaccaagtctacatagtaacagacttggatggatcttcttgatctacttcaacctcttcttcctcaccaacctcttcttttctggtctaaacacaaaaggcaagcatagcttcaactccttgacccaaaaagctgaagtccatcttgggattggatgacctggtttgatagatggtcctcctggaaattctgttgaccctgtccttggtgttagccttagcatctttaagttttttggcagaatcgggatggaggatcttgatggaatcctcaagatctttgatcttcttctgattagcctagtgttgtttttcagcttcttcccttgcacgagaaagctcagactctaagtcattccacttcttggccatggtgtctcgatgctctctagtttgacaaagttcagtctcaagcatttccaatcgctaaagccctctgtgttgagtagcaaaggaaagaagagatgcctacaagaaaaagacaagtgataagaaagaagtacaaa

SEQ ID NO: 26215 - DNA, 3428 bp, Cannabis sativa
ggtatgcagccaaataagctataaggaatttaaggagaacaaaatactatatgttcactttatcagaaatcagaaaacaaaaaattttggagatcaagacttttgttctttgtgtttatatgatatgagtttgtttatttttttctaagtatttttagatcagggtttcgagcttcatatgtatatatgtgtgtttgtttgttagattagaattttctttaaattttatttgtgtgtggtttgggtttgaaaaataaattacagtggtggtgttggttattagtggtggtttcaatacctgtattgatggtggtcggtggtggttcgatttgtggatgatggtggtggtactggtggtgatgttatgaactatgaaatcaataagaaaaataaaaacagaagaaaagaaaggttagagacaaaaacaaaaagaaaatatgattgagaagaattttttttttttaaaaaagattgcttttcttttatatttattcatttattaatttttggttttttcttaatttttatttattttaaaatgattgattttatttttaaatttatttatttttattttttaataattatttacgtagaccaataaaattgtgccacatgtaccttgtatacatgtggatgtgccacatgtaccttgtatacatgtggattgccattctggcaattaacgaatgaaaatggatgaaaataattaattcttaacaaattgtgagttttgaaggttttgccgtcgaaattttgattgtaaagattaattgttagcgaagtaaaagtattgggggttatgctgtgaaaaatcgtatttttacaaatgtaaatatatttttttaataacaacaataaaactgtaaccggaaagacttgtagtaatagattgaaacaaaaataaaatgtgcagaatttaaaaacttgatacaagataattatacgtgacattagtgttctttcaaacaattctagttcatgaggccccagataataaaatcaaaaagtaattgacttaaacaaatttagactccctctaataatttatcgcaaccatttgtaatccaccttgctaatttaatctctgaaccacaccaagtagtgaactcgcttcaactattgatgtgtgcttatcccgaagtaaggcttaaacaaatcttctcctaaaggtatatactcatttcctgccgaaatgatacttgaaaaagtcttcttccgaagacccacgcttgttcaaagcttctcttcaacctattctatgaatagtacgagatcataataagaaaaccaaaacctagttgaacactttaagtttttacaaataaaacactcttctcacaaaagatatgaaaatatgagactagagaatatcagaacgtttggttgctctttaggtcctatttatagaacatagaaaccctagctacaaccacacacaagttttcaaagctatccaaaacttttctaaaaaaaatcttgatttgcagcatcaagatcaaattttattgcagcaaatcaggaccaaacgggaaactttccaatcaagaccaagatcacgatttggtctttaatacctgccaaataaagattatttgatctacaataaacatgacaaaaccgaatttaacaattagaaaaaaaaaagtcaattttttcaaaaatagacaactttctataaagagtttttttattttttttaaataagtaacttttcataaaagaattccttctcttgttaaacaaagttcataaaccaaaaataacagctgtaaataaaacttttctaaaaagaaaagaataatcaaaagtcacaaaactaacactaatttttttttttaattacacaataaatcaaataatattttaacagctaaattaaaaaaattatagaccaaatatgccacaaatgactctaaaagataataacattgtgtcttacttatggagtgttatacaatagagttcatataattaaattaaataattcttaaaaataaaactctaattctaatatagtgtttttttttttttttgtaagaaattctaatgtagtggtgttgtgtcaactagcaatggctcatgttcacaactctaaattgtaataccctctcttcgattaaaaacattaaatataacttaaaaatcctctaataccctcttaacaattctagtacattttaaattgtcaaaaccccaattttatggactcttcaactctatctctatcactgtcattgtcacataagaaataaaaagttcaaagcaatggtctccgaagatgagaaatgggtccaattctattcctcaaatcatcaaatactgttagtgggtgatggagacttctcattttcttcgagtttggctcgttcttttggctctgcttctaatattgttgctacttcactagacacctatggtatattcaacacccttttctcttacttatgtccttttcaaagaatctatttgcaatgcatgcgtccaattattaagaaaagattttgattttgaatgatacgtgtttgtattctttttcatttggtatgaaactgatcacgttgttgagaatcccctttttttcactagagggcaatgaacatgtcgttactattaaatatggtttgattgtacaagattctttctctttatttgaatacatttacgtcttttaattggattaagaatattttcatctctgttaacttgttcgggaatccgaaaagatttaattgcaatatagttattttgtatactattttgctttttttagaagctacaaactcatattgtttcaatcaaagctcatttgggttttttttattttttttggaagggcatttggtaggttcatatattcctaattcatactgacacacatttttttatgttagtggaactcaatctttctcctttttgtactatttttgttgacattgagtttttaaatatattatttatgatggatgaattattgtaagcaatttatagtagtataatctcatatataaagattgtaatgaatttttgtgaacacattgtagagtataaaactaaataattgactttaagtttgagtttattatgccaagttacctttaatttctttagcataatcctatttttgttttttttttccctcccaagtagatgttgtagttaagaagtacaaggaagcaaaatcgaacttggaaactttgataaacttgggagcatcccctatacatggtgtgaatgcaactatgctgaagacttatcgtaaacttagaaatcgaaagttcgatcgcattgttttcaactttcctcatgctggttttggggcaagggaagatgacagcagtgcaattcagtaagttgttttgattacatttttcttatttggcttggttttggtgagagtatgcttgcaatatctatgttattataag

SEQ ID NO: 26216 - DNA, 3035 bp, Cannabis sativa
tccatcctcctaactctccttgaaactttgctcactactcaaaatcttggtcatcttcaaaaagccttccaactctagtttttggcgctagttatggcaactaaaacttccccccaaagttctaaattttctgtggagagtatccacaaacaatcttctaacaagatttcaactttcaacaaagcatatacctattgattctagttgtcccttctgccttacagctcctaaaattgctttacatgttctggttcgatgtcactttgctcaaaattgttggagcagggtccaagttccatctgtagcacctgatgtgatgatattttccagctggtttgaggtggggttggaatcatggaacacagtagagattattgaggctgttatgatctgttggtcaatttggaaacatagaaatgacctagtttggaactccaaatagctagatgctagtgaagtggtaacagtggctaaattaaactatgttgacttgtttaatgctcaaaagaacgatgttactgctggttatatcaatggcccgaatgtgatgaatcttgggcattggactgcaccaaaattcccatctattaaagttaatgttgatggtgcacttttcactagtcagggtcgatatggcgtgggtttggttgcaaggtttgctgcttgtattgtgttgcaagctaaaatcttatctaagggaggagctttgcaacctcatgtcgtcgaagccattggtatcaaagaagttttatcatggagtacaactaatggatggacaagcgttgtagttgagtcggattgtttacaagtcatcagtgatttgcaaaagcctaaacatatggtttctccttatggctatattctttatgattgtatgactttaattgctgattttaatgttgtttcttttaattttgttaaatggtctgctaataaggttgcgcatgttttggcgcgatcttctctttctgaggttgatcgtacttttagtagggacttcctaccctctgtaatgcatccttggttttggataatttggtttaatgaagtttaatcattattcaaaaaaaaaaacattcctggtgagaccttccataattttcttcatctctttcttcatttaaaccatattaatattaattttaatattattaaatagatattttaaatttctggtgaggcgcacgatagcattcgtaggagctagagtccatgaaagtggtataggtataaatagatgtatatgtatgtatgagtggagaaaggtcatagtttgatttgagtgaagaaattcaagttgaagaaagaaagagagaaaagccctaagcactaatgcgaccaatccaatggttaaggttacaccttttcttacggatctttattagttcaccatggcttacgcttactggaaagccgacaagcataataagcaagtcgtgtgagtccttttctttttctatttggtcaacaagaattgtttttggaatttttgtttggtaatcgtgaaaccttttgtagtttgaagttatgaaacaaatttactagtttattttgttatgttctttgccatgcaattttttctaaaagagtgatcagaatcacactatgacaatcgtcgatgcagagaaacttccaattggacgaaagcgacttttataagaccaggttatttcgaaaatttagacaaaacaactcgagaccaccttcaagaggcatgtgaaaaaaaaacaaccaattggacgaaaactacctacaaaatagatatagacattggattagcacactatacaacgataatattataaatttttaaattaaggaaaaaaaactcaattattattttaataagaaaaacttatcttttaagctttttttcactcaacatgtcaccattgtagagctaagtcttcaaagacagaaatatattagtcaattaacctgcaccatacataagatttgatagattaatcaaacttagcaaatcaaaatcaactaaaattaactattttgccaaaaaagtaacaaaactcaattaactaacaacaaaagataaaaaacgatgatataaataatagaaaaattcctccaaaattgttaaaatataaattaaaacaagatttaaatctgtgaaaattgatagtagcactctttgaggttgtatccatgagcaaaacgagccaacaacatactgcaaactagccaaaaaaatatggtacaaaaagccaaacaaaatggcacaatcttaccaaaaaatatagcaccaactaacccaaaagtgacacactatatctaaaaatagtagagatcttatcttaaaatagaaagaaatagtaaaaaccactaagatacctaaattaataaactaaaataaacttaataaaaatttgattgataattaatataattttgataatattctgataattaataaattgctacctaataaaagaatatatatatataaaggaaaataaaagataaatttcttacaaggagactataattaattacataaaattaaatataatctatcaattaataaaaaaattaaaataaaattacaaaactttcctaataaatctaaattttgaaacaatacaaataaaacataccaaataattatttattaagaataaaaatctcttaaaactaataaaactaccaaaacaaaaataaatggctaattaataaaagcataatttactacaatcaatcacaataaaacattgtaacacaaaaattgttaagaaataaatatcgtcaaaacaaacaattaagataaatcaatatatatacataaaagagaggtatgagacggtgacatgacactctcaaattactctaaatgcttctatctaatctctccttgcttttctcattttttaattttttagttgattaaaaaatatttaattattcatatatgccgaaaaatctttctccaattatttatacacattaaaaatacacactataaattcttaaaaaaaaaatattataacaaaactaacatataaatgttgggattttatgcc

SEQ ID NO: 26217 - DNA, 3889 bp, Cannabis sativa
  modified_base (1890)..(1902): a, c, t, g, unknown or other
aatgaaattatcttcattattgttccatatttcaaggtatttgtttctctcattattattattattattattattattcctagctagtgggatggatatatataattagtttaaacatattaaaatagtggcttctgtattttagtttatttatttaattttactgtattaattaagatgttatttcatgagaagtctttctaaatgaaaaatgactatatatatatatatatgatcaagagtttaattaattaggtaagagccattactaatttggtgagcaaattttagtaatcagttaaaataataatctacaattaattcaatcggaaaattccctttaattcgtaaatccaaatcatgatattaccaaaattaaggcaaggtatgagaaaccctagatcagaaagaacaagtaccaatgaaaatgtctcacaaagatatttgtacataaaataatggcacataattattaattaacaattccaaactcattcccacaaagtgggtttaattagttcaaatatatacatatttttatgttgtatgtacgttaaaataattgagtctaaataataatgtcgttcttaattggtgataagtagaatgatttaagtttttataaatagtttaatatttttacatttaattcatataaattaataatattctccaataatatcaaatgttccattcttcaaatgtaaattttggtcaaaaacaaaagtaaaatgcgaagcgtctttgcctttgatttgtaatttatataaccaatttttatttttataatcacaccaaatatattatttatccaattattaaaataatatcaattacaacatattacgtacagtgccaacaaaaataatttaataaataagaagaattatacttttaaggaaaaaaaagaagaattatatgaaatatgttttattttcttccctataagtttggagaaaataggattttaacattgtacgttttatttatttggcttttcttattattttttttttttgaacaattggcttttcttattattatgttcagatttttgcatgggaaatattttcacatattcctttttatttatttattattattattattataaaaaaaaatcatgtggcggtaaccagttaccatcatatcaatgacaaaagtaagaaactgataatggtaactggtaactaattgcaaagaaaaataaaagctaatatataagaaacaaagaccataaaagtctttaaaaaactgagaaagccatattttcgtagcattatttatttaatcattttataaaatctaagtttaaaatttatcatatttttaaaaatttgctcaaccaaatttggaaattaagtaaacaagttttgtaatataatttttataacatatggaatggggtaaaatatctaataataatatcatagatattaggtctattatattgtttgatattccttaattaagatcttatggcatcacatactttttaattttttgctaagaaaacaatgagttttatttaaaaacactataagttcactgatcacgcaagatcgatgagccctagatcctcacccctaaaaacttgcagtatgagcaagcccggcccaaggcccatcaccttggttcaaaaatttcttaagcctattttgattttttttaaaaataccatattttgatttttaccactatttatcttaaaacaattattttttatttttcaaagtttctttttaaaaatatgtatatgtatgtgcgattctacaatgcactcccatacaaggaatgtaccgatgtaccctatttgtttcgtattcaagataattttttagtctaatttttttcctagttatatatgttatagttatttaagatattctnnnnnnnnnnnnnaaatttagaataatttataatgttaaaagtagtgttcaaataatttatttcacacgtgtataaaataaaagagtcacgcatgtactatttgagccctatttttggcgtgttgaattttttaaaattttgaaatgccttaaataattacaacgtacatgatcataaaaagacattagacttaaaaaaatttctggatgctgaaataaatgggagtacatcgattaacccattttcaaggggtgtattgtagaattttcgtagatgtatctataatattttaattttttttcacgtatgtatcaaaaatacataaaaagaaaaaaaattccaactgaaatttttgtgaaagacccccaattagctttggccgtgttctctccatgagagataaatctccattcatgaaaagcttccatattattaaatgatcatccttattccctggcttaaaaattatacttaagagaaaacaattgtttcagtttcttggagttccattgaaaaaaatccctatagggagtaggccacaacttcacttgggaatcttctacattaagcgtccttattttttttttaatctaaaatggagctggatgaatacataaaagtatattatataaaaattttagaccatgagtttggttgggccttaggcaccatcctagaccgtcttagctcaaggctggcctgtcctttctccttaatgtggctcattgtgcaaatatttctaagtcacctctatagaagtatttgttatgtgagaagtgttgaggtgtgagagtatttaaaacttggtatattttttttatgtaagagtgtggtgggtcccacttttaatgggtaatatgaaaacctttccatacttgagttttatattctttcacatgtgattcacttgctcgcaccttgtgcaaaccataacttatataatggcatgggtaatatgaaaacatttctacagtcgagttttacattctcctacatgtgatttccctatggaccatgagattactgtttacaacattcccagtatgctgcagctatttcggaaatgcctgctttgtcttttgacaatgatcaggtgaaggtattgtttgatggctcctttagtcgtggtctaggtgctgctattgtggttgtgtttttatgcgtgggtgtgctatcctaggcctccaaactagtgttgtaaatatgggtcagactttatttgacacgacacaaaatcggtaagagcttgaacagcatgagcacgaccagatatgaaaaaatacggacttaggcacgacacagcatgatgctacatattggcatgatatgtcacgaaaaatatgtacttaagcatgacacgacactacaagtatcagtgaaacagcatgtaagcatgaataaactaacctgaaatgcacgacatgagacaagtttaaaaagcacgacacgactcatcaaacaaccttataatttaataatattagatgtgtaaataatttaaaataataataaaatttaaatataacattaaatattataaatctataatcaaaattattaaaaaatatgaagtaaactatgaattcgaacccaaaacaagctgactcatttaacaaaaatagaccagtacgagcaaagcatgatacaaaaatactgggcctagggttgtgccagatttatcctttaaaaaaagggaaatttacaccacttactgttttttcctattttattttaattttactgctataaggaaaatattacatttttactgtattttttatactatgtgtattgttttttttatttatttttttttttacttttttacatgtcacaattgcctatcacattaaataaatatatatatatatatatatcatataaactgtaaaaaaccgtgtgggagtaggtttctttttcttttttttttttaaatttttttttaaattaaaattatattatattttaaatgtacaaaagtgtgatgtgacttgtgttg

SEQ ID NO: 26218 - DNA, 4896 bp, Cannabis sativa
  modified_base (4870)..(4870): a, c, t, g, unknown or other
tggccctcaacaccttgagacgggcctggttggagttcattttttaagtttcactcccaattttagtaggaaaagaaatgttatcatggaaatctgtccaagaatgctaaacccaattgattacaccattgtagccggcctgagcgtcgaatctttcgtcggtctgggagtggaacagttcgagggctaatgactctacgtctcggaaacgggttgaatgaaggtttagaaagtattaaatcaagcagtcgaagacctcttgcattcactattgaagatgatagtgaaagggaagttctctggaaaacaggaggtgttggtttgaaacttgaaaatgagtattttgagagtttggggtgatgaaaaaaggagaaatgggtttggcaaatccatttatacttcagtagagatctttgcaatttgaattggatgacatagatctcttcttccaaaaagtacacttttatccaatggataggaagttgaaaaattggcatgtataaactcaaccttgtcgtttattcttcatcattacatgcctcgagtgttgtatgcattaaaggagatgtcatttcaattgtcctgccatcattgcaacatctcccaaggaacgcgcccaccaacgcgtgttgttaacaatcacattaaagatgcctcatgcgtgccacgcttgtggtaccttcaatttatggccctttacttgatgacagctcacgagatatacatcaacgatcctaacaatcacaacatgccaagaacttctctccaataggcagaagaagactgtaagctctcagaccttaaagagccctgagagcttgggagtaaatattattcgtgtttctcagcatgtgacatgtggcacgtaaaggaagggattgaccaatcgtaatcccgctaattaaaatcccctattgcaatcctatcacggagaaacctcacgaaactgacaagtcaaggttaagggataagcggagccaactcgccttatcctagcctcccagacatggaaggcatattgtctctcccaaacccacaatgttctaaatgtggaagcttgcccagctgatacccggatggatactcgaagggcctattacggatgtcaaccaaccgagagtgtcgcggatgtctactattggaataactcgtttcacccaatgacatttatactttttctaacacaagatcaaatcttaccccctatgtccacgcatggtagtgcgcacacctcttccacctttttgccaaacagatatttcagacctctacttttaacggtgaaacctttggatggcacgtgtcctctacttttaaaggttaaacctttaagtgacacgtgtccacaacgtacaaaatggtccctaattacctagttgcaatacgctcaaggataattgtttccaagggacccaatagccagctctcttttgcatgtaatttacccaattagtgggattttagcagaaaccctaggcagatcatgagtatgtccatactcgctatttagcctataaatatccttctatttccatactaaggggggattagaaccttacatagctaaaactctgccaatattactctttgtcttcttcttcttcaagagaaactaagagtacaaaaatagagtttcctataaaaatattctaaacacatcaaatacgtccttagaggctaatagactgacttgtggactaatgttaattaacaaatgaactacgtaaaatctcaatatctttattttctacattttattatttctttagttcactaatatttagtttttgaaaatctcggtaaacactaaagtagttatcaaacaaaaatacaatttaaacatatttattaattagactcacaaagtgtcttaattaacaaataaacccttatttattttttcttctcaaaatgacccaaactaagtgaaaattctcaaataagacatagtctattcgtgatatctaattgacttatcatatcaactaattgagtctagtaggtgataatatcgttgataatgcggggaccatgggcctataaaattaaactcccaataagtagatttaaaatttactaagtaaatttcatatcctattaattcattctggctccactattgatttagaattgcactcttgattatatagatttctatctatatatccaatatagatagactatgaattatccattatttaaatgtaattaatcaaatgatcctctatagatgatttatatcgagtatggataaatttattattttatccttcaatgtattttattcttaaaacacttagttccttataaatgatatttctaaaaactaattcaattaccaaaataagagctattccatttatctcgtttagccaagctctaagaaaactatcatttcacttctaaatagattatagattccatatctacgattaacgctcctactcaattacaccactgagttctgtaagatgtaagtaagggctagtccgacaggtaagctaacaacgaacaagttaaagagcttgactactacaacaatgttaaagcttaactattttaagatcaagttcgattgatctaagattaactatgtgacattgacttagaaaatatataactgtaagtttatgatattctttccattgtcaatatcggtccagtccgatgtatagctaatacatctaatataagtttaattttctaatgtcctgggaaaattctacttatctaagtgtaagcaaccacattgctgattaccacgtcattgtaaattcagtgtactagtaaatcgcgggattaaatagtttgaagcgtataatcataattaatttacactgcgttgacaacactataattatgaatatttatatgttcgggatttagcataatttatatatcaaacatataatcatgaaagtaacatgtgaaccaagttacataaaatgacttttgatcttttattggctagtaaataagattatattaaaattaaattttatttaggacataaaatcctaacatcgtggacctaagcacgacccctgatccaaacctagacctggtctcggcccaagattcgaatctgaactcaaacctccaactttgaccccgaccctattctcggcccaggacccgagcccccgactccgactctaaccttagccgtgaccccacacccaaactcgaacgcagacccaaacttggaccctagaccgaacttcggcctcacaccttggtcccatgcctagacttgggtatgtgagagaaaatgtaaaaaaaaaaaaaaaatatatgttagataaaaagtaaaaattattttttaaaatagaaagcaacattttgatgttttctgatttttatttattttatttttaaattaattttcgtaaactgcttttaaaaaatttgacctaacaccccttattggtttttaggagttgctatctatttttaaaaggtgaaaaaaacaaaaattaagttatgaagccaagcactcctaatttgtttttgtttttgttttgttttattttttttatattaaattgtctgattttgttgatactggttctatgtagtccctccagttatttggactaaacctttttttcttaattttcttttttaaaaaatgaaacatatatcaatagagattatttcataaatacttaaaaataaaaaaagtttacgttcttacaaatcttcatttttttttcttttctacaaaatacagactattattttttttttgttctaaaaaaaatcattactatgttaccgtaatattatactatgtttttgcaacatgaaaacaacgctaatttctaaaaaaaaataaataccagttcgtaaaaatgttaaaaaaaatgcgaaaaataaaagaatttagtataatttaagtactttgtgtaaatttttctaaaattattaacagaatatataaacatatatatttattttattcaattgtatatctctattctaacattttaaaaagaaaataaaagaaattcacggcgacataagtactaaaagtcttatatttgtatgtagcataaagtcaatgattgttttagggatataagtatctcatgtttataaaattataattttcactaattaatatcttaaacagggcacacatataaaactcagattctaaataattagggctggagtctcgacgatatcaattactttcaaatcttcttttaataaattcaaaacagaatttgtacatacgaaacatgatgaaaattacagttttactaatattgagtagttatgccattaaaataactattgagttcatacttcttataaattcaaatctttaaatacttatgtcacaattatcccattacaaaattataacattttcatagaaaacataatttaaaatccaaacagaaagtaacaaatctagaaatttaatggtgcacccattaactattttatttgggagaagttgaagagtatatttttttttatacattaactaaatttacatccatataaaatataattcaaatatacttttttttttttttaatgagtattgtacctaaattaccctcataccctcacataatcaagatacaatttcaaacataataaattgcgttctttagagacgaatgtgtaagtttgtaaaaaaattgaggcaaaattttagttacagaaaaatgaagactattgtaaaatgataggaataaaattggtagaatgattgaaaaaagtggtaaacataatagattttgaaagaaggggtcaaagattcaaaattaaaggtactaatttaaaagaggtatgtagtataattttctcattttttagggattatttcacaaatacacaaaaacaacaaaanaattacaaaaatacgatttcacagaa

SEQ ID NO: 26219 - DNA, 2501 bp, Cannabis sativa
gttttagaagttcaatattaggttgttaaatcaacatacttgtgagtagatctaaggtcatggataaatataattccaacaaaacacacctcctgaaatctcttaagattcatgagaaaagtaagagccagagaggaagtgagagcaagagcaacagaaaaaacctgaagaattaatatggaaactatatgttgatggaagctgcactgaccaattttctgatgcaggtctttccattataacacttgggagaaaatagatgcacgaagaaatgaaatttggctttaaagcctcaaacaatgaggttgaatataaagccctaatacctagcctcaagctggcgcatgaagtacgaactgaccacctggacttattcagcgtgtcttaactagtcgtgaatcaagtcctaggtgaatacacagctcaagttgaaagaattatggcctactcgaccaagatccaagacttgctaagtcagctcaaaatgatacgaaccacaccaacaattgtgatgaaactcgacaccaactatggcagcctccaagaactcataaatttgggatgtatagccgcgacccaatgcttagttaagcatgaaccttggtatgaaagaagacaccacaaatggggatggaagtccgtttgataagtcaggttgaacgccacaaggaatactccctgataagttcgaatagtttttttaagaactcaagaagaaaacctctcaaaattttattcataacaatctgattttccaaagtgtttgcaaggctttatatagccaatttacaactaagaaaaaaaaggaaatgaaaaaaaaaaaacaaagataaattcgtcctcctaatgaagactttcctaataacaaagacagaaaaaaaaaggaaacgaaattaaaacgaaaagttgccaaaagttgccaaaaaatctaatagctatgaaattaatatgatcatcctaaattgagtctaaattgagtctactttgatgagaagcaaaaatttttgatctcctttagtgttgatcacggtctgctctagttttagaatttgttgactaggttgttgagttcctctttgaatatcttggcttgctccgtcgtcactaggcaactggaacttgacttgtatagccttagtgtcctcatcattcccccttcttgaaaaggagttttccgcaaatcatctcatgcatcagaaacgctcaaatctgaaatattaaaagtatcactaacattatactctccaggtaaatcaagtcggtaggcattgtcattgattctttcaagcacttgaaatggtccatatcctcgaggaagaaatttggtacgtctttgggcaaggaaccgttctttccttatgtgtaaccatacccaatcatcggggtcaaaaacctgcttatgatgatccttgttagcttactttatgtattgctcggtccttctctctatgttgagttgtgccctctcatggatttgtttcacagattctgctttctttttgccatctaaattcaaatgcttagaaacagataaatgtgataaatctaaaggaggcagaggattaaaaccataaatattttcaaaaggtgaaaatttagtggcagaatgcatggaacgattataagcaaactcaacatgtgaaaaataatcttcccaagtcttaatatttttacttatgatagctctcaataaagttgataaagttctattaactacttttgtttgactatctaatacaatggtcctaggcataccatgtaatctcacaatctccctaaaaaataaattgcaacattaaaagcatcatctgttttatgacaagggataaaatgagccatcttagaaaatctgtctaccaccacaaagattaaatccctcccacatttactcctagttaaacacaacacaaagtccatcgaaatatcaacccatggtaaactaagaatagctagggagtgtgtaaagaccatttggttgaaccctcgatttaacttgcttacaagtgacacatctactacaaattcataaaaacaaaaatagtttttttttattcaacatcatcctataaatagtgataacattttttattgttctcatatcaattattcactatatatattatagttgattagtattgccttaagtttttgttttatgtggtagttttttttaattattgatttttttaaggagtttttacaccacatactgaaatttttaatttttttacatttttactatgggtagacttttttacaaaaatactgtgtaagttttatatagtgtactgataagttttcatggttgttctacgatttttttttagttgttccactgtatatttaattgttcaattttgttgttttacggttattttataaaagacagtatttttgtaaaacattctgtgtaacatattgggcaaaaatcacttaatgaccgtacacttaaagggaccattctctagttacaattttaccactttatttcaaccacttat

SEQ ID NO: 26220 - DNA, 3524 bp, Cannabis sativa
  modified_base (3442)..(3454): a, c, t, g, unknown or other
ttaggcttgggttagggtatggtcaaggatgtattttagctagctcaacacctaactacttcacttgtcaaaaaaccgagcctcttccttatgatttttttttttaactcaactccctaattcaatactcacaagtacttgatattaaaattgacttctcttgctatgtttatttatttattttttttttgtttactaaaatgggtgtcccccactatcaatattggaaggctttgcttagaggatgtggaaggaaagagttgaacgtgttggaaataactcatatggaatttttcttattaggttcaattctattgaagacagggatgatatcttgaaagggggatacatattttttaataaaaggcctgttgtcatgaaactgtgggatcctgagattaatttcaagaaggaggatgctatggtggtgcctatttgggttcaccttgatgatcttaatctgaaatattggggagaaaaatcccttttcaaaatcattggccaagttagaaaaccgattatggtagatgaagcaactaaaatgagggataagcttggcttacttagagttcttattgaggtgtctttgaagcaaaaatttcctcacactatagaattcgaagatgagaaagggtataacgcaactgtgtgtgtttcctatgagtggaaatctgtaatttgtagtcactgctctggtttagggcactcatcaactgattgcaggaagcttggggtggtgaaaaagccaatggaaaaaccagagaaaactggtgttatagaggctgaagctactgcggattttgaggtattccaaccagttgttaaagggtggaaactaaaggatatgacttctgatgtaacagcagcaataagcaattcattctaggtcttaatgaggaatacttcatctaaaattggtggaaaatatgatagctctttgaagccaagcattgaagaggtaacactaggagaggggggagctccctctcttgtcaatggatagaattatgagttggaacatccgagggatcaacaaccaatagaagcaaaatgcagtcaagaaattgattggtaatcagaatgttggggttgttggcctcgagacgagagttaaggctcctaatcttggagccttatatgttagaattttcttgggatggtgttttacttccaatagtgcttggcatgatggaggtagaataactggtgagttggaatccttttagtttttcatttaatatccttagatgctgcagtcaacttattcatcttcatgttgaaaccatggataaaatattaaagttttttgtcacttttatttacggttttaatgatgaggatggaagaagagagctctggaaggatattgaaaacttggctaccaatgatgcttggattgttcttggtgacttcaatgatatcctaagacaagatgatcgaattggtaattaggctaatcacaaaggatctaaggaattcaaagaatgtgtggatgtatgtcaacttgaagatgttaagcttccgagtaactttttcacttagaataataatcaataaggagagaaaaggatcaattccaagattgatagagtgcttgcaaactaaaattggctggataaacaccctgctactgaagtagtattccaaaatgaaggggtttttgatcattcacctgccatttggacagtgtacaatctgaaccttagtggcaagaaaccatttagatactttaggatgtggtcaaatgatcctaagtattctgaattagttgctacagatcggagagaacaaattactggtacaaatatgtttcaagttgtctccaaactcaagcgacgaaagtgtgtgttcaagaattttaatcatcaacactttgctgatattcctgctgctactgcttctgcaaaggagctactcgataactgttaatgggatatgcactaggatcctttgaacactaaaaaatagcaggtcgaatttgaagtaaggaaattgtatgctgagaaactggatgcatatcattcaattatgcagcaaaaaccaaactgaaactggttgaagaatggagacttgaactctgttgaatttcactactacttgagagctcaaaggacatagaatagaatactttctattactgctgatgatggaaccaggatcgatgatcctaatgaacttactgccactttcctctaatactatctaagattacttggaaacaagatggctgaaagaaagagggttattgataaaatcatcagcactggcccgactgttacacaagaacaaactaatattttggttgctaatttttctgttgcagatgtgaaggcaacaatttcacaattcctagaaacaaagctcatgggccagatgggtacagtagctttttcttccatgacaattgggatctcattggaaaagacatttgtgatgcaattatttctttttttgcattcaggacaacttctcaaagagctcaattctactattttgactttgattcctaaatcaaagtgcccaaacacagttaaagattatcctcccatagctttttgcaatgttctttacaaagcagccacaaaaatgattttttcgagactcaagcttgtgctccctagcttgatggctcagaatcaagggggctttgtccaaggaaggttcattggccacatcattatgatttgccaagatctcatccatcactatggaaggaagtctaccaaagctaattgtaagatcaagttggatctacaaaaaacttatgataccattgaatgagacttcattgaagaaatgcttgtggccttcaagttcccaagttagtttatcagtttgataatgacttgtgtttacactcctaaattctcattgatgttcaatggttcattacatagattttttgaggcaaaaagaggcttgagataggttgacacaatgtcccccctcctgtttgtatttggcatggaatacttatccataattatgaggaaggtgggacaaaagcaggatttcaggattcatgagagatgtggtgatttaaaattgaatcatttaagctttgctgatgatgttcttctattttgtaatggagaccacaaaagcattctctacatgttacaagacctcaagctgttttcactttctttaggtttatttcctaaccctgctaaaactgcattatattatagtaacatgtcaaacatagaggtgcaaagaatcctggacggtttgggatttaagaagcaggagttgcctttcaaatatctttgtgttcccatatgctccaagagaatttcagcagtaaattttagtattctagtggagaaaatggtagctcggattagaacttgaagcactcagaacctttcttttgctgggagatttgttctcattaactcagtgttaatggctattcatgttgggttttgtaccctaaatnnnnnnnnnnnnnatataatcagatttactaattattataagatcagaaattgcttttctttattgcatggttcacatgattt

SEQ ID NO: 26221 - DNA, 1110 bp, Cannabis sativa
aaattccaatatctctttctctagctctttaattatcatatcatataatataatgtgtaccatgcgctttggctaagattctcaataattactatttctttttgtgtacatatgatttgtttgatatataatagtctttatttaaagataagaaataaattagacagttaactgaaatattatggagcaatatatgtttgggagcaaaggacaagaagtggtgcaatccaacactaaaatgcacaaaagaggaaaagaatagatagatagatatattagggtccccacagacacagaccacatgtcacatttatcaaatttgtatatatgtaatcattccttccatcttttcgggtattagcagtactattactctgtctatttcctgggtacatacggctaaccacgagtacttgtactcacttgatgatgattaccatgaatatttatgggttatgttatgtaccaatcacctatttcatttatgttatgtttattttttttgagggaatagaaatatagtattgattttaatataattatttagataaaatagtatcctacaaattaggaagaaaataaaaaaagattctctcttattttttataggaaacatctttcttttccctaacttgttttattttcatttttattttattaatataaaaagaaaataacaaatatgccttcaaaaatcaaaactctataaataaaaaataattatatattctaactataataattttatcaaagtaaaatattatgattgtcttttttaattatgtaaacacaataatatgattttaattttttttttaatttaacaaataacataataaaatattttctattttaaaccttgcagtttattaaacataccagtatagagtgcagcatgactattttcaacctaaaattaaataacattttattctttcctaaagcaaatatttaacaccttgcatttggtaggtatatcgtgaatgaattgattattgattattgatatatttaaaagcaaggataatgctttataaaatggtaattggacaaatcactttcaagtactaattaaatgataattagcggcaaattcaaagtcagatttac

SEQ ID NO: 26222 - DNA, 2684 bp, Cannabis sativa
ttttttttgttgttgtttttgtatatttgtaaaataatccctaaaaataatagtttgtaagagaaaaataatattctgtaaaacgtaaactttttattatttttggaaatttatgaaatattattatattttataatattttgtacattgattcaactctttttatttcagcatcgaaaaaaaatttagtttaattttttttataattgtgtacgttataattgtttaagacatcctttaaattttaagaaatttgaaataatttgcaatatagaaaataatgttgaaactatctatttcacacgcgtataaaataaaagagtcatgctataacaaactatttgaatcatgtttttctgaatttctcaaaattttgcaagctattttaaataattacaacatacataattacaaaaaaattacactaaaaaattcttctagataatgaaacagatgggagtgcatcgatacacaccccttttatgagggtgcattgtagaatttttctaaaaaaataatcaataaattaaatatatgtgaaataaataataaaaatagagaaatattaaaggcactactagtgtctagtactctcctcagtgtcataccgctattggtgtaattaagtatcaggttccatataacttaatttaatagtttttaggaaatgtcactaaccaatcatagaacgtcacttatagaaggtgttgggcactactgatacctaatagtaatgctcataaaaataagaatttttggcggctaaattctcccaactgttatttcacttgcatttaaccatccaaactcaaatcttagcggtaaaaccctccaaataactgtactagtaaaaaatttaaggtgacatctgattaactgcctccattgactgcttatgtgtatagtcttttatacgtggcacatttatattggtacacctaatattattatttaaaaattattttaaaattaaataaaattataaaaataaaaatcaaatatttaaaaaataaaaattattataaattttgaaataatttttaattttttaaataataatattagacgtatcaatataaatgtgccacttatacacgagtgtacatataaacagtatatgttggtagttaactgtgaaaaatagataacaccttaaatttactaacgatagtagtttagagagttttaccatcaaaatttgagcttcgatggttgagtgcaagtggagtgatatttaagagaattttgccgtaaaaaactctaaaaataatattgtttacgagttttagctaaaaggcatcagtagagcctaacatcctcttatgtgtcaatatcgttattagtccaactaagtatcgggtctcatataatttaatataatgaattttaaagagtatcgctaactaatcataaggcgacatgtttagaggtactaggtactaccgatgcccaataacaataatctatttaaaactctatattattaaaagtaatgaaatgtacactaataatttggagaaatattaaaagacaccggtacctagcacccttctatgtgtcaatatcactattggttcaactaagtatcgaggcccataaagtttatgttaggccccgttgttctaccttatcgggccactacctcacattgactctcatattagtatgatattgtgtgctttggggctagaccctcacagttttgtttttgggataagttaaattacccatttttattacacattaaccaaatataactctaaaataattttaattgataaatatcttcttttataatcaaagtaccaaacataacctcacataacttattaaaatcagagttcctaatgcacataatggtgatatgacctataaaacaagtgggcatagagtgtaatttcctttttgtttttttggcaccttctcaaaatgcctcatactaatagagtacatggaacacttttatctaaggcaactcttattttttcaatgtgagacttgggttaattgataccccaataattctcccctcaaaccaaggaccatatactcgtggtctcccctccagcgaaaccaccttatgtcgcgttattaccagcgaaactcgctgcctgactatcacctttgtcaggaaaactttcgacacagatcctaacaccgatcttcatcttgtactgtcgtaattatcaacagaacatgctacctgactatctcaatattaagtagattttcgatacccacaatctcaatatcaagtagttattatatcattttcattttgtccctacatattattcttcaataaaaataataatttttcattaatgccaatttttattgagaaaaagtttttttacctaccccattagtggctgcttcgccactaattacacacttctaaagtcttgtcacaacttcttactttaaattgatcatatttatttaaattactacattgtaatatttggagtaatttttgggtgtatatattattaaataaaaagattataaaaacaaaaattaaaattaagatataagatttgtttcccatatacaaataaaattggacttcttttttttgtctgaatatcaaaaaaagtggttagataaataattactttaaaagtattgttattaggtatcataatcccaaacactactataaaataatgtcttataaatga

SEQ ID NO: 26223 - DNA, 3507 bp, Cannabis sativa
  modified_base (1365)..(1367): a, c, t, g, unknown or other
atagggattgtgctgctgatgactcatcacgatgggaaagttgaattcgctaagtgtttggccattctgtgcgagttactgaatactttgctccgggaatgccagtgaggcatcctgctcggactgtgcttcccgagcaaatgttccaagtggactccacgtgtcaccattctcgtgatgccacgttagagtgaaaaaattgggataacattatatatgctatatatcaatataataaacaacctagaaaaataagagaatagagcgatactttataagagaaaataggattgaacttttcactcactctctctctctctctctctctctctctaattcgtcgcatcccccctctttctttccctctcttgaactcacgcgtaccatacacattactgtggtgtgagttttgtgatcattcctatctcatcacaatatctcatgagtcgaaatatacagtgattacataattgtactcatcctatagaatctaatagcccactctattcctgaatgttgaggctgacttaaaagatagtagtggatccctaatagactacaaaatgtattatctctcttttcattactctagatttaattataatttgttaacgcagatttttgttaactaaattaaagcctatttcggatttgcatagaaataatagtagtaaaaggaaaagaaataacacaaagcttttttatgttgttttgtagttaaaattctgtatagtccatgagtctatcttattagatttttgatacagaactaggtcgttttcactaaaggatttttggtccctttttcagtgtatcgtggtcctatttatagttaataaagaggacggttaattacaatcagacggatatctcacaacaataatcctctgaaattatgggatttgattacgttcatgtaaaataaatgttgttattatatgcaaatcacatagctgtgacttattcgctttcaccgagtcaatgcgtacacagattaaatacactacaaagtgtatcgtgtttggacatctcgctgggaacatagcaataataaccctagcagcgagctggagattttcccatgtctttttgaggttgataatgtaaatctcgttgtttctgcgtttgaagagataatgttccatctaacaatcgcacttattggtaacaaggtgaacttcagcagtcaacatcatttgaatgtcagcttcttttttagagagctgactcgatggaaaagttaatatcattgaaagatttctagagctgattagtgaaagtaccatgagtataccttcccatagcgagatggatgcctcgctatttgttgttccagttcattcaactgttatgcttagtttgtannntgtatattatacactaagtcttttaacatgtctcgtgtacatctcttcatacgtgatgaggttgatgcctctctttgtatatccttatctcacttagactttaaagtcagcaagttgtaaatatactctatcagcttcgcatttaatgagttattccattttaatattttctaatataattatcattatatttgttgattcatattctcgctgtttgacacgtgtcctcctccgaagtgacagccaaatttcaggtataaaaatttccccttaaaaagttctttttactaaaaagttattttaaatgattatagagggtacattgctcataatcccttctaaaaaaatgcatgtcctcttaatttttgcaattttgtggtttcgatgtatatcagattttaatggccatcttttctagttctttttcaaattctacccattggatcaattgtctccctgatctaacagtgattaacccaagagtataaaatgagaaaatgaaccacctttgcactactgttgccatttcagaaactctagaaaattttcaagcttttcggcaaaaaaaccattcccagatttacccgaaaccttgcatgccatcttcgtcgtcaacatttttcctgggagtttcatccgattttatttttgacttcaagcattcgaagggatcttcgcacaatttgttgtttcgtagattgcagagacgctcatcgtccccaaaaccaactccaaacagtaagcgacttttctcctgattttcttacatgtttgttatgttctatttctctgttacctcatttggttttagcaatttttagggctgaattgtgtctgggtaaatgttagggtttagacagaacgtaggttttcgacattctccaatttaccaacttctggtttgataaatttcttctcttccatgaatttggattgctttctcctcccagcaatgtcccaatctggttcagaagtttatcgtccaaaagatttagaaatagagtatcctactgaatttgccatcccataaaatcccaaaattccaaaacacaaatccaaattggagataaatgatgcccaaattagggaacacttagtgaaaacccaccatgataatattgctagttgccacagacgcttcttgaaagaaattatagatggcagatgccctttcttgtgagatgttgttgggcctgaacctctcagcgtgtcttcttctctatattcccctttttggctaagcctttgtttttaccaaaggtgacaacaattgcttttgaaccaggtgtcttggactttgaaatgatgtcttccaagacacgtaaatcgaagagtcccgaagaccctagtgtcaccttctaggctgagctaatagagtcaaaggttcgagccattggagactatgtaggtaacaccttgaggacttgtggggtcgaatataggcaagacttgtaggttagatcggtacgtgtcggcgagttcagttgcttcccttcagtgcgtcttacaagcgaaacatccgaggtggccaacggtgagaccaatacaagtggctatattgggtaggggattgtggcacttttgtaaaacaaccttgcaaggttggatggccaactttgcttttattttatctttagtgaatgcttcgtactcttatatttgaacttaatatatgtttgtttgcttgcattttcattaataactaaaacaattatattttgatcaaatggaaaatactttaggaattcccatcactcatattttccttttatattatttaagtagttagtgatctactatgtgcgcgagcagttataatctattctgctttagatttacgagcagttatcaattcagcttcacataaatagttataatctttttttaagcaaacttgaatatactcttaatgatttatcactttgtatattttttattgcttatataaataatttagcttctattcatatgttaggtttaagtgttttttgaagacatattggttctatactttcctattaattatgagccgttagtattcagccatgtgttgggttttgtgtcctaaataaaacccatttcaatataatcaaatttacttaataataaagatcagaaataacattttatgttacatggt

SEQ ID NO: 26224 - DNA, 1578 bp, Cannabis sativa
ttctgttttgctgtagcagaattagtttctgcttctgcagacgcatactgttttatattttcttatatataattgacatttgcaaaaacacggtttttcatatacgacatatatagtccatcttgaggggggtatcaagaatttctttctcctctttcagttatggttgttagtccgttaagttagttggtcctgcttgattatataggcagttggtctttacttttctgttattttagttagagtttattttaactctagtgtgttcaactaactctagttagcttagtttatgttggtatatgtactggtgtactctgtattcattttcattcattcaatcagaataattacaatcctttccctcctcttttcattccgcaatgctaaattctactagtgaacaaatatcaaacgactaaaattgttaagcatatagtttggttatgaatcaatgacaaggggaaacataataaagtataattctgatgttcgaatctcttcgattttcatgttcataatattgtacattctaaaaaataaaacgaaagtacctttttcatcttcagtatttataaaactactattacaagaagtgattcttatgacgatgatcacaaatttgacttgtgtattgtcttttatctaatttcaaggccatatatatatatatatatttgcaagtcatagttattgcataattatatatataattgattaccaactgtttataacacacacccatatagagcagagcactataacgattgattttgtagcattcacaatggcaatttgtcaagaggtagtgggtacatgtctcagcaatccacctccatatgttccttggactatataattaaaacaaataataataatgtacatgtatatataatggcctgtaaaggaaaatataattgataatcttttcaattatctcttatgcattaatttgtcacatcatcttggacatttacaaaatgaaagtcctaatttgaaataaaaattttaaataatttttgatattggtcattcttctcttctcacccattgttctaactcaccattcaaatataactcttaaattaatctatgcaagagagttataaaaagtctcatttaatgctatctggttttttttttttttgtgctataaaaagaaagaaatcattcatttataaatttgagtttctcttcctaaactatttttcttttcttcttttactaagtcaaaatttcccccagattggaaatgaaagctccattctttttgctaactttatctttgatagaattatgtgaaaccaaaaacttttaataaccatccattataggggaaggaaaaatgatttctatttcatttgctttttctttagtttggttgaaaactataaatttagaaaaatactgtttttttaaaaataaagaccttctaataggatgatttttttattattattttggtaaattttatttttaagaaaaaataaataaaaattattaaaggtagaaagcagcattaacaatctcctatttacattactcatatttaaaaatttcaaacatgtttttagatac

SEQ ID NO: 26225 - DNA, 2866 bp, Cannabis sativa
aatcaaaaaccccaatcatcacgtagcattttcgaccatagcaagaaacatcaagaaaaagtttcaaaaacttcatggaatctcaattttcaagcaagaaattgcaaagaggagtatagaaaacttacccaaagtgaagatgcaatccacaaagcttccaagaattgattcaagcttcaaaaaactcctttaatggtgaaaccctcttttgacccaaaatgatataaggaagagaggaaaattttcatttttttttttttaattttatgattcttggggggtttttactcttcactaaaccatacacacataaacccttttcttttgtaaaattagggtcatttcttcctattttgctattatgaccctccactacgatttgtggcaacgaatacttttttctctcttgtaagtatttaaattattttcattgtaagtaaattatttgtttttcctataaataatttatttattcccctttgtaaatgtttagattatttctcttgtaaaaaatttaatttgctcttcctagtgatttatttttgcttgtaaagggaaaattatgattggaatacatgtaaaaatataaaaagtataatgattgcaaaaatattttttggggttttgaaatgtgattctagtataagcatggcatttttagtaccataccactaagtcgtcaacaaccagagtaaagtgcagacttcagaagaaaatttctaccgtatagtcatatcgttaaaaactttaggggcaaatatttacccaaattttgacgatggtgatgtggcaagaataatgacacgtggcatgatgatatcgagactagattgatgaaaaatatgtaaagtcatgactattggcatggactgttagtcatgactgttagaagagaagtctgacagtcacctttcaccctagcttgagcaagttggctacctccagggggacggtgaactaacaccctcatagatgggataaacgatcactgcacacctatgaggttaaaccagtctaagggtagataccactacctctacctcaaatttaatgatatactcaaagattgatgaatgcatcttcatgacaccaaggctacccataacattaaagatcaagtggaaagggtcttgagggtaccaccccgagatgacattgtcacccccttcatgatgtgtcttggggtgtcaaccctaagtattggctactacctcacacttcaaggggagaccctcatcgtcagtgactaattcaaatattcaaatcccgtaagaagctcaaaaatggttataaatccacaaaaaatagtgggatattatcataagaatcgggtttcaaccacctctaaaaactaaggagatggttgaaatatttgcaaagtggtcgcgtctcctgaagcgagaagcatcgacattttcctctatataaaggatcacccataacctgggaaagggatttgagaatttgagtacttagagaaaaaaaaaaaaaaaaaagaactttgccattgttatcttttgcatgcaagagctggttcttgattttacaactctaattaataaaacacgaggggagtagcctattaccgacatccttgcctgaacctctttagattcaagtgtcattatttatatttattgtttatttttttggtttgaatctcatttattacgaatccgcgtcggttggataaaaatccagtcaacactcatcaacaccaatgatattaagaatctcaactggaacctttttggagtatactaatcaagcaattagtaacaaggtacaaaatagccatcttaacatccaactcattagacttaaactcactatacataaacctcttctcaacaacactaacagtgactgtccgatcataaaaatatttatcaacaaaagcattatctctgtttatatacttgctcaaattagtatcaccaacacatagtaaaccagtcacaaccgcaaactcagctaaactaaatctaaaattctcactacaaaacctaaaccacatttcttttatttttctgatgcacctctccctatgtaaagcattatgaaccacttgagattgtaatgcaagaggatgcatgtctaaaaattgaacaaagcaagtaccataaaaaaaatcttacgttgaatttcattcaacttggaattgatatttttaaccacatcgttatcttgattagggaataacatgatttattcttgagtcatttcaccagacttgaaatataactcctattcctaaaataacacatggtatacaaaaaactcatagtaaaattgtgattaatggtgtgaactacacatcgtatgcaagaaactaaaaaaacatagaattaagaaaacaaaaaacaactcatagtaaacatgagcttaatgatgtaaacaactcattatcacaaataaactactgacatcattatcacaaacaaactaacaaacaaactaccttgatagactaacaaaaaaactaccaaaattaaagatacattcataaattaatacattactaccaaaataaactatatattcataatctaacaaaatgacataaaataaaccctaacctaacaacaaagaatttaactcttaaaaaaaacaaaatctagtccataacaccaaatagaatacctattgttatctacgtttctaaaaggaagacacgtggcacaaaactgaaggcaatcattgtattaatgttggctcaagctttcctattcatagaaggctaagctagattcgaaatgggctcaggcccaatggagaattgagactttactttgatttgcaatggtctcctaagatccggaagtctgcccaacctcctgaaatgagtaagggatgaagccctcca

SEQ ID NO: 26226 - DNA, 1718 bp, Cannabis sativa
tatcgcataaacattgcaaaaattataaatcgtaaaaaatatttacactcaattgaattatagaaaagatatcacacaaacattgcataaatatagcacaaaatctcaaaaacatttagaaaaatacataattactattaaaaattcaatatagttcacacaatcctgttaaacaacaaccaacaatacaactaataagtcaatatgttgtcttataaaaatgtcaatttatgtattaatattctaaaattaattctttaaattattgattagtgtaattttaatttgttagaatatttttaagactaatcatgtatttggagtccgttggagggattttagcacattttggtaaaaaaaaaatagtagaagccgcgagctcaattttacaaggaaaaacttaattgcaaatttcaatgacattggaagtagaactgtacttggagctaagcatgtaagttttagatcttgttctcagctttttgaaagatctttcattgttccattccgagttatattgaagaagttaagtccaaaatacaaatctaaatactccacagaaatttttcattagcaagctgctaccgcggtgggcctcagcatggccacggagaagatgcgtatcctaccagatttcaaatttttatctttttttcaaacgggatatttttaggggttacatataggacttttaggatttatttttagggaccttttagctacgaaattgagagataaattcagagagagtgcaagaaaaagacagagattgcggcttcgagtgttctacatcatagtttttttttctccttaaactcttactatttattataattttgattataatgtctagttccgagtagtttctatttagttaagggttatttcaaaatctaagacatgagtttttaatttcattgatgaatgttaatttctaatttccattatatcgaattacttctattctcctatatttaatattatttttttaatcttatttagacaatcgaactttaatctattgtcatcttaggattactattcacctaatagtctaggattttaagtgtgtgtgataaattgtaatttctaatattatcaaaggtatttttaattgtgatgaagaagagaatctaagttaaatgaattatatgcttcattaatttattgcatggattatattgtctccattaaacataaagctttatctaagttaaataaattgcatgctttgtggatttactgcttgtgtaaaagagttaattattgaggattttgccttgattacatataataggaaaattgggataattgactgcttcaataatatctacaggataaatagtttgattggaaaaactgaaattacatttgttactagaaattatgaatgattgttggggttggagaataacctttgactatttatttcatatcatagtatcacatttaatttgctttttaatttatgttattttattcgcataatcaaaactctatttttctaattcttgtaactaatttttgaataatttaataaggatagtattcgtgggatatcgacccttacttatatttatattaaaataattaaaagtattgaaataaaaataatagtaaatttgatacggcatacgacatgcaccaaatttttgacacatatatctaatccaaactcaagctttgtaattaatatagataattaagaaactattaga

SEQ ID NO: 26227 - DNA, 1204 bp, Cannabis sativa
ggatctaaaatattggatgaatccgattcgaaaaatactaggtctaaaatattagataaactcaaattaaacgaataaatatatttaaaatacaatggatatatagaaccgaactaatctaattggatattagatcgattgaataaatgaaattaattgaatcggatttaaatagacataaaaatattaaatatgatccaataaacacccttagttataatatataaatgcataataaattcatctatatctgatcaaataaaataccattcaattatatataatcaaataaataaaataaaaaaaatacttaatttagatcagagacaacacaatagatacaataaatttcttcattaataatatttccctcaaatactgatctgaccttttctaatgcacatttctatatttctgcagtgataaaatatgtaagaataacattgtattatatagtacactattatattaaattatatattatattattttatatttagtattaatttatatatacacaaaaatatataatattttaatatatattaaaattttatatataatttaatataatactatacaatacgatttaatacggaaaaatattcaaaattaaaactttgctaattttttttttccaaaaaaaaaaaaaaaaaacactttttgccaataatatacttttgagcaattagcttatcaataatgccactaagttttgtctcttgcttttcataaagtaaaagggcccaataattatgcaatcgtacatgaatattcaaaatacatttcactatatcaacttttttttttcaaaagatcaatcgataagattaataactttctttaaaccaattatttttcataaacgtattgtgtggacaaaaataaaagaatatttgtggggtgacagaatttcaatacaagtacatgtactatacaaattttacaaattaaggctaaaaaaattaggtatgaattgatgtaattgacacaaaataaaatagtttaaatatgagatgactcgcttcacacatttgatattttttaaataataaaataaaaatcattattaataatacaactatataaatatatatttagtaattcatgttgagttaaatttttttacaatttttttttttttaaaaaaaaaaaggattgaaaaatatttttaaaaatctaataattttaaaaattctaaata

SEQ ID NO: 26228 - DNA, 2879 bp, Cannabis sativa
tgtgcttattatttacaatatattttatataatttgtgtctatgatataagagaaaatataaataaattttgcatatatatatggaatattatgcaaatatgtcatataattaactcaaatataataaaaaaaaatgaataaatattcgtatataatgacaatgaaaaaataatctaatatgttatatagatttgtgcaattattttttgaattaaatattttatatttgtcaaaaatattgtatttatatgaatacaattaaagaatcattgaaatgattattattgatgcaattgaataatgaattttgaatacccaaaaaaaaaaaattataagaaattacatcaaaatatcgtaatatagaatatgcttaatatatacatatatatacatatatgagtgagtattcaattgttatagtaaaaatgtaaccataagatgctataacaggtcactaacaggtaaaatttctatttttagactcacattaattatatatacttaaaataaactaatttttcaactaaaatatttaataaaatcttttcaaaaattaatattggggaggatgctggtttggctcctagattacccgtgtcttttagtaactgtagtgtgaaaggtcgttgggaaacagatattgccttactggttcgaccgatttcaagtcccagaaaaaatgaagagaaccaatatcttttagtttgaacttgctgttaagtgtagtttaaagttgggtattggatgatcattgttgcttactacaataatgtcatctacgtatactaatacaacaaggatttggtgttcgttttgtgaacaatgggttatcagatgaggattgggaaaaaccatctgcaagaagtgtggaactcaattttgagtactatttcctagagacttgctttaggccatagatgctcttttttaagaggcaaactaagttagagggagcttgatatcctggaggaagtttcatgtaaacttcttcttgaagatcaccatggagaaatgcattattgatgtctaattggtgaacattccaattgttcattgcagcaagggctaatttattttttttaaggtgttgaacttggaaactggggcataggtttgggagtagtcaagtccttgtcgttgattgtggtctttggctaccaaacgagctttgaactaatctacaaccccatattggtcgtaattgacattgtatacccatttacaaccaatggatttttgccctggtggtggcttggtgataacccaagtgtggtttttttccaaggcttgtgtctcggtatccatggctttgagccaatatgtgagttgtgatgcttcagcatagttttgggcctcaattacaaaatatgctgctaaaacggcagctctgaattgaggactgagtttgatataggaaagaaatggctcaattaggtgagctgtggaagcagtgtgacaaacacagtcactaaggtgggatggtttttttattattctgccaactttagtgggagattgatgttggatatgaggccatggggtaggagtagtaggatgaattggtgtattggatggaagtatgacttgtgggaagcataggtcaatatttgtgttgggtttttgagaaagaaaggggaatatgttttcatggaaaacaatatcccgagaaatgtatatttagtttgtttctatgtccaacaaggtataagctttcattccatgtggatatccaatgaatatagatgcatgacatcgaggagtgaacttgtgtcttttggaagccaaagtggagccataagtaaggcatccaaaagtccttaaatggtcataagtgggaggcttattgtgaaggacttcataagaggtgagttttttaagcaaaacagacggtgttctattaagtaaataggtggcagtttgtatgatataagactaatatgaaaggggtatgtttgattgaaagcaaagtgatctagccacatttaatatgtgttggtgttttctttctactaccgagttttgttgtggtctttccacatatgagtagtagtgattaatacctttagaggcaaagaaagaactcatattaatttcttagcattgtccgaacgaacaactttaattgttgtagaaaattaagtgcaaattctgttaaaaaagtttatgaacatagtttgagcttcagcttttgtttttagcatgtgtgtccatgtaaaccttgatttatcatcaacgattgtgagaaaatatttgtagctttcaacactaattatgtggaaaggtccccaaatatctatgtgtagtaaatcggaaatattttgtgcaaagttgttagagggaaatgagagtcgtttttgctttgctgattggcaaatggagcagtgatgtttagataaaatagtaaaagaagggtcaatctttttattgaatatgtttgaaatatacattgaggggtaaccaatgcgattatgctattaatctacattattctgaaaaataaaaggggaagattgactcgaatttgccatagcagtagtgttttagtgcaacaaatagagcttaccacaacgcttagatgtcccaatcacctgattctgagaatgttcctatatgatgcacatttcaggtttgaataaaacaaagttagttgtgcaatcaatgtaggcactggcagaaaaaagattaatcttgaagttgggaacatataagacattatgcagaattaattcaggtgttaggtgaacatataggacattatgcagaaaattttcagattaatattaaattaactaggggactaagccgcgcttcgcgcggtgttgtctaatttttgtaatctttatatatattgcaattatattgagtgatataatctaaa

SEQ ID NO: 26229 - DNA, 3248 bp, Cannabis sativa
attattatgtgtagttttgagtttgtcgataggttatcgacatattgtcaacatatgtgttttgtttttgaaagaattttgagattatcaacatatcgttgagactaatactcgggcgtgaatgcaaccgtcaattgaattatcgtatagttttccctgagcaaaaagagttatattttctcagttcaaaaatttgccatattctttgaagcttgggaaagattggacaagaaagggtccaccataaacgtgtctgaaggagggacacaactattacgacccttgagaatttctactattttgggaaggctaggggtatggaacaggcgaaagtgccttttacctcttctcgaggtactagctcctaaagtatcctcatccgagtatgctgcgaaaaacctttcagtgatctcatcctcctcagtcaaaagatctagatggcgaagtgcccaatccaccatcaaaagtttatctttttgcaaggttgccttcatgatctctgcaacactcacgacaatttttttccttgatttctgaaggaggatttgcaagacccttgttgttgaccgggtcagtattttagaaaccaacaatgagactatactcacgaagtagctttgtggtaactaagttactcacgttcagtgcactatccgagattgagttgtaaaaagtgaatttaaccttcaactcttcggttaatagagtctgagacactagttctgcaacaagtggggaaatgtcgttagttataaatcttgacaaaagaggaagtgaaaactaaagagaaagtccttaccaagaattttgaggtctaaggagatatttggcaccctattcacggggaacccggtagaaaagaatcagtacttgctcaagtcatgggcgtgcgacgtaacgctgatgggacacctcacctccagatacttttccagcttatagaaattaactttcagcatattggctcgcatgggctggggtttgaaagcgtaataatacaagatctcgtctggccttgtaggttccaacttccccatcttgcacaacaagtaccatccggataataatttgtaagacagaggtatcagttagaatggagcgatccccactctggcgcagaaattggcaaagtatgtcctcaggggtaggtgagccccacatgatatgtggccacagctccatgcactgaacccttcttgggttgagaggtgtattcgcccaccagggacaacctattccacaccagccctataatattgagaaccccatctttactcaataaattctccatcatgccataattcctggacttattggtactctagtccatctcccaaatggagtcattgtaaatggggggagatgaagacgaggccttagatttacccttcaatgtgggttttactctacttttcgcaatgccttttctacattttttctttggggcgacctcgtgagtaggttcttgtcaaggcatctctacaggtatctcgacctcgatctccttaatatctgcaacttcaaggttaaagtcgtcatcaaggttggccactaaatagaaaagagaaagaaaacccaagaaaattagcacccaatatcctaaggacggtgtgggtactagggaaggcctcccccgaaattacttggagaggtccccaccggaccgtttgctcaaaggacatcgccctcacaaagaaatgcctcgaggtagcaggtcaagaacccacaagacgttcactgaataatccaatggtcagacacccattttcctttaaagctttaatagttctaaatgagtgaacgagtacaaagttggcctaaaaattcctagggctcatccctaccaagtttggatttttacatccattccccaacaaatcatatatacacattcatggtccaacattctcggccctaatcaactctgtcacttgaaatacctcctctaatgcaattgcatgcaaaaaatttgggacagagctcaaaaatacgatcttttatcctagcataaaaccaaaaatcaacaagttcaaaggtacttacttatgacgtgatttgaagaggtgggttgattgctgagaatagtctaaaaattgtgtgcccagttgataacttggttacagcccacttaaatgttgaactcctcgcttgactgggggtgatacagattaagatcgaaagctggtgcgtccgagaaatagtgtgctcgactttaaaaaagacaatcgaaaagaaaatgaaaaccttcgatcattcactagtagggttgcgaagcaccaacgtaagatattttccacgtgatttctgaggaagagattttggttcgagttcttagagactaatgaagtttgaaaaatgactaaatggtgaaaaagtgaagactaatggcctcgcttcaatttacatctcaatccaaattgtatcatttgaaattgacgatccagatcaactccacaacgaaccctagttcatctgatggctagggagtgaaagagacaacctttaatttctctcaccaaaatcgaagcattttccatcattatcagcgttgggtccagtgcacatgaaaaagagttatcaagtcaccactttgctgacatacacatttctccacggggaacgcatctctcaagcacgtgtcacccaaaaaattgagaaatatgcgacacgcggataataccaagtgtgctcacgaaaagcttctgagccttatttttattaaaagccaagcacgaaaggtgcatccacatgatctagaaatacctacgtgtcacaattacactctagtaatctagaagaaaactacaagcttccataactcacaaagtctaagaagcttgggggtaaatgttatccgcgtttttaggcggaagacacgtgttaatatatttgggattcaaaagcatccggagacggccaaggcttgctattcacccaagagacatctgaaaggtattcgtaaaggttagcattgataccagttgaccaaaggaagtcagaagtcatccatgtagaggaacccgtatgacctcaatgacgattatactttttctgacacaggatgagatcatgccctctgtgtcagaccatagtaatgtgtacgcctcgcctctgaacatacccttttgcttgacagtttgtcaaggcatctcctttgcaaggtgaatccttttggcgacacatgtccaagttcgagcatttattctacaaggtgaaaccttttggcaacacgtgtcttgtaccatttg

SEQ ID NO: 26230 - DNA, 4007 bp, Cannabis sativa
gtgagttgtgagtggaaaagagaagaatgagaatataaaaagggaggaagaaagtggagagctgaacaaagacagcgcttaatcaataataatgcttgagattcctcgaatcgtttaataaatatatagagatattattattattattattatattttcgtatacttgtagtcacgtatgaattatatatatacatgtacaactattaatgtgctaatatttagcaaaaaaaaaactataattgtgctaatggcggtgtgaataattggtcagccttctataccctctgatttcgtagaattttcttctaataatcagataaggggaggcgcacctaattgcgatgtgacattgctacacgtgtacaaatagggtcattttgggatctggatacgggttgaggagaatgaaattacaaataaggacatttgagttggacatgtgtcggtcactgggaaggtagttagtaaaacgtccttatccgaagccaccgggcgtttaggttttcggcgttatataatattgtctgtaaagaagcgtcgaagctttcacaagtctgtattgcgcgttaaccttttcaacaactccgaatcccttgattttaccaaattaccccgctaatttttgaaaaaataactaaactccgcacaaaaaatatgatgtacgaactaacctgaccgtggtatacttccgttttgacacgcggcatgatatcattggctgacattgttctgattacaaaattgccaagtcaaaaattcaagtttagtacacgtggcgtttcgtacagctctgattaagacgtcatacgagaaacttcttggtagtcttttttaacattattttattttatttgttacaatattttaattagctgtgtgattagccagccttattaaacacatataaataaaaatatattaataatgtaaccgttgtaaatgggaaacaactaacatgttcatatggactgattaaaatgtgtattgataataattttattggctttaataaaatctcattgtctttcttgtcgtgacctagctcagccctgaaggtgtatggaaaaccacataaaactgcatttgtatgaagacacgtgtcataaaacaattgtcaggtacacgtggcgtaaagggggtgacagtggtgcttattctctgttataggaattaggaaatagcaaattgatttagtttatcaaagtgttggttgtttatatagatatagtatataaacatatagatatatagatatattattagtagaatgaatgaataggagctggcaaaagctggcaaagaaaagatggttagatagaagagggtcgtgtgtgcatgtgcaactcacataataattatgattatttttgtagttggcccgcataatggtgttatgctccaaaaagttgagaaattttgtatttgtagattgacatataatgtagtgttttttatttatagtgcaccccatattgttgttttcatttgttttactttgtcttcttttattatttatttttctctatctccttttcatattgtcattaaaagaacatataaaattaatgaatagcaatttataaaaactaaaacactatgatctcattggttatgaaagcaataactcaccataatgatctagtctccgaatatttgtattttggtatattctaaattttattcattgaaatagaaagggcattttgatgggataattgcaaaattacattagtattttaagataacttattattccacccaagttatatcatatatatatatatatataaataattatgttatgaataattatgttatgatgataacttcttttgttgcacatgaatcagatccatgccatttgggtgggtatctataacccacaagaaacttatatagtacaaagtgttttgaaactttgttcaagaataaaaaatacgattaaaaaatattttatcttaataaatgttagatttaaaaattaattttctagaatcacaattaaattttattaaattatttattatttctataaataaatatatttaaaagattttaaaattttcatttattattggataatttatatttagaatcataattaaattttattaaattagttattcttaccataaatattttttaaaattttaattaggtttttgacttttaaaattcataaaagtttttaaaatacataacaattatatatatatataaatatatatatatatctatcttttgttaaatagagctatataaagaaaattattaatttaacaatatttttttattaaaattaaccgttaaaactaacacggttaaattaattaattattaaattttttaaaaaataattttaaatatttaaatttaatttatgtattaaaatataacatagataattatttaaaagtataaaaaataacagtttttttatatataaaccttaatttaaattttaattaattaatcacattttataataaatttatttgattcaaaaaaatatatatttattgtttaataaaattagttagatatatttttttataaaagaattagattaaatttaacatatttaaaaatataattgaattgtatctgatttaatttttattatacacaattgcacattattaatacctactatatatataaatatatttacagatcgattccttaaatatatatacatatttttgtagatactaatgttattgttatctctaataagtaatttttatttttttttatgtttttttattaatatggtggtttggttacatacaactcccactcttttttttgtttttttttttttgaatacttgcataattatattaagtgccaaagaagttagacctcgtggtcaatataaattaagctaactcatatggaagacaaatctaccataccagtcacattatagctgaaagcccatttagctacattatgagcaacaaagttacaaaatttgaaaataaacaaaaaattacaactagttaataggtttgagagcattttacattgaagcatataattattaataccccaaacagaagaagttcccttcagagtattgatccccatttcagagtcgctctctataatcacaaaagaatgcttttgatgtatcgctaatttcagggctaacagacatgctacagcttctccaatgagagggtcagagaagttgagaatattgctagccacccccaaaatcgactccttatgatctcttgccgatctcttgccaaggccaccacacacattgagccgctaccaactttaacgtcacagttgattttgacccaatcgtccggtgaggggaaccaagtaggaggcgtgataagcatcggcgtaagaaacgaacaagggccaaaatctgcataacatgtagaaatatagtcaatacagtgcttaatgttacatatataattattagtatgaaccttatcgttctgggttttcaaatagtgtccactataattgaagcatacaaaaacacttctttaacctccactcctttttccttcatgctccataagaatttgacccaatctcacattcaagtcccagactctggcactggcatcacacccagggggaggaccttcagaggtgaaaagcaaagttacaataaaggaagagatgttccatagtttcctcttcctaagtgcaaaaggggaaagacacatcctcaatctgtattcttctatccagagttgacctgatcgttaaggcgtttgagagaatactccaccaaaaaagcttatggcgttccaagattctagaattccaaagtttgttcaaaagagcgggagccaccgtggtaggtggtgctcttgtcaaggcctgagcaagacatgcttagtccaaattcatttatcactgccttggcccctggcctaccccctttgagggtattgtcggttttctttgggttaaacgggaagttgagcttggagacatcctaatttccattatcagtaagtaggtccg

SEQ ID NO: 26231 - DNA, 1131 bp, Cannabis sativa
tttttttaaaaaattataaatatttttaaataactataatgtagagatcattaaaaaaaaagtagattaataaatatttatagatgccaaaacaagtagaggacttatcaaaacatgatactctacacttacctaaaaaattttatctcaaatataataaaaatcttagaaaatcaattatttactaaaaccatataaaaccttaactaaaactagaataatatactaattggccatgatttacttatatttattaaattataaccacatagataatattaaatacaagacattattatactaattttgccacaacaaattgagaattatttacaataattttttgcataatctgtttactaagattataattaatatttaataacaagtaggaattgataatatgcatggtagcttgattaagaaaaatccaaaataaaaatattagaaaattaaacaaatatgatttaacaatccaaccataaatgccaactaacaactatagcattgatagattaatgggaactaatagaatcaatggtcatgatcaatcataccattgttgctcttaattttgtaaagaaattaatgaagagagtaatctaaactacaaatcacaattattaaagatgaagaaaatgatagctaagagtatctggaattgtctggaaaggttttgctcttggtctggccagaaagtaaataagctcaaaacctcaattttctttagtaacaatactcctgatggaatgaggagagggattaaggaagcattgggaattaatacgccagaaggggctatcaattacttggggctgcctctgttcagatctcgtcagaaggatgctgactttaattttatcctggacaaccttacttctaaactgcagggctggaaggctaagaccttgtcaaaggcaggccgtgcgaccctcattaagtcagtcggcctggcaatgcctatttatgccatgcaaaccacaaaactttctagtcgtatggtctcgagaatagatggtttagtccgagattttggtggggttttgaaaaaggtaatcatggtcttcatttaaaggcttgggataagctgtgtctccctaagtctttgggtggattaggttttcggaaaac

SEQ ID NO: 26232 - DNA, 2081 bp, Cannabis sativa
aaatattaatagtcccaataaggattaaggatattatgtttacttttaggggacgttaaccctggacattagattttaacctttgagagccttgttgtagtgaatcaatatatttcattaattaacatctccattttttttttttttttttgaaaaagcatctccgcccttctttggttaaataaacgataaaaagtaacatgatatcaatttcccaacaagaaagtcttacaattcccacttttgatccataaatcttaaattacactttagattactaattaatctaaacgagtaaaaatctgcatatacatttaagaagatttgtttgtttgtcggaaatcctaatctcaaactgtgaaaaaacccatgtcctattgccttgtgtaacgtggtattttacttaaaatgcaagtacacggctccttgaatgaaatgtcttacaaatcacacgatcttgagccggtaatataaacgttattgagtgccattttcaataacattgttgaatgtttgagatgcatattgtctcaagatttgtactgttcataggaccaaaacacacataccaattatgattatattgtaaataattgggttagtatattaataatatttactgtctataatttagagggagagtgaaagagccacatacatgggtttccctaatttggggcaaatgtacagtaattaccaatttgagaaagtcagcaatttgaccaacttattattctgctgactcaaatcaaagctgatatgggttttgtccaacattgtcaaaacccttcagattttgtctacaggttgtcgaacataaaccacaaaattacagtttacatactcgtgctttgaattcgtaaaataaatgagaaataaaagaaattacattcatttggcctaagatattattatttgagacaaagaatctttactactagctcttagacctttataagccaaggtacgtagggttcctttcccattctacatgtatacaaagataataaatttatattaaatatactacaataatttggaaactttatacaattggatcatttaatattatttagcgatgaacatggtgtgttttgctactgatttagcaaacattaccaaatacattaaaaattacgtaatagtaaaccaaggaatctagactcagtatataataccaaagcttttgatccattaaaaatgtaaatttatacattgggtatggaattaagaagctgagcaggcaacctagactgctgtatctagtttcgcagacatatatatatatatcgtttataaaactaaatattaaggacacagcaatgaattttatatcacatatatatagtaagagaattgggaaaaataccactagttcctagtattttttgtagtgtcatatcgctattagtgtaattaagtatcaagtcctatttaactttaatttttgataatatcaataactaattgtagggtgtgacttgtagaaaacactgagttctgctggtgctcatatagtaattatgaaatataatccttattattaatttaatctctaaagaacgttcggtagccatgcaatgacgaaatataaaaactgctatatcctctatctcgatctccgcacctacagctaccttaattaattattacctaaataaattaaacaataatatgtagaattaggatgtgtgcacagcgagaaatatttaatacatggtatggactgagaccacgcggttccggaacttaaattaatcaatgtagagaatcagtaactttagtgaaagtttggcacaacaactatttgaaagaacaaaaaaaaaaaaaaactatttgaaggaacaatattcacatcaattaaattacgatttgaaaatatgtcacatatactaattagtctcctccgccaatggattggatcaaggtcaacattgtgatgtggctgtgggaagatcttcggtgtgtgctgtcgccgtagccaaagaccaccagagtcgtattttgtgggtggcttcgtgaaagttgctttttggttaacctttaattggaaaggcaacagtttgtctcttggcactaga

SEQ ID NO: 26233 - DNA, 3601 bp, Cannabis sativa
ttgatcccatttctagacttggagagtatcctaagaaaatgcatttgttttgatctaggttcaagtttacctgtgttttgatgcacataagcagtgcattcaaaggtcctaagataagataagtttggaattttacctgaccacatttccttaagtgtcgtaaagctgattgcactagagaggcttttatttattaggtgtgtagttgtcattataacttctccctagaattcttttggcaatcctaaactcagcaaattacaccttgattttttcaagagtattcagttcatccttttagcaacttcattctgttgggggttgctcttaattatgcctgataatatcttatttgcacaaaattggtcaaatatctcattgcaaaatttcaaatcattattagttcttagatttttaattctttttcttgttaagtaatctgttacattcttccaagttttaaaggcattgaaaacatcatttttgtgtttcaaaacatgcttccaaaattttctagaatagtcatctacaatggagagaaaataagaacttccactaatggtttgaaccttctcaggtccccacaagtcaacatgcaaatattccaaaatatattttgagttatgagaaccttttccaaaactaaccttatgctacttatcaaatatgcaatgttcccagaaaggtagagagccaattttatgcttaccaaacacattttgtttgttgcgaacatgcaaacttttttaactgatgtggccaagcctagtatgccataacacagtcttgtcttatgtttctctagttgcaatagatgccactccaatcacagcttctcctttagatagtacaaccctccttgcttttctcctttcaacataaccgtggctccttagcatatttttagtgttccattgcagcatttgtattcataacttgcatcatcaaactgacttagtgaaatcaaatttctagtaagatttggagcatactttgatgtctttgatcactctaatagtgccatcattcaacctgaattgcacatttccaattccttctatggcataggtcttgccatttccaattattactttcctattattttggattttcatgtctctaatctaattcttattgtttgtcaagtgaaaggtgcatccagagtctatgatccactcattcttgatgatcatggcagttgcagaactttcaggtcttgattccactatgagcacttgaccatcctcactgcaatcttcactgtaatttaatattttaggatcttgatcattcggatcattgtttcttggaccctttcattttcctttggcgagttcacatcagtactttctgatatggctaatcttgcaacaatgataacactttctgttggtcttgggtcctctagattgagacattcctcttcatttagtactgtagtttctttcctttactatgtgatggtgattgcctcgatgttgttctcttcctctagaataatatgcctttgagttgttcttttgaagcttaccagtttgcttaagagataattcctttgaatatatggcacctattacttcttctagcaccaaggtgtctttagattagatgataatattcttgaatttctcatattgagtagagaatgaattcaacatatagattgccttatcttctaccttgatctttacttctaagctattccaatcggaatccaacatatagaactcattcagataatcatttagaaacttactctcatccatcttgaatccattaaactttttttttagatacactctactagggcaggctcttggtcatgaacatttgttccaatgtaaaccacattgagttgttgtggtctccttcaccacatttctcaaaatttcatcttcaagacacagaatgatggtgttcttaaccttcttaagtgtgttgttccaatccttttgttccacacttgccactttgattgcatcctttgatagtgctttgttcaatccgagattcccaagatgagttctcatctttctctccataagcataagtcattcttcccactgaatttctctatgtccaccttgaccaaagtcatcttcttggtccatcaagacagtgctttctacaattttgttcttcgacttttgatgaatcttggttcttgaaccacacctctgagattaacgagctctagcttgagctctgataccactgttgcgatctcagtcgcaactccaatctcaacatcagtttgcacacactaaacaaacacacacacttgcacagatttatcaagaacatacatcaaacatataaatgacataaaacagtaaatgaacacaatcaacttaaagaggttcgaacttcctcaaataattttttggagcctaatccccttgtaactcccttgattgtagggttcaattcttagtcattgactatgatgtctcacagagattacaaactaagagcaagccttcaaaaatggctcctcaacactctactctgttgtaatataacttcaattacacggagaaactctctctcaatcactcgatctcaccactgttcactctttctctacttttctctcaactcacaaaaccagctctaaataacaactaacaataagcttaggtggttagttttatagatgagcacaaggcatgccagcaagacataagcataacaaaatttaaaccttaactaactaatctaagaaatgacaagttggcaatctgagtcagcaaggtagaatccaaaaagctaaggacatgtagcaagtgaatatatatattctatagcttcatctatatatatatatatatatgaacatatccatgtgcttataattagtacttaatttattggttcaagatatattttcctatatggaagctgtacctcaaacacaagttggtcaccaacaaatgcacactacgttattagcttgcataatctttttcaatgatatataaacataagtatttatatatgcataagtaatctttatttgacatgggaaggattaatttgggttattattgcaggctgctgtaagtaaggaagattcctttagcatggcaaagaaaattgatcatcttgaagtttctaaaatgttagttaatacatatacgtaatatatgttagttaatttagttaattaatatatatagttgtatgttgatcagccatcttcgtctacatatattgatcaaatatttgtgtaatgtattataatatatgtaggaagcttttgggggatggtttggagtcatgttccttccaagagctacatcaaatagagaatcagttggagagaagcttagccaaaatcagggcaagaaaggtaccacactccctcactcactctctcaaacttcttttctcagttttttttattgcactacatatgagctgggctgctatatatgcatccataatgcatgcaaattaattcacaaatttcatctttcaaaataatgatgtcttctaactaagtttctttgtaagtattcttacactattttctttgggttttaattaatgtttttgcccattatatatacagatataaataatttatagatatgttaaa

SEQ ID NO: 26234 - DNA, 1051 bp, Cannabis sativa
accaatgttaaaatatgaaaatacggatcatattagaaatgttttgtgtgcaagtcttgtgttggattgtcgatgtaaaaaactgtaaataagactaaaagtattatacgatttctagctcgtaattatttactcgttaattattgaagcatttataaaactgacaaccaacgacaattcaactacatacaataaaaaagacaaaaaaaacaatgctactaaatctatagtgcgaggtgactgtgaatttactttattatttgcaattggaattgaataaatacagaaagtctataaaacaacgatattgcaacgagaactccagatctattattagcaactgtattgatacattttttctttagattatacctgtttgatttgatcgggaactctagatttgtttcttacaggtctacattttatgaatctgcaaattaaatttaagagaattaattttctaaaatttaaattataattcaggattgaatttatgtttcaaactagtttttctgcaaatttttgcatcagtcaaaaattgtagatattcgaattgatttgcgtcttcttttaagtgacgtcgccagaattaatggtggttcttcgactttcagggttgattcattgttgccatccttgtttgatcgcatgaaggattcgatctctcaagcctcaatcgtgcagcttcaaggtgagtgtaaaaggtatttgtataatttttttttatttgggttatataaatattttcttgactggcccactataaattagtaatatttttgtcttttttatatataaagaaaaaaaattcataaaataataaaaatactaaaatacaccttaaattaaattctaaaaatacacaaaaataaacctaacaataactataatgtacataatcatattccaaataaaaaaatcataattttctccatgtcaaaaacagaaacgttcattcatgcccatacgatggtatttcctataaaaatactaattttaattaaaccaatttacatgaattctttagtacaagcttttttttttttttttt

SEQ ID NO: 26235 - DNA, 1081 bp, Cannabis sativa
atatttaaaattccgtaaaactgtatttttctaattttttttttgttgtttttgtgtatttgtcaaataatgtcctaaaaataatccaataatctcctacttgggctacgaattaattccaatgacaattacatttgataaccttatgttgacacaaacttgctaattattctcaaatatcttctttagacaatctggtccatctcctataccaatatgagaccaaagcgacctttgttacatttatcgtcatcaattatcaccatatcaaatatagtcaatgacatagatcaactatgaatgtgtaactagaaattacatgcaatgtgatcttaatcatgtctattttcaattggtcctttattccttagtgagatcaatccttagtcttttaaactttatgtcgaatcacaattgaaagataacacattcagagcaataaagataataaaaccataaactttattatgcaaaaaattgaacctacttaaagtagtgtaatagtgtcaatcaacaaagtaactagtatagaaaacaaactcccactaaaattgtacatcatcaaataaaacaacacccatatgaacaacatgttcatgaaagatcttgagtgtcaaaggtttagttagtgagtttgctagcattaaattttctcttatatgcttagtagacacgatcttactctaagctctctctttaacaactagaaacttaatgtctatgtgtttagactttaataaaatgttattgttatctgaatatagaactgttgatagatcgtcacaatatacctttaggggtcttttaattccttacacaacttgcagccaagtgacaaaattttggagctatattgcattattggatgcctcaaaataagctatgaaacttgttgccatgatataatgagctatgagtgtctgcttagcacttttacacgatatagcttctctagacaacaactactgtaataccctagaattatgaagtggattagccaaaaccctaactagacaattatgtataattgaagaaattatattattatataatttaatgtatgagaatttatatgatttat

SEQ ID NO: 26236 - DNA, 2838 bp, Cannabis sativa
tactcacttactttcctccatgatatcaacccatttgatcacaatgtctgttttttcctaaaccttgataacacttggaataaggataaacttttgcactacctacctgaataccaagcccatgccatactccaaattcccattgatcagactctccacgatagcctcatttgagggcatcaccactccggtaccctaactgttaactcgacataccatctcaccaatactgccaataacactgcttctccttctacttcaagccttgatagcctaaaatattggtggaaatttgtttggaacttgcaaatccctccaaaaataaaacatttttcatagaaagccttccatcactcacgaatccctttttccattattgtagaaggaaggttgaaatcgtctctcatgctcttcttgattgtcctagagtaaagacttcttggaagcactcatctctcaaaacgtttcataacattaatcaaaattgtaacattaaagatttttacctccaaggctcaaacaatcttagcaaagacaatttcacattgcttattagtatcctctcgcagatatggaacacaagaaataatgctctctttaataatcatcactttaaaaatattgatgtggaggattttgtcattagttttttgcaggattacaaggaagctcaatattttaatgcatgtactgaacctccaaacacagagagaatgcagggaaccacgggaagctataccattacccctgcctttttccctgacagtttagcttatacatggatggtgcattggactctaaatctctgaaaataggtcttggagcagcgattatctcaatccccaaatcaggtgcatccacaccaatatatgttgaagctcaagccatcctggaaggtttaaactggtgcatggcaattcatcttcagccgagtctcatcgtgtctgattgttaccagctaatattaaaagtcaaaagtagttggaaagacaactctgctctttcaagccttgtggagttgatctgtcagtccttatcctatttccataatgtctcccttcagcacataccccggaccgataatagagaagctcaccaaaatgctgcttacttctgcgtgataaggacttcatctagagagtctaactttttctttcttttgtgtgtagctgcaacccgtgttttgttttcatttctcttgttgcagttcattaaaaaaaaaaaaaaaaaaactcagtcaaaaataaataattaaattagaaaatatttttgtcaatggaaagatgttaaaaataaaattaataataataataatgctttaaaaaatataataataataataacaataataataataaactcttcattttaatagggaaaatacattattcgtttgaaaagttaatggaagattataaaaatcagtattcattttaatagaaaaaatgcattattcttttgaaaagttaatggaagataataaaaatcatatgatatattccattccatgtcatatcaatcatatacttagttattaaaaaaaaaatcatatactaatagtttatcataaaaaaaaaaaaacaaatcatacactaatactatcccttaaaagaaaaagaatagatcatatagtatatagaacaaaaagttgacgtggtgggagacaaaatcgagtagagaattaaaattgattttttttttttttttgttaagtagaattaaaattgatttggtacataaaatttttatctacgagatattttttattggatcatgattggtcacacacgtgtctctattttttttttctgaaaaggaatactagcacactgtacttgctgaagagtttctaagctccgactgcttaattatttctttttgaaattgactcttttgacttttaaaataaaataaaagaaaatgctaaaacatctttaaaatatgagcattatcataggtataggtatttatcaaactgcctacactatataaattgttcgctcagtactacatcgtataaaaaatatggcttgaaatcttttgcaatgcggttgtaatttgtatttttaccaaactatatagtacggttagatttgcggttttaaatttaataattacggttcaaactatagtgcactatagattataaaattctcaattttttcaatgtaacttttattcttttttctatataaaacaagtatatataatttatgtatatattacattattttttagagacaacccaatataattatttgatgattatatatgttatgatgttaaaactataataagtttttttattgttaaagctttattagaataatttttaaatttttattataatgtgataattatgataataaaaaccgcacaggggcggacccacattgtagcgaggggggcagtcgccccctgaaaaaaaaaatgggaaaaaaatgtatatataatttaattagtaacaacatatatttgtattaaaagatgatatttatagacataatagtaagtttggtgtaatggttaaggtaaatggcctctaagttagagggtaaaggttcaaatcctatcaactatactttatatttttctttttaaatttatttatgccttccctccttttacaaaaaaaaaaaaattacgcccccctcactttaaattcttggtctgccactgaaaccgctcaaattgtactgcaccacaccgcattttctcacagtgcggttgcagtttggtttgaaaaaaaagactacaactcgcaccacccgtactgcaaacacccctaactatgggcaccaaagtgcctagtacctttattaaattaaaataagtgag

SEQ ID NO: 26237 - DNA, 1779 bp, Cannabis sativa
taaataaatattttaccgtataattaagaacactcctaatgaattttctactccatttttctaaatatatcagtaaagcttactttcattagttttttaatatattttatttactgtatatataatattaatgtatacacatatctacttaattataaaaagtatatttaaatattaaaacaactaataaaatatatttagtgtgacaagaattttattaatataaaatataaatagtaaaaaaagaatttaaaaaaacaattaaaataaagaaataatgtaaaacatcgatcgatgtagtatatttttattttgattcttcaaataatttaaataatctgtaaattagaataagaataagagtgctctaaaagctgtcacttaagccatccatatatatgaaaatctaatttagaaatcctctatgtgaacacaaatatattagctatgtagtgatcttaaaaataataattaataataacaaataagtaaatacatttgacattattatatgttattaagagatgatgattggttttggtcagataaaaggggttcttctaaatcaacttgatgacttcccttctccaaaaattgatcatcatcatcatcaatatgttgttccctctgatcatgaagactagtatttttgtgtagattgggatcaaagtccttggctttgccccataacaagatatataaaccaatgatgacaccaattccacctaccaatctgtagtgatataatcaaacatataataaataattaattaatcattcttcactaaaaataatttgatgaataaattaaatataaattactaaattaccctccagtataaatcttctcttgaagaaatatagcagccaaaatggtgactattatagtgcataaaggattgaacatagcagagaagaggggacccctttgagatatgacccatgcttgaacaaagaatgagaccccagatcctactattccctgtgctcatgtacatatcaaattccacaattattattattattacatacattatttgaagctctatatatatacatatcatttattgtaaatgaattacttactgagaaaaaagaacagccaagttccatagcagtggtgagcttccaagcctccatatctttctctataaaaagtgttattattgctgattgtattgtggccatgaaacacatccaagctgataaggaaaggtggtcaggatagcttgctgaggcaggaacctatttatatataatttatatataaaaatcacattacattagattagattgtaatattttagccatgacacttagtttatatttaagggtgtttattggaccacattcaatatttttaagcttattcagatcccatctaattatatattagatgttagattttactatctgattcgatccaattaatttatttagtcatccaatcaatccaacgtccattagatgttggattggatccgttctatcaattggatgtatttcatatatatttattggcttaatgtgggtttatcttatatttcagacctagtattttttggatcgaatcagatccatccaatattttaagtctcctatgtattggattagaatagatccatccaatccaagaaagaaaaagtaaaattttaatattagtttttatatatacatatagattttacttataataatttaaaatataattactcatccaaatgaaataaaaatattaattaattcgattaaatgttggatgtattggatttttagaca

SEQ ID NO: 26238 - DNA, 1889 bp, Cannabis sativa
  modified_base (1822)..(1826): a, c, t, g, unknown or other
tattttaactatgtaaattgaaaccaaaaaaaaaaaaaaatttaagtcgttgtcattgtttgggggagaaaaaagaaaaagaaaaagatcaatggcataaaaagcccaatcaaatatattcccaacaaactgaatattataaaacagccagcgaagaggtaaaataataaaaatatatataaaagcccatagagcagcaaaaagacaaaaggagcataccgataaaaatgcaacaaacttagaaaatggtcaaaacaaggacccaccattccgagtaataataacgataggcctgaacttgccaaaaaaggctaccgacggcacaccccagagtacatcaaagaaccaaggctcgagacgagtaaaagccgtaggtcaaataggataaacatgggcacaaacgaaaaacatcctccatctaactcacagtcgggcaaaatgtgactagaaccaacaagaatcacgaagatgaatttcataaagcaagaatacctaaaccaagttaggataaaactagattcttgtcggaagaactaaagaactcaacaaattaaaactaaggccactccagagcccctgactaaaacaagataccccgtcgaaaagaaatcattcttaatagactaaaacattagaagccctctggcgaggcaccgacgaatcaaatagaagcaaaatgtaagaacgaaacaaatactgccccactaggcaagacacgtggcagaaagaattaaaaagaaataaaaggacatgcgtcaaccaaacaccagaaaaaaggacagatcacacttgcatataaaagaacgtagaacataaataagaagtttatatgtaaaaaaagcggtgacattatgaactgaaaaaaaaagaacccacacaaaaaatattgactattttttggtcgaaataatttggcgccgtctgtgggaacttagtttttttttcgagagatttctcatcacaggatcgtacttgttcacgaaaacccgcaacctttgtcaaaaaaaaagggaaaaaagaaaataatgatgaatgaacgagcagtgttaaacttctcctccttattcttctgtggtgtgggagaagtgttgaactttccatttttgccactattcctcccagagttgttggtgttgtgcttgtttctagtggcttttccactaagtctgggcagaattactggtgtctgcctgtgcgcctgatgagccatgaggatgctggatgcctcgtgactaccaattgttgatatgccccgcctgggcctatcgtatggcttcttgaagtttgataaagtcatcagctctatcaaggaacttctttatgttgtcggtaaagattctttggatatctttccagaagtcactcaatgtgagtatgccccccagtatggccgtatatcgaccttcttctgtaaggcctttgactttgatagccccaaccataaacctctggatgtaatcctttaaaggttccccttatcgttgtttgactttgacaaggtcttctagctgcaatggtacaagtcttgaggatgagaattctgtgtagaattctcgtgagaacgtagcccaagagttgaatcttttggggttgagtttagagtaccattattgagctgcctcagacaatgtggctgggaatatgcggcaccgcgcatcaccagtaaccttctggagatcgagttgcatcttgaagtattcgatgtgagtagtgggtcttctcgccctgtatacatcttccatactggcattttgaacttaagcaagggcaagacctttatgtgattgagatttatatatttgagaagactataaattacctnnnnnaacctgctattgcatagaaattgataatagggagataatcatattaggcataatcaataaaaa

SEQ ID NO: 26239 - DNA, 2175 bp, Cannabis sativa
tagtcaacaaattttatcaatatgacaaatttgtttttacttataaataattgaatgtgaatctaaaactcaaataaatgagtgttagtttggttatatttataaaattttattaatcaatttaattataatatgctaaatttgtatttagataaaacaaaatattaaataagtatcattaaaagcatagcaaccgaatttgtattttaattgttgtaattttgcaacacctcaaacaaaattcgattacaattaaagaagaaaacagattataaaataaaaaagaatttagaataaagttaaatatgcatatccataattgttaggagtgtgtcctaacaatttattagatttgaataaattgttaatataaagagaaagttaaggaaccaatgacaaattattagaccaccagaataaaaatgacatttccaataatttagagtcaaatataatattaacattatgatttgtaaaaaaaaaagagaatattattgtttaactaaaagcggaaatgaaattaaatttctcttaaatgtaagaaaaaaaaaaaaaatctcaagacaatcttaacactaaattgtaattcaagaataaatgtgtcaacttagataacgttaacttcaatataagtgcccactttaagctttaactttctctcacttggcttcgtgagatcccttagtccctacttgtgcttcattcttatcctattttccctagcctttgttggacttgcgttgagaaaaatattaagaagattcattcttctccttttttagcttgcttgcctcagctacacagtgtgaaattaggtcagtaacactccatattttattataagtgctgtaggttgttttgataaggctaaaagagataggaagtgtatgaagagcacgataaataaagtaagagttaggaagaggactattatgacctttcaacttggactgaacattcacaatttttaaaataaaatctcactccttttgattcaccacacctaatggctgtcatgtcatctttataagatgtccaagcttcagcattttcactagtatcgtatagtttttctacaatattggaaaattctttggcatttgtagtgtctgcaggcaaaccactcaatagatgttcatgaatggaactttttataacaatgaggctaagatattttgacttttcccattatgcatgaagagttttctatgcaacagtaatgatatcagtacgatcaacaggtttttcttctcgcaagtatatatccaaaaccattatgcctaaagtaatttttacatatcgtttccaagccttaaagttagagcatttagaatttagatggaattatttattattgttcaaagaaaggagaccgaaaaattaaaacttgtttaagctatatgagcaatgcaattagaaaatattatagagtcaactggtcattataaacttccatttggaggtaagaatataacacacatatgatctagcttcatgaagataacaataaagaaaaaatatatatctgttatccaattttttttttcacttgacgtggcatgtccacgtaagccaaagatagagtacaggtggagtacaacctcgccaatagcagaacagagcctccatacaatatatagcagaaccgtcaagcagcatttgaagggagtgaagcgagccctcaaggagctgtaccaacatccttggcccaccaagaggagcatataggcctgccagggtaagcctataggccggccaagatctatgcacaagctggccagccaagaagtgacttccggacccaaggagactttgttcgaacaagggaacctacctcttcatggaaacgatgtacaaagctatcctcaacttacaaaaggctggcttccacactcaaaggttggcctcctcttggtggagcgatagtgacttgccagaccctgcaagccttgtcctgccaggtcttggtaggaccatggccaaccaggattgacctgacaggaccatagccagccagacttccttgaaggcctattgacggctaagattaacctgacaagaatccatgtacaacaatacacttggctgagaagttgggccccaaaagcccaacagacaggctaagaagtatctagaatctaagggcattttggtcttatgtaaatatctagctaa

SEQ ID NO: 26240 - DNA, 6491 bp, Cannabis sativa
atatcataaagataatcaatagtagatcaacctaaaacttgagtaatcatgaactcatgttcatgatattaggttcattgattcactcgttaaagtttatcggagaggatggttcttacaaattatattttgggaaactaatattgtggatggctaagagcatgatttacaattatagaatcctgactttcctaacggattaaatgttggttttctctatgtgttaatgctagaaataaaaaattgtgcacaaatttagattggatctaaattatacttttactagtgaattaatgatactaaaagataaagacgtaattagaagggtaaaacggtaatttgagcaaaactaattacgaactaacaccaagagggctaatcacaagaattgattatatcaatggacattgtagtaagactcaatagatataattctataactactaagagttcaattctatatttatagtggactaatctagtttattggaacttaaaattataggtccatggtccccgaattgctatcttgaaacactatcaaggggtgggataaatgctgtatatggaagttaaaattaaatctattttgaattagcaaaatagtaattatttattttttgtaataaataatttatttttaaaattaattaaatagagaaaaagacaaaagttgtcacgagaaaaggcaaattctttgtcttaaacaagacataggaggtgccacatacattgtgttcagacacagtgcatgcgccccacatgtgtagggtgtccctattggttttgtcttttttgggttaattaattaattaattaattcaatagataaatatttgaatttaaaagtagttgagatattatctcaagtggttgagagattctcccaatcggttattagatgtaaatatctataaccgaatttggttatattatttattcaaataattaaatacgatttaataagtctatttaaatttaaataattaattaaataaaacttttattgagtttatttaaatatactatataacaaagttctgaacataaaaatagaataagttttgggaataaaattttcacgtaactttcctaaaagtttttagggtttcaccagtgaacctttcactctctatcacataagaaattgttcttctcatctgttgagataaaaataagaacttcatataaactttgtcctagtagcccacactactccttgtgtgtggtggaacaatcttaaagactacggtatgagatttattggatcctacttacaagaaatttcgagaatatcttgatagtcatctagatgtatttatttctttcatgcaatttatatttgagatttaatgtatatacatgtagagatcctcacgactatggtacaatgataattaattaattattattctgttgcgtacctgatttagtaccataaaaccaataagattccactaagtttatttttttgattaataattaatttaaaagataatttaaaatttgaattcgaaatttagttatagatattatgagtgattgagatattcacttaaggtagttgagatattcttttcaagtgattgagagattctctcaattatttattagatgtttaattttaattaaatatttaagttttaaaataatatttataacataatcaattaaatttatttaaatatttaacctatattatttaacgtttaaattaatatcttaattaattcaacttaaataatagtttattggttataattaattttaccgatgatttctatgtctatatatatactgtagatttaggaaaatctaaaaaaagttaatcattccattcatttcttactttatattgttctgcctcatgagttgagacaaaaccaagaacattaagctatattttgtacaaactatcagtccacattgattcttatgtgttggccatgtggaagagcagtttgtttttcatctcggattaggatacaacttacgaaaagatagtaaagaatgtcgatagttcatcaagaggtaaatctcatcgtgttcatattattaacttataaattaaatattgtataattattttattattttattcaaaaaatttattattaagaatctcatttaagatgataaatttttgagtcaacaacaagcaacagacaaacgacataactcgaacaaccactcggtaaagaaacaaccacccaacaacataatcctagtccacaaagattttctacctcctgcattgcaaagagaagcacctctcgatcgaagccaagacatgcacaacggcgacccaaacaagaagaaaatagagaacccaaatcatacttgtaaatgttcaatcattattaagttgaactacgtaaaatcattttatttcatttttagcctctcttcatttcttataatttaattgcttgaatgggaaattcaagcaatatttcaaaataattatttttgtatctaatttttcaaacatagaaattaaaatatagttttaatgtgtttggtagtttatttttgttttgtgtttcttttagtattattatttaggtgagaagtgaaagtaaaaaataaacgagaaaataaaatgaatattcataaaaatggtgtaaaataatttatgattaaaaaaatattttaaataaatttatttttgttttcaaaatttgatcttattttcataaataataaagaaaacaattttattaaacatatttttagttttctaattaaaaaaataaaaaattattcatttgttttttttaatgattgaaattatttagtgatattttaagttcttaattatcacgaccatttactatttcacaataatatttttataaataaaatttacctatcttttgaatatacacgaataattttcactgaaattattttgtcatttgattatttgattattatattatattatatattttaaaatggtggattatatatatatatatatttttttttgaataaaagattggcattttattaaactagtgaatcagccaatacaatacttaacaactccgaagggcagttgttagaaagaacaatacgatctgtcatataacaagcactgcatgcaagaaagtgtgcagcattgttagcagaacgttttacaaaattaaacttaagaaaattcaactcattcaaagtcactctgcaatccgaaaccagtaggccgaatgttgaaggcatattgacagtacttttgattgcttggactgcaacaaggcagtctgtttccaaagtaacatcctgtcagcccttggttttaatccaacttagtgcttcctttatgccaaagatctcagcatactcaggagacactcgaccacagcagctttttgaaattccttccatgattcggccagtagaatctctagcaataatcccaaagccaaaacagttatttgcttcaaatatagccccatcgacatttaccttaatcgtgtttgccaaaggtttcgtccagtgctctttatccaaaacttgatcattgtaatcaagtataggatcaaatcgtttttgttgagcacattgccattgattaagatgcgatcttgccataagaactacacttgcagcagaatttgttttttgcttccagagtatatcatttctagcattccatatctgccaagctatcattaggacctcagtagccttgtaatcctttcccccattggtcacattaacaaaccagtgcttgaaatcagtttgaatacccatgccagagcttattgctgacctgtgccagcaagagtgtgcaaaccggcattgcaccagcacatgaaaaatagtctcaggttcaccatgggagaaaggacaatttaaatccacattgatgtgtttagtttgaagctggactttagtaggaaggcaacctgttatgactctccaactgaagtgaagaactttcggaggtactttaatttgccagaacttcttccaaaaatcaccaccatcttgatcccagtcagctacttcttgaagaaatctgtatgtgctcttaactgagtagaaaccagaagcttctttacaccaaaaccagcaatcaacatcagcaatttgaggaagaggaatgcttaaaataagtgccttatctcgctcattgaacaaatcagtaatcacttcctcatcccaactgttatggtctatttgcaataaaccagacacagtattaccttctagacctgggtgagaagagctaacaaaaggttgagtcaaatctggcagccaaggagcatttaaaatgcttgtgtttaggccattaccaattcgaactctagcaccagcagctatagtttccttagtttcaaagatgcttttccaaataaaacttggattatgtccaagtgtggcagtaagaaatgaacctctaggaaaatatcgagctttgtaagttttgcaaaccagagaggagtcatcagtgaggagtctccaagcttgtttccctaacaaagcaagattgtaattcctaaaatcacgaaagcccagtccaccagcattcttgtgcttacacatcttcttccaactaacccagcttactccctgtttatctttggaagattgccaccagaatttactcatgataggtatcaggaatactgacatagcatagctaggaaaagcttgtgctactgtttttaggagaacctctttgccagcctttgataagaatcgcccctcccattgatgtattcttttctgtactttatcctttaggaagcccaaaattgcattcttattccttcctattaagcaaggtaatcccagataagtgcttgattcatctgcttcttttatgcccattatctgactgattaagtggttgaccttgataaattacattctcaccattattatccttgctgtcattgacattgctttgaattcctttattcttgccttgattctctcctggaaatgagggattgattgaatctccttgattttcattgaatgcatttttagacgcctctggaaaaccatgttcaccggagaaatgatcatccgccatcgtaccagtacgcaaccattgagccccaaacttttgttttcttcttatcggatcagctttcatccataatccatatggcttctctatctcctccagtggtttatcaaacaaacgattacagtaacgttctgagtgtccaataataccacatataaaacaaaaggtaggaactgattcatacttgaactgacaccatagccattctccattagtccgcttaagcttgattcttcttttcagtggcttttctatattcaccgtgactctgatacgcaaatagtccctccaaatacccaagaaattctttgggtctgacttgatgaaggtgcctatataattgccaatatttctcgcgttagtttcagtcatgaaccctgtcttgagattgtgaagttgaacccacatatcaagttgatgcaaagaaacacttctaggattctccccccgtttcaaccttacaaagacaagttggaacctgttgaacgtccatggactcccatctattaccctttggatgtccacttcatggtagaattggaaaatgtagagattatgctccagttctttgacaaacatcccttttcccggctgccaaagtgaggctagagtattttgcattgagtcaaaatcaatcaatcttctggtcaagaattttcctaccaggcaccacctatcatcaataggttggccaacatcttccactatatcgcataataattctccttcttcttcctcttccagttggaattggtcatattgatcagtaatatcatagataggctgactacttgaggccatagacacgacaaaaggaaagtagttttggagaaagcaaagtaggtaaaacaataaacaacaaaagacaacaaatcgacaaaaccagaactcacagaggctaaacaagcatactcatgtcaaaggacaagactagaaaaattggtggattatatatttagttcaaacgaaatgtgtattttttttctctttattggcaaaagacaaaatttgttactatatcataatactgtttggacattattattaattaatttcatttcattttttcaatttttttttagatcactttttgttaattaaatgttcaacatttcaaattaataagaataaataattaattaaataatctatatataaatataaagaaaagcacaaaggaatttaagtggcatcttatattttttttattgtatttttaaaattttgtgacatttcatattttgttaagaaataaactactacatatatccattaaagtcccacatggtttggaaacacctaaagtgttatccatgtaggttataaataacacttttgttatgtaactttccatttccaataaatatttctctctattgatttatgttttacctaataagttttaaatttttatttaatatagaaatctatatctatatataaatat

SEQ ID NO: 26241 - DNA, 2748 bp, Cannabis sativa
aatagaaaattcagattgctacaaatcaaaaggactggtataaatatatatatatatatataaagtactagtatatattagaatggtatagttctccccaaatactcatctaaagacaaaccctattacattaaatgaacaaatttcaagaagttcccactaaaacaatacaatgagtaagaaattttctaaacatggttccctgaacctaaatttgctaactcccaactctctatctgcaacattaatgtcctttaaacaagttacatataagataaatatatgaatgttatcacatcttgagttctaccaacaaatccccaagggatagcccatctcacaaaagaaaattaccaactctttttcagataaaaacctacagggaaaggttaggattttggaaatgggtgaaggttctagtgcagtttagtttatccaaggaaagggagttgcaggtacaaatttacattatttgctaatcagaccaaaagcttcttccttagagatgtagcagtgggaaatttgctgcactaggcctaaattatatttcagaaaacttatgcctctcccgtggctgaactatttattcagttaagtgggaaaacgataatgataataataacaacaattacaaacacaccaaaaagaaaaataggaaagttcaatcaacaaacctgaacaacaaaaacattttcaggtgctaaacgttttatggaacttgcaatgggaatggtatccctgccagaagcaaccaccaataaaggtccatccctgtaaaaagaatcataaacacttaaaaaaaatgtatagaagatattaagtattcaatgaagtaggatacaagtagagcataactctaaattaattatttgcattttctaataaatttgagcaaaaaatctagtctaacccccaaaagttcagaggtaagaaaaaaaacatgtaaaccccgcctgaaaatttgaaattataaatatcctcctcaacataagaatttggctgcaccctggctacatcattaaacaaaatggaacagtgcttttaatcactgtgagaaaataattacttttcagaagtctcacgagccatgtttacaatttgcttcacatcagcttccaaaatagatgacaagcccatgcgtccaccattttctgaaggtaaagtcataactctatgacctttagattttaaaataaattttgagatctgctgtaagatgtaatataattttttgtgaagagaaactggaagccaatggagccactcatttactcctccccttggtcttgttactcgctgcatatgaagtagactgagaaatattagtaaatgaatgaatacacatgcatatacatctacttaaagcaacatttaatttctataatttaaaatacacaggttcacaggcttgacaacggtaaaatacaattacaccttgactggttccagatattggctatttacagtataaatacaagtgaagattttgtgtaatttttattggatatccaatcttttctaattggatgagatgggtcaggtcagttgggattggattataagcacccaattgctaagttgcaccttaataaattaaaaaaatcaacacagaatcacttataactttaattttatacatttcagttaaattaatatataatacattaatcattttttatcggatttgtgagaatgttatctctactaactgatcctatccaattagaatccagctttcaacatccaatccaaacaaattaattggatatccagtcctttctaattggcttggatcatatcggttaggtcaatttgaattggattatgaagacccccaacaattatgatgtcacttgtgggatgaacatcaccattgttaataccaccatattaaaaataacaagtacgtatgaacatatgaacaaataaaaaatatcatcgcatgatttggaaagaaaaaaatggctgaggacatacacagatcacattgatgaattgaaaatgatggttttagtatactgtatacaaatgtgtagatccatgtgaaatacatgggtaaatctatgaggtgatccatttggcatacataggtaaatccatgtagggattattatgtcattttaagagattatcttagaatgctgatcaaagattcttggccctagaaatggctttagttgatgtcaagaatacttgcctcaaatccatttcataatgtaaaaccttatactttagtttatttgcgaaaatcacaaatgacttttatatgagtgttcaagtagcattgattgatggttttattttagcacaaagtatcatatatggataaggcggaatacagtgttttgttattacagtaggtgcttttcaatgcatgatgatgcttgtgattacaaaccatgtgaactgagaagtttcatcacaattacacacaaaattctgcacattgtagcagcttttgaaaaaaaaaaataggcacatctataatcattcattcttcatcagggtatagaactaagtggatgatcaaattagttgttgggcagtgggcacaaaagttttactcaatcaccaaccatgtaactctacaatcatgattttggatcatatcagtgaatatgatactaaactataactaagcaaattacaagcaacatacaccaattactcaaaattttaaattttaaaaactaataaataaaataaaacacaacacaacattgagtaaattacagaaatttgtttata

SEQ ID NO: 26242 - DNA, 4589 bp, Cannabis sativa
tattagcttaaatttctgaccccaatagtttgtttttcttctggtaattagtgctttaaacgattttcaatattttggttgcttaagaaacaaatttttttaattcatgttcaacgaagaatgttaaacatctttcaaaaatagttcatcatcactttatggtccaattaaatggggtaacaacaattttgtctcacatgaaaagtcaaaactttcattggcagttgtttttactaatacactgccacactggaaattagaaaataatagtctgtcaatcagaaaaattgtttgtaagctcattgaattaaccacttccatggcatctcattttgatttattttctatgccccaaagtcagaattatccttttccaagttggtcagttctggtgccattttggcaaattttccatgcggcaatgatcaacattttggaccatttgaccattacaattttgattgagcactactacatgaatgaaaaagagtaacttatgtttaacttttagttgtaaataaatatttaaatttaatttttggcgacaataatacttaagttatatttttagaactctgtaagtattagttgttaaatattaaataaattgccacatggtaattaataattggtccgagtcatgaatttttatttttttaaaaaataatttatatgtaccaataaaaaaataacacgtggataatgatttgacatttaatgttcaaatatttacaaagttcaagaaatataatttaaatattattatcgctaaaaattaaacttaagtatttattgggtatttataccgtaaactactcaattaaaaatataaatgctggcaagtaagagtaggttgtgtaggccattttacacaaagaaagttaatttcaagctcagactcagaccccattgctgagatggagactttcccactcacaacaaaagctccctttccttcatcaataaacaaaaactccctttccttcatcaataaacaaaaactccctttcttgtccagtgttgacgtacatcaaaattataaagtactagtgattttttctagtttttagttttgttgtttttttttttgtcatttaccttctcagttggctatataaccattattactgtagtcacgacttatgaaaatgacatgaagtatcaacttgatgagatgcaatgcaagtaaaacccacttgggtatgtgtatttaatgttcaaataccaagttggcttcaatttctacaaaagtagtgtgccagacaagacctgtgaaagcttatctatattgcttttaatggcattttgggcagttgagccaacagtttgacctggttagacatttcaaagaaaaaaaaaatatctaagaacaaacaaatttcccaaacttgtccaagccagttagtcccaaatattatttgattgattaaatatgaattaacaaatgataacagtaaacttttgaaaccatacaacatcatgtatatggaagtaataaggtaacaatcatatctctccccttgttcttaaatagggggaaaagactacactcagcctaagtcctaaccctgtgtttatttatcaaacaagagctagcaaaagactaattgaaaaacacatgtttatgtttcatacattaagcaaaatcaccttctgcttggacagtgtaatattttaggtgatccctcaaacagatccaaaagataattctccaaatcattagcattgtacttgatgtacttatcactaatgtgagtagaatgccttccctcgaatgtcctgtaagcctggattactcttagagatgtcgagattcgcaggtcttctctaagctcagcatcaggaataatccatgctgattgagtcctgtaaatttcctcgaaagcaagatagaagctcctgaacctctccttgagaacaatctttgagacggagttcgaaccaggattttgtattccttcatccttcaataaagaaaggattggaccccaactagctctttggtagtccatttcatggtgttggaatttccagttgtgatgtctaatccaaccatctccaaatataggccttagttcagaccctttgaccttctgagtcatataataaatgttgttcatcaagaaaaagtgttgtaatgaaacatccttgtataatttggacctggattcaaggtttccttcaagaacttcacttactgacattaaattctgagccaatggggaaagtctgattcttttctcctcttctctaaaagttggactactttcaggagacaatattgtgaactgatcaacttcttcatcaatgttcttgaaaagaaagttgagggtctcactgtagtcagtaagtgtccttaagtagttcatgacatatctggttagaggatggattccccctcctgatataggatttgcagagtggttagaagcaatggcattcttgaattcgacgaaagtcaccttcacacagtcccccaatctgcttagaacctcatgacattccatggttatggaagaaccagattcttccacgtaaaaggcttctatttcaggaatgagatcagcaagcacctcatacatgtcaataatccgaattaacttctctggtttttgagggccaattgacatggcttctgcgaaattcagaagctgcaacattgaggtctttgataattcaacaaaacaaactgaactgatggatccaagctccccgaaaatctgatcacatagcaatttttcactagcaagataaacccgaacaaagatcttcatagcgcgaatccatctcctgatcttggagttcaaactaccccactcagccctgattacatcctcaatgcttagcttctccatctcaagaatgaacaagcactcatccaaagcatccttccggacattagtatatgcttgaatgcattcacgatcgtatttcgagttgaacatcaaattcacaatacttcttagctcaggaatcacatcaggattgaccaaatccacaatcaattcatcagagattctgctgagactatctctttgaagagattcctcaactgaatcatccccaaaagagttcatggagctctcatccagagtgtcctcctcactcgaacgaaacgacatgtgttcaggctcaaagggttggctactctgaacaagtatgtatttaaactcttcctcaagtctatccattgttgtttgaagaatatcataagactttctttgcagctcattcttttcatcaccaccctcatcttgattcaaagacaaactctctaaccttagagtcaatttcctagcctcctcagcagcatcaagatactcatcaaactcatccatcccagaatcccaaatcatagactgatctgtttcccaaatcctaaccttctcttcaacagaatcaagttgattttcaatcattttgatctcacaaaccttctcactcttagtctcatcagttaaggaaatggatgacaattgagtaccaagattaatcaaaattctcctagcttcatctgtaagccccttattggagctcaattccctagatatgtgtttagccgcagcaattaacttatcttccccttcaaactccggaaacacagatttaaaatctgccatagccatagaagaagcaaacccaaaagaacaatcacaaagactcaagataaaaaacctttctttgatgaacttcaaaacacttcaccaccaaactagaaagatttttaatggaaaaaccacaaagcatttaaccttcaaaaaatttggttaccctcttgataatacaatgaaatcctctccctataaagagaaaaacaataaaagaagtgaaaatcaacaaatacccaaaatcataaaaccaaagtggaacaatataatacaaaaaattgaacaaaaaaaagaatgataatatcagaaatgattgaaagaaaagctacctagttgttttagcttcaacgagggaaaaccagaacagaacagaagctctagtactcaatcaaaaattggagctcagagaaaaatatgtgcggttgacaaatgggtttattgacttggatcttagaatgggatggaataaagttaacaaacacagttaaaagatgaagaaatttcaaagaaaagatctacttttttatcctttctaaatagtcaaaatgaaatgtacggacatcttgactttcaagtgtttatggtttatggtgttatacagattaaaagagaattgcaaacaaaacaaaacaaaacaaaaaaaaagttagtttttgtaatgttttctagcaaattgcttattaaattaagcaacagggacggttgaaattaatgaggttgtttaaattttgtatattttattgtaatttattataagttgttgttaatgataatgttgttattatctaatattgtatttatatattttattggaaaggcagtcaaaaatgagagtcatgaatataaattcatgaccccgaaagatacttgtatttgttatgaatttattgaaggaaccagtcatgaatattgtattattttctctttcttttaacaattttgacttttctcagcaaatggatattatatttgggccgatgg

SEQ ID NO: 26243 - DNA, 2618 bp, Cannabis sativa
atgttacttgttcatatgtcaatcagtactcagtaacacaaaagtttattattattttccagtgggtgtagttctagacgagtgtatagttgtattttaatttgtgttggttaggctgtaaattatgttgtgtattcaggttagttcttcatggtagtaacagtaacacatttattaatattgtatcagtataaaggatatgtatgtatctatttatgtatatattatctacccatgctttcagcattaagtgtaataatcaatccaacggtagctagttagagctaccaccaagcaaatatgttattgttcataaattttgagtagctaggtatagtggtgatctggtaattaaaactctatacattcgtttaatcattaggatattgttgctatatattaatttgtgactcaatcgggttagatctagtctgttaataggacggcattttttttagcgtagtgattagaattattcatgaattaatgatacaaatatttataattggtggtgaaacctcctcaaaccaagatagctcatcgtctaaccgcagaaggacatactttcccaaactgtagactgcaggatagcataggaatgttccttttgaagatgtttcatgccaagagtagtgtgattagtggccactgtatcaacataccagtcttgatctattgcatagtcaggcaccatggaggatgaataagcttgagacttttcaaattcatcaaattctatcaataatgcacgagaatcaccaactttaggtgtaacaaatcctttatcaaatctgtagtggcacacggcaatagtgtggccaaatttgtgacacacttgacaaatgaacatggagcaagagtgccatagctttgtgtgaagcctctaccagaaccaggatatcgattgggagcattagaaccagatcttgaaggtccaacagagagatttgttgatattttgttgctagtatcagcaagattgtagtgtctttctaatctgctctcatgagttagtaataaggattgaattgactcaaaagaaagatcatctacaagacttgtgacatgaacaacaattagatcaaattcaggacctaattcattaaaaatatgcatgattaaatcattttcttccatagggtgaccaacaacagagagagtcagcaagaatctttaccttgtcaaggtaatttgagattgaaagatttcctttctaaattgtggaaagttaagatttgatttgttgaattctagctttggacctctgttcaagagcacgcgaagcagagtacgagctttgaaactgtgccaaagattcaagaactgtctctgacattgatgatcgaagtcagctgaggagaagttgatcttttcttttccagttggtgaactcaggattggtctggcctgtaaccaatcgttcaggtggagacactccttcgagaagaatgtcgttgagtccatggccaatgactgctggaatgacttgagatttctaagcctgaaaattggatcgagccaatttgactacaaggagtgaagagagttcttgaacgaatttcatggtggattgaccggagcagtggctacggtggtgggagcttgagctatagaacgaggtgggttttcagggtgacgaggatccatggaagacattagtcaaggactatctgataccataaaagagcttatcaataatgcaaaaaggtctacacaaatataatttatgagattgtgattcaagacttgcaaaagctccaaaaccttggaacaaggattcatttatataaggaatgatacaacaaagaagaaagaaaaaagaagtaataaaaaactaacagagttagtttgttggatactattacaacaactactttaacgaactaacaaaaagttcagcaatagcagtagctgtatcagtgaacccattgagacaaatcatcctccataaatttaaacaataaaactataacatcctcaaatagtaccctagctcattaaaaatcccatcctctgttgatagttgtcaccagagaaagcaagtctaaaaaaacctcactaattgggaatctgtagtatgagcccaattgagtcctaccaaaagagtcaaagttcaagcttataatactaaaatactacctgaaacatgacaaaataacacaaaatacaacagatattgaaaaaggcaatctttgaactaaaaattaataagctaaattcaaattcaaacacataactaaattaaactaaaacttaacaaaactaaatagaacaaaactcaactaaaatttaggacatctagctaaagacgttactctttggctagtagcaacatccaaaatactaaattgagattcaagagaacttattgttatcacctaattcttttcaacagtaattataaaaaagtaacaacaaaataagatagataaaaagcaaattaactagtattattattttaacacaattatttaaataagacaaatgggtcttcatagtacttagggattgttcatgtgagggagggttgggtccagtatatcgtacccactactaatggccccctaactctcacacaaggcccaaagaagagaaatttaatttttcattaaataatt

SEQ ID NO: 26244 - DNA, 3409 bp, Cannabis sativa
ttacattgaaacagagttttatttagggcataaaacccaacagactaacccttacaactagaaatttttcagcaaggtgtttccaaacctcttacaatagttttccaccgccaaggactatcaacctctttctcaaattgttgtagtgttaatttcactctaaccgagttgtttacaatactggtctcaacctccctcaatcacaatttggaaatgtgtttaaaattacacacaaactcactctagatgtatgatgatacaatgaataacctagagtgattagcaagcacacttagaataaataattaagaattttggctaaaagtgtgtgaaaaatattttattagatttcaaactttggagctcttcaaatcacttgaatatgattggtatattgaataaatgcttagtcaacctgaatttttaagtaaaaaaacaaatttttatagcgaatgaataaaaactaatcgtttatagctgttagcacactttttaaaaagggatcctaagaaaaacggtctaccatttttgtgaaaaatgatctgctatttttgtgaaaaatgatctgctatttttgtgaaaaccgtctgtcatttaaaagcggtaggccgaaaacaggataggggtaaaatctcattttttcagttctaaaatgcgcataactttctactcgtttatttgatttcaaaaatgccatcttttttctcttaattaaatgatatgtgatcttaaaaattaatttagaaatttaatatatcatttttgtgaaataacttgtcgcacgagttaatgggccaaaattcgtacttagaacattttaagtatggacttgaaaaccattgtacaagactaggaaatataaataaactttcatggagtcttatcttgagtttcttaagcctttaagttcactttgggtcacttttgaaattttaataaaattactattttgcccttagagttaattttgtcttaaaatcttatttatctttaattgtgcaacaaaattaacaattagtaaaataataattaaatatttgttaattatcaaaacaagaagactttagagtttgagtcaacaattacaacttatttgtataggtcactagataatgacatttacatgaaagttcctaaaagattaaaaatgcctaaagcatataataaaaaaaaaacttgagaaatgcattcaattaagctagaaaggtttaaaacaatctgatcatatgtggttagtgaatatctattgaaagaaaactatataaataattcactttattaatgagtttttattaagaaatccaaattgttatcatcgcagtttatgttgatgatctgaatatgataggaactctagaagaggttatcgaggcaataacatatttgacaaatgaatttgagatgaaaaaagatttaggaaaaatcaaatttcgtcttggtttgcaaattgaacacttatcaggcgagatccttgtttatcagtaaaattatgtagaaaaaaatcttgaaacgatttaacatggatacagcccatttattgagttctccaatgttcgatcattggatattaaaaagaaaattttcatcttcgagaagatcacgaagaaattcttatttcagaagtactatatcttagcctaattggtggactaatgtatcttgctagttctacaaggtctgttacagctttctctgtaaatttgttagcaagatatactgcttcacccacacgtcgacattggaatgaagttaaataaattttttgttatcttcgtggaacgactgacatggttttattttactccaaagaactcaaaatcaaaattggtgagatatactaatgttggatatttatctgatccacacaaatctcgatcacaaacatattatttatttacctatggtggtactgctgtatcttggcgctcaacaaaacaaacaatgattgtaacttcatcaaattattctgaaatagttgcactacatgaagcgagtcgagaatgtgtatagttgagatcattcattcaacatattcaagaatcatgtcatatttctaagaagaaggcttcacaattctgtacgaagataatgttgcatgtactgctcaaataaaagaaagtttcatcaaatgtgatgaaactaagcatatttcacaaaaaaaaaaaaaaattcactcatgagcttcagaaaaaaggggatatagatgtccattagatacgctcttgtgatgattttgcagacttgtttagaaaggctcttcttacaacaatatttgagaagttagtacataaaattgagacacgtcgactcaaagatttcaccagttaagataaacactgcaaagaaggggagataagaatataatgtattctttctttaccattattttattcctacaaggttgtttgttatggtatagtaataaggagacatatttttaatataagacattcaaagaggaatgttatgaaagaataatgatagtggatgtctttacctatgcatcatctactttattactaaatttattttatgtctcttataattctaattacacttaaggttatagtaattttcctatgttactcttataactctagattatttagttcttatacttaatagtcttttatcctataaataaagagactatcatcttgtaaagatatagaactaataaaaattttctctaatagatttgcgcttcgcgtggttttaataaattttttaaaattttacactaaaaaaattaacttttagttacgaataaaatctcaattcagtctaataatatttaatattttttataaataatataaaactatataatatatttatgtaaaatttcttttatttgtgattagcacaaatattaattataaaacaataaaaataaaagcacattttgaataaagttatttataataattaaaagctattaaaaatattttttttaaatgaatcaaatattataatggtataaatttttctgtaattaaaaaaattatcattttttatttatttatttatagccaaacttaattttttgttcatatatatatatattgaaattaaatatattaaaagttttttttttatttatataaaaatatcaatttaagtattaataatttaaatattgtaaattttaacgtttttattaaatgagaggtagatattttaaaatattatttattaattttttgttgcaacaattcattaaattaatgaatcatgatttgttatctttttttattactcttattatttataatattaattgtttgtatcaatttttttaaattagactaatattattattttaattgatgaatatatttgtctcatctctttcctagtgtcacatttttaaactcaattaagatgtatatatacataaactaattaa

SEQ ID NO: 26245 - DNA, 4967 bp, Cannabis sativa
  modified_base (4548)..(4557): a, c, t, g, unknown or other
gttaaacccactcgtcttccagctgctgcgtcgagaatcacattattcaaatgataatgtttaacaaaactattaatttaaaatatacaatatatatacaatacataaaaaatatacaatatatataattacaatatctttatacatacatatacaatataattacaaaatatacatacaatgtatattcaataaaaaacaaagtacatacatatatacttttaaagtttaaatttttaccttattactaaaatccggccaccaataccgactaaaatccggccaccacgcaccaccacaatgacacaatcttaaaaatctagaaaaaccctaaaaaaaatttacaaaataaaaaataaagtaatgtaaattattaaaattattagaaattagatttataccttaatggatgttaagattcaacgatttctccaccaaaagtagctagcggccagagctaaaatcaacacaaccagcacaaccaccacctctaagctcgttttatcctgaaaaacaaaacataagacgatcaaactctgagaatatatttttgggtataaagaatgcaagatttaaaaaaaaatgtgaaaacggatgaaaaatgaaaaaaaatgaaggatgggaggcgatggttgggcgaggatttcataaaggggctactggttatttttttgggaagaagacgaagtgaggaaaacaaagggctgaatagggttatacaaactctatggcgtcagatattttgtaataaccggcaccataggggacacgcgtcagccaatgcgtgctcctatagagtttgttattacaaaataaccgacgccatacgtagtgttattaaaaatttaacaccctatggcgtcagttattatgtaataactggcaccatagggtgtttttattaaaattttatttagtcacattctatgacgtcaattttttgttattaattaagttaaaaaaaaaagcgcctctaaaaattcattttgtagtgtatttaataaaatacatagaaataattccttaccggtggagactaagtaaatttctcaccttggaaagaaaaagttgaaatacattattaaaagaaactaaacatacacgtagcagtaatataatatacataaaggtacatatacatatgaactaaaatttcataaattattaagacatttcaaaactacactacatagcagccccatggcttgcatggactttcattaatattatattaatatgcttataatttttttctctccacgacaactcatttttttagatgaacaactagctattactaatactaacgaacccaacaaaagacatcaatctcatactaagcaatgataaaagctaacaccttgtttatacatttatgtaaatgtaatttcattcacaaatctaaatctagtctcaattcctagccaaagaaaagatgatttagtcacacacatatatatatatatatatatatatatagattggatctctaacatatataatttttagcacatgcttaattaatcatatataataaaaatttgaaatattttgatttatttaaacttggtagacaagggaacaaaagctaggaaaagaaaaggaaaaccaatttacccgtatggaaccatagattttatttttaatctctttattacaatatattagcttcatagaatttgagggaagaagaagtggctatagactcaactttttcatacatatattttatcaatcattaccactattattactatactactataactacaagcattgaagaagttcattagaaaaaaaaaaaaaaaggaaaaagaaaaagatggtgattattactatgatctttcttttaaaaagctacttgaaattgctaaaataaccttcaaaatatgagcaaatgatatcattctttatttatctgaaaatgatattattatcttattagttataatccctttttttgattggtaggtgtctaggtgagcaactcttgtttttgttattgatgcaaatgagatttagttaatgtcttattgaaatagcttggcatgatggacccataagggacaacacaacaaattaaaaagctatcatactttgttataacaacatttttatcgtaaaatttatacattttttttttcctaatttacatactttaacatcatattattttattagattgcataacttagtttcgcctcatatatattctgtggctatgttgagcccgaatccaataaatatattttaacttaaaagttttattagagtaatttttaatattgtcgcgatgttgagcccgaatcatcattgacttggatcttgaatcgatataatttatatatatatatatatattaggttaacattacgtacaataaacgtatacctagttatattcttaatttttattttagttatatatatttttagttgtataattaattttttttatttttttattattacatttcaaaacagatttttttttttttcactgaattttacatagaaactcatattgcaactagagccgcaacctaaattgcaacaaaaaatcgtatagttgcaactagcgctgcaaccactttaggaaccccaaccgtaaatttgaaaaaaaaagttaaaaaacagtatatgagatagttttttttttgtgtgtggatgttattcaataaataacatcattttttattaaaagaatgtttaattaaggtgatatttatataaaaaaatgtaataatattcaaaatttgttgttaattataactttagcttaatcataatatttttaattttataataattctttaaaaatatcataaactttttctatttttcttttaaagatattttttcggtaaccgtaaaagataatagctttacaacaacaattctttaagaaataagtagtttttttttttattttattttattgtttaaaaaggaaaaatattttttgtaatggcgttacaacagtgattttttaagaaacgtaagtaattttttaattttattgtttaaaaaggaaaacaataatagaaagatatttttttacatatgtggaatggataaaaaaactaattaataatagaaatatttatttttaaatatgtacaataaatttaaattttaaatgcaatgttaaaaaaaatactaggttatataaccacatttattatattatccaccatcattctctagttgcccctccctctttttctcttaaattttctgtctcactctttctttatacatctttattatattaaatgtgattgttaacatataaacagttgttctattttaaaacaatacaatttaaattcattacacataattacactaaaagtcaattttgtattactgaaattatttagttaaattacaatactgtaagttatttatctttatcatcactattataataaaatcaaatcctctaagtattgatgattgttttagttcttctttataaaatcttgaaatctacacatatatgcatttatacaaatttatttcatagaataaccaacataatccaactgtatgcatttattgataggcaatcttccaatagctcattcccctcaaaaaatattccaataactcattccaatcaaaaagaaaaccaatagctcattaattaattaattataattgaaaaattatcatccatatatatataaatatataaaatatcacggttaaataatttaacttgttttgggggccggatagctttgactttggtaaccattatgaattgattaattagtttaaagcataattttaagagcaaaacatgcaaagatttcaacttcacatgctccacgaaggtggtataagtaataacctattattattttatgaaacagaaaacttgctatatatattttaaatatttggaatggattggtattgtttttaatatataatatttatcttatactagaaataaggtaactaatcactaataattgttacccgcaaatataaaataaaaagtcaaaacataatcatttagagaaaattaatgaataattcgtgaaataatttttatcaactgaaaaatgaagaggatttccaataaaataaaataagaattaaccagttagctttccaatggagagaattgaaaaaatatatacatatatatatttatataattatttagtattgtgtggttggcaaactagtggaaccaatttaattgtatccattaattaaagagaaattctaattaatataaattatatgatgtaatgataattagcaacgttaaaacatcaattcatgtaagcacgatataaaaactttaaaagcattccaatattaaagaacaatttatttgaatctagctagataatgttgttgaatacttttaacctaatcaaattttagctcttgtttttataattttattttttaaaatgaaaatcactttatatatctggaggtggctccaatggttacatttttattgtaaccatcttgattacatttttttagccattacatcactattaaatggttgtgattaatnnnnnnnnnnaataaaaataaataaaaaataacttgtaacctgatattaacttgttaatttatttccttttaaaactttaattaagattaattatattttaaaattgaattaagtataattattaattaattttttacaatttattgttaaataaggatcttttagcaatttattttttttacacttaaattattttaatttttataacaaaacttttaataatttaaaattatacacatataatttcataattaaattttataattaaatagcttaatttaaaaaaaaaagaataaaaaaaaggtcaaaaaaaaggaatttattaattgctaaaaaaggtcttcttaaatatttatttaattacttaagaaatagttaattataattaattaattctaaaaatagaatttttacttatt

SEQ ID NO: 26246 - DNA, 2553 bp, Cannabis sativa
aaaacaatgaatagatgctaaaaaaacagagtaaaagaagcagaataagaagagtatgtaaaatttggttggcgagtagacttacgaatgcgctaagaatagcgaggaagagagtccacaatctcaaaaggatctggaacaagtgcatgagggggaagagcgattttaggttacgaagtaccagtatctaatgaaggggtgattttaggttgtaaagtaccagtatctaattcttgagaccctccaacacgatgcatgcgagagtaatgaagaggagaaggaactgtaggagtaatggatgattcagactcagagaatgggtcaatgttgaacaaaagatgacaacaaaagagaacgagtagtttcgataatgtgcctatacttttttgcagtcacaccattttatttggggtgttcagtataagaagtttgatgcacattgccatctaaggcaagtgaatcaacaaatttaattaaagtatactcactaccttgtcacatctaaaacatgtaataacagcatcatgttgagtttttacataagctcgaaaatgatcataaatactacaagtcagaacaatgtttcataagaaaaactcaacaaaaatgagtgtgatcatcaataaaagaaatatagtatcaataacccccttttgtaacaacaagagaggattcctacacatcagagtgtactaaattaaaggatgcaatagaacaaattgtacttttattgaaaggtaaagattttgcaagtttacatccactacaattagaaatatcatgatgttgcaaatttcctaaagttcctttagaggctaaaaagttttaaacgagactctaaaacatgatcaaggcgggagtgtcacaaataaaaactagaagatgaaggagacaaacgaaaagaaaacaagtctacactaggagctgcatatactagtaatgtcaattcatccaaaacatattattcccccgcctacggtcgatcgcaattagcttctgaatacataaaatacatatttaaaataataaaatcacgcctattaccaatagacaataattataataaaataggattactcgccaatatatataaaatagtaatatctccacaattatgtactattaaattgattcttttaatagatgagttaaaataactcaatcttttatagctcagagtactctcaatagatgagctaaaatagttaatctttttattatagagaaaaaaatataaaattgagctttcgacgagtgaggtaaattttgattattttacatatttttaatttgatgaatagtgcttaactaaatgtagagataactaattgagctaactatattttaatattatttttataatgtaaaattttttggtaaaatagataaagtagagttttgatgatatattttaaataatagagtaaagaaactgggagtgttctgaatagttttacctcttagctaaatatttttttaattatttttgtattattatcttctctttctttcacattatttatattaataaatacataaaataaattaagtgaataagatatatttgaaaatatataatatatttaaattatgtagataaaaaaatagaatagtttatgtatgttattatgtaaaagtttgatataaaatagaaaaagtagaatttagtaatgtattttaaaagatagattaggaaaattattatgagttttgagttgtaatttaactttatagttatatacattatctgttggaagtgctctttaaacttaattattcaagtctccaatatattcttctatattttgtttttttacattgatcattacaagtttatacataattataaccacaccctaataatattaattgtgtgcatttggttatgaacaaaaacagctaaaaaacaaattaaggaaaatgccgtattatacatatatacatatatatggataattaattattaaggtctcgtgagtgtttttctttctctccctgatttgtggtgggtgttaataccaatgcttcatcatcagatgtaaatagtactactgtgttctccctctctctccttttcattaattttgagtttttgatttttttttcttggcatgatcagatcagtactgacacatgatatatattatttatatatcttcatccatgtagctatagcctatatgtctatccattattatttatatatatacgatatattcgacaatagtagtcacgtatatatacattcacattatcatgattcagattgatttatcattatcgaataataccaaaaatttcagcatatatatatcagtcacattcacatattatacaaatatatgcgtggtctcacattattacagagagtatactgtatcagtataataatgtgaatgattgaatcatataatctaatttaagagacctctctattactaactaataactagagatggaaattggtcggttaatgtacggggaatgcaatccccgtccccatctccgttatctatttatacccccatccccgccccatcctcgtctaataac

SEQ ID NO: 26247 - DNA, 2652 bp, Cannabis sativa
ctttagcagcccaaaatagatagagatccaccaaatggatgtaaagtctgctttcttaaatggtttcctcgaggaagaagtctacatcgagcaacaattgggctatgaattaaaggggcatgaaggaaaagttttgaagttgaagaaggctttatatggcctaaagcaagcaccgagagcttggaatactcgaattgacaagcactttcaagacaaggatttcaccaagtgtctatatgagcatgcactctatatcaaaattgagaatgaagatatcttgattgtatgcttgtatgtggatgacttgatcttcactggaagcaattaagtatgtttgagaagttaaaggaagatatggcaaaagagttcgagatgatagatattgggctcatgtcttattacctcggtattgaggtggagcaagaagacgaatgtattttcatcactcaagaaggctatgctaaggaagtgcttaagaagttcaagatggatgattctaatccagttagcacaccattagaatgtggaacaaaattgtcaaagcatgacgaaggaagaaaagtggatccaacactttttaaaagccttgttggaagtttgtgctacctaacttgtacaaggccagatattctcgatgttgttggaatcgttagccgctttatggaagctccaacaataactcatttgaaaattgcaaagagagtacttcggtacatcaaaggtacgaccaattatgggctattttattcatcttctaataattatgagataattggatatagtgattgcagtttgagtggagacttggaagatagaaagagcactactgaatttgtgttcttcatgggaaacacagcatttacttggatgtcaaaaaaagcaaccaatcgttactatcgacttgtgaagccgaatacgttgctgcaacttcatgagtttgtcatgctatttggctaaaaaagttgctgaaggatttgaacgtgccacaagaggagctaactaagattcgtgttgatagcaaatcaacaattgcattagccaagaatctaatctttcacgaaagaagcaaacacatcgacacctgctatcattacataagagaatgtattggaaaaaaaaagaagtaagagtagaatatgtcaaatttcaaaatcaagcagtagatatttttacgaagccactcaagagagaaacattcatcaaactacgaagtattattggagtcacaaatcaagcttaaaaggggtgttgaaatattaaatttgatttaatatagttaatttctagaattttcttgttgctactaaagtttttagactattcttataattactaaagtgtctagagttttcttgtttgtttgagtactcttgaattttttagaattatctttcacttgtgttagtagagaggaaactatgtaaaacaatgtagaagctagtcatttaataatatttctagattagtccatagactataaatagagatgtaatcccatcattttgtaccaagtcacaaatcacacaagttgagatataaaatataacttcttccgttcaagtattctctccaaagattttttctattttccaacaaactgtatgcattcttactcttggtcgggacaaaacaacgagaaaagcttcacacagaagcagaaagaagacattgaggtaattcgtacgaggtgaataggaggagacaatcaatacagaagagataaaaattgtgtttaaattctcaaagcagcaatgtggcaaccaataattataataataataacaacgaaaggggtttcttctcaccaaaccatgtgaggtgttgagctcctcattgacttcaaccacctttcctttcctaatataggagaataaatatcacttgatgccttaacactttcaaatgcaccaaaactttctctctacttctttggtaactcaaccgaaaaatttaaacacacaataaagagacacattttgtgtttatagtacttaagacaaaacaaggaacacccctgtatttgaggaatagatgggttgtggcctgaaaataaaaaacaacccgtgtgaaatggagagctagtgataattaatttcctatacatacatctaatataatagtaggatcttcttcttcttcaatttctaattcttcctttatcgaaactgaggttgtggggtttctgaggagaaattgaattggattttaatggagtctgaagacctaaaccaccgaccgactccatctgctgatgaaacccctaataaacacggaggaaaataaaattaaaaacttaaagaatggcattctaattttttttagaaaactatggcatacaaaaaattataaaaatataaacaaaacaaaaagttctcacccattaatattatttaattatgccataaaaaattaaatcctcaaatttttttcataattcatgtaatttctactttaaaaaaaattgtggacaaaaatattttgtaaacaattcaaaaacagtttattgaaaaatgtatgaatgagctaaatatataacctaactttttttcaaaaaaatatattttgattaaaagactctataataaatttatttgtactaaaaatacgattacttatttattatatcttaaaaaaatattcaaaataaataaa

SEQ ID NO: 26248 - DNA, 4353 bp, Cannabis sativa
ttttagttcatttatttttaattaatcatttaaatgaaaaatataatgattatgagcggcaagctcttactcacgagtatgtggatcaatgagtagcaagctcttactcacgagtatgtggatcaatgagttggaagctcttactcacgttcatagtaaattaaatttggattttgagtttgaaaagcatgtaaaatgttgttcaaataaattttataaattaaattattgtaattatatttcaaaaataattactattaacgattataggtaaccatgaattttttctaatagtttactacttgttttttttttaaaaaaaaaaagcgtgcatatatatatagaacttaatatatatatatatttatagaacttaaacttccaagtcattacaaaggagttacataagtatgattacaacatccaaacacccatatcggttatgggtaaaagcttacttagccacattatgggctgaaaaattactacatctaccaacaaaagaaaacatacaaccaacaaaagaagtaaaaagggatttacaaaacttagagaaattatcaatctcccatctcgcatcaataccattaagagagttgattactaccttagaacactttctacaacaacacatttaaaacctttagcctttgtcgaatcaagagccaaacaacaagctgcagcttcaccacaaagagcatccgagaactgcaaatgggtcgtagtcacccactcaatctttccaagatgatctcgagcaataactgcagtgtacatggtctccatctccaccttgacatcacaattcaccttaatccactctagaggaggagggatccaagttgccaaaggagtaggggccactgagggaaaaagggaattcttataatcagcataacaaaaggtgatagagtcaattaagtatacaatgctttcaactctattgttatggatcttgtcattcctagcttttcaaatggtgtccacaacgatggacgcatagaggaaaacttcattcgtattaatgtccttgttacttaaactccaaataaatttgacccaatcccacatacgagtacccgagttcgaaacaggaaagatgccccaaggagatgacctccaaagatgaaaggccaaattacacaggaggaaaagaagttccattatttcttcgtcatccccaaacacaggacaaagggggtcctcctccttgaaccttttgttaagtatagactgaatagggagggcattcgatagtatactccaccaaaggatcttgtgacgctccaataacttactgttccaaagcctattccagagagaaggggcgacatcatacagcggagcacattccgaagcttgaatcaggtaggtagatttggtggagaacttaccattcccctccttcgtccatatccaacaatcactaccctgaccaaagggtctgccccccttgagaatagctgagacagtatcatgatcgaaaagacaattcaatttctgagtatcctagttcccaatttttgtaagaagtttagccactttagtaaatctaggtgtcgaccttccactagctttaggaatgaattcctttccatgggcaacccaagggtcttcccaaatattagtttctataccattagtaatacctttgtaggctcctttcaaaagaatagattttgctttgaccacattcttccagaaccaggaatctgaatctttaaacttacacttgaggaaatcaatccccctaagatatttggcctccaaaatctgacaacaaagagattgaattctattcaacagactccacccccacttagctaagaaagcttggttcatttctctaattttttggaaatccaaacctccacaagatttgagaacaaataacttgtcccaagccttaaggtgaatcccattataacctttattaaatccccaccagaagtcgcgaaccaaaccatcaattcttttatcagatgattcgaaagtttagtggtttgcaaagcataaactggcaaggccagtcctactgacttgataagagtggcatcccagccttagagagtatttttgcttttcacccttgcagcttagaggcaagattgtccaaaatgaagttaaaattagcatctttctgtttagtacggaaaagaggtaaacccaaatatttcacattactttctggaggaccaatgcccagggcctctcttattccccttttaactccatctggcatattcttactaaagaaaatagaggttttgaccttattgacttgttgccccgaccaagtacagaatctttccagacaatgccaaaaggctttagcttccgttatattttctcttcccatcaaaataatgtcatcagcaaagaaaatgtgtgaaagcaccaggccgccacgacttaacttaatttccttaatcttactcttccccagggcgtcctccaaaagtctagacaagatttctgctgcccagataaagaggtaaggggatagcgggcctccctaacgaatactgcaagatgagttaatcttcccaacaatgcccccattgaggcccacattcattgaagagctcgagatacactgcgttgtatccacttacgaagaatattaggggcaccaaaagacttaagaacatcttcaatgaatttctagcttatcttgtcgtaagcttttactaagttgattttaatggcaaaaaaaccttatttcccttttttctgcttaaatgaatgaataacctcctgaataatcacattattattattctggatattcctaccaggaacaaaggtcgcctaggtagaaaaaatcagccttgagaggacgggtttaatcctattagcaaagattttagaaataaccttgcatgacacattgcacagcgagatcggacgaaagtgcaaaactctcttggggtttgggattttaggaatgagcagcaaattagcagcattgacaccttcatgcataattccagacagaaaaaaatctaccactgcctcacagaagtcgcttcccaccgagtcctaatagtgctagaagaaaaggacagacattccatcaggcccacgggcattatgactacccatagagaatagagtagacttaatttcctcagcacaaggaagccgagtaagctattcttgttccccctgggaaagacggtcaaggataaagccatcacgaaagttaacacgaacaaaattggatgaggagaaaacattcctcagataatcagtgcattccttcctgattaagtcgcgcccaacaatccaacgattatttctatctagaatactttcaatggcattgcatcttcctctgattgcaacatacagaaaaaagaacttggaacatttattgccatttttaagccaatcaacccacactctttgcttccaataaagggatttcctttcaagggcttggtttagagattgatgaagaacaagttcctcgttccaaactcgttcacctatcgagagtttctgcatgatatctaacttgaattcgagctttttgatagtggcatcaagcttcccaaactggatcttattccaatttaacaacgttaagtgccccaattttcttgaagaccctagcgggagcccaggggtggataatagaattctaagcatgggccaccacaagtttgcttctatcatcacgggtccactcctcttcaaatttgaaattccttttaaagtttgtttccaaacctccaaagtacagacataacggtcgatgatcagagttactcgtctgaaggagaagacagaatggctttcagaaataaacacaacctccttgttaataattcccttgtctaatgcagatttaacatgggcattcccatctctgtggttatcccatgtcatcttatcacctttaatagggaggtttataaaccccttaaagctgattaaactagagatgaaagggataaaatggtccctccctttagaaccctctttttccgaagtatccaacacaaaattagtgtcaccaataatcaaccaaggaccactgaacctatcacccaacttcataaaatccatccagaacttctttttctcatggaaatacggcgactcatacacacaggagagcaaccaagggtgagcggagggattagaataaaccaagacagaaatttggttacgccttacaataatacttttaaacacaaaactagatttccaagctagaataataccccagcgtttcccacagcaggcaccgaaatattgaagcaaaattgaaattggttaagaatacgtaccattagtgacagatcaactttgagctcggataagaatacaaaatcaggtaagcac

SEQ ID NO: 26249 - DNA, 5689 bp, Cannabis sativa
aaattagaatcaaaggtaacgtctatattttatttttagaaaaaaaaataacaataaagaagaagagttacaatgttgctttagggaaactaattagttatttttacaaaaatattaaatttttagtcaaactttacaattttactactacataaattttttttacaaaaatactgtttttttataaaataacttaaaacaaccgtaaaacaataaaacataacaattaaaaacaacagtagaacaactaaaaaacaaccgtaaaataacggtgaaaacaaacttaattaatacagtacacagtataaaacttacacaaaaatacagtatttttgaaaaaaattccgtcccataataaaaaaaaagttgaaatttcagtatgtggtgtaaaaatccctattgcacaataaaccggtcttcaatccatttttaccaactcaagccctggtaaattgggttagattttatgtacactaaaactaagtagggagcggaacatgtcacagttttagaaatgggcgtagccgagcctagtaaaggttcatgctaaaaaaaaaattgaaactcaatatacacaaatttatataaatattaatgatgaggattcaggaaactttgaaatataacaaacatcaaataatttagcttcttcttttcaaataaataaataaaaataatttaacttctactttagcaacaaaacaaattaagagcatctgcaaatttgaggatggagtgaattttctctctaatgcagtactagccaagcccattacgagtttactgtaagctgctactgagcactgtgtagttatataataagaagtattattttttttaaaaaaatattacaatttaaatttaaatgaccacacttatctatcttattatttatcttatattaaatgtaatataatattttttttaatattacatttcaaatttaaattcattccacatatttaaaaaatatttttttatttttatttttacccaatctacatatataaaaaaatatttttcaacatattaagaagctctaagttgaatcaagaggaaaggttggcatcatgccatagtggagtccgattgccttaaacttgtcaatgatattaagaatgctaagtctttagtttctccttatgattaagtgctaaaagattgtgttagtttgttaacctctttaatttcagttgaatgttgttttgttaaacgatctgctaataggtttgcgcatgcttttgcgagagcttcttttttggaggctgatcgtgttcttagtggggtttctttaccttcttgttattcttccttagttttggaagatttgttttgaataaagctttgattttcaaaaaaaaaaaaattatttttctattgttgtttctttttaaataaaaaatagaaaaattaattatgtttcttgaaattattgttgtaacgtcttacctttaatagttatcaaaagaaaatatctttatattattatttaagaaaataaaaaaagatgtatgatatttctaaaaataatgaaaaatactataaaattaaaaagtattacgttaaactaaaattataattaataaaaaaaaataatcttattatgttttaattttataagtatcacttaaaatattttttaataaaaaaataacgttgtttattgaataatatcaaaaataaaataaaattatacaactaaaaatatatataaagaaaatagaaattaaaaatttaacaaagcatacgtgcatgtgcattgcataaaatattaacctagtttaagatttaaaaattagtttatgttgtatgagataaatcatataataacaaaaacatattatttttggtataattttttgtgttgtgattagaatttaatcaaaaatatgacaatatatttggtattagtacaacaccttatatttgatgttatggtttgagatggcctcagtaataagtaaacatttatggttgatataaggtatttgtgtccatttggtacttttttcttccttctatctcatattgcaactattaatttttttttttaatttattctttaagatatttctcaaatctcatgcttttttctatttttatattatatatacataagtttgtttatatttttctacattatttaaataatataattatcatacacagataataaagtattttacactttataagatttttatattatactacatattattttttttttatattttctatattatttaataatatatttataatatataaataataaaatattacatacaaaattacatttattaatttttacactaataagtaaacaaaaaagatatcttaaaacaataagaaattataactaaacagtgaaacttaaattctgatatatttagttatgcactataatcatctttgtacctattttaattacttattttgagtgttctaaattagctaaacagcattgcatgttagaaataagttgacatttttcatgttagaaatagaggagacagaagatacttaacatttaataatcttaggacaacacacacaaaaggaaaaagtgaagaaaagtaatggtaaatattgtcattaaacattacaacaaaaagcttacctttgacctttaaaatagctttcttaagctttgaagcacagccttcacagtccaagtttggaactcttacttccaccatctgaaaacattcacattctcaagaatctcacttctatgtaacagtggttactgagagaaaaacaaaacaaatgctgtacaagtaaaataatatactaagaacaacacacacttactgcagacattgttaatttttttcccagagaagaaggttttattagctgtttattagcactataacattatgtcaagggattattgaagaccttgtatagatagatatatagagagagtgagagtcatgatgagctaaaacagaggagcctttggattttgaaaagagagactaaagaaagcatgagaagtagatctcacgcgtggaataaaaaggtgtgactttgttaacccaaacaccaaagctgttgctgatttgataactactttaatttcaatttttctactgctcaaacgacacgctcttcccttgaatgattatcaaaatagtgttcagtgctcacccatacgacataattaattaaaccccattttataatacgacatgtagggtcgattactaataattttgtgacatttttagtacagctaatcttggttcttcaagctttgtcgaccacttatgtcaactgtcttttgatagatgtaaagtaaatcagttttaaggcactttagcccatttttcgagctgtttttgtttcccctgtaatgtctgcaaaatgtgcagaaaagaagctcttcacgcttttttagcactatggaaaagcttttgaaaaggctgaaccctactttactgaatatgctctgctaaaataaaagaacagttgttagaccacagatatgttgttggctgtgtcattaggacaagctatagtcaattagtcagaactgtggggttactatgaaatgtaaaagcttctttttcttttcctatgatttgtcaatataattatcgagatgcggtttacacaatttcagtaaacatcatcttattaagcaaaaataaatattaaataaataaacaccatcttaatgatgtcatatgtttggcatagggaaatttgataaaatatatacatccattaagtttaatattttttcctaaattaaagctaattaatattggccaattaggccaacttttgtgtattctctaaattactcttcccatttttcaacacactcccacctctctcttcctccactctttctcgctctcttcccaagctgaaggactaacactgacctaacccctaaattaaacatcttagactttcttaccaacccacgaccatcacgacatctcgaactctctctccaacccacgaccatcgcaaccaaaccatcacaatatcgaaggtaagatttcggtccttctctttttcattcatttcattatatttttaggttaaatcaggttaaaatgtatgagtttattgatttatttttaaaatgtataatgaatctctgtgattagtgagtttataatagatttacgattgagtttggtcggatttgtattttgggcaaaaagtagtttttacgccaggttcgatgcaaacccgattctttctattgtttaaataattaattgttgaagatgtaggttcgatgtagggccgatgtaggttcgatagtggcccgatgctacccattttcttgggtagcattgggccaccatcagacgtacatcttcaacatttactcatttcaacaatagaaagacatcgagcatgtactagaccaccatcaaatttcatatcctacatttatcggtaccatcagaccaccatcagacttacgtcttcaacttactcatttcaacaatagaaaggtatcgggcctgtatcggaccaccatcagaccctcatccctaacctttagactacactactatcgtacccaccattggaccactatcatacctgttattcatgttcccaaatagtttctgcacggaagtaccaagagggtgccatgtcagatcgtataggaatatcccgaattccccttttcttttaagataggatcagggaaggcatcggagtatccaggagagcacatccgttgtaaaggaggaatcgatatttgaagctataacctaacgcttccagtattcgaaagcatacacgaagcccactccttcagggagctctcaggaattaggtattccaggaggtcccgagttgcatttccaggaaggcccctgtgacctaacctagagatacactcgacgattatgccttgcctaacaccaagtcagatcttgtcccttgcgtcagatcatagttgtgcgcgtacgtgcctctgtagtgcttattgtccaacaacctatctgagatattgcttttaaaggagaaacatttgaacgacacgtgtccatgtcctcacgtgataacatgcgtcaattaagcaccgcacgatggaagagctacctaccaaatcaacggttagacgggtcttgtagtattgtacatccctatttgcgtgttgagtaaggaaccctagtggggtaagagggtatgccctcacccacctacgggcctataaataccttcattttttattggaaatatttgaccagaatctagatttactaacaagtatgtttcattaatatcctaaatatgaatatctctaatcaatgaaattaaacacataagagtttagaaaatcttacattggttgcagcagaataatattactccttccgcgatctctaacccctattcctttttgttgtagagtattaacaagatctgagcctggatctctttctctccttctggtttggttaccactgtcttactcactacgattgagtacttgacctgctatgtgtgggcatggcactctatcactataggcttgaattggagaagaacatgtgaaatcactacggaaggaactctctcatctactagttgtctgatataaaaaaacaagatttatggtaggttgaaaatccaagttgaaatgttccttttatagtgtttcaactaggacttagggctgaattatatggattaaaaa

SEQ ID NO: 26250 - DNA, 3703 bp, Cannabis sativa
caaaaataggaaaaaaatacaaattacacatttttgacctaaatgatgatcgaacggtgaaaattagcttctagtggtgatagctttttttcgtagcctagtgggtcccactgcgggtacccagagcttatttttgtaacttccttgggggtgaattttgacgatgatagctttcgaaatacgtctaaagtgtacgacatgacttgatagagcattgaattagcttcgaaactcaagttgaatcgcatcaattgaatcaaaattgagtgagttatggtttttatactggaaggttcatgtgacccaatgcccaagttgacatccagtgcccaggttgacatcccagcgactaggttgtatgacatcaacctgtacgttgagtaagtgtaaaaacatttaaggaatttactttaggatgcctaagtgatattttgacatcacttagccttattctatgttttggcaaagttggtcaccagttctcagagatgttgctattttgcggaaatgagagactcaaaactcttcatttttgagtaagctagaaatgagaaatgcaaagttgtgatttgacttctctgacttcatggatatttttttatgtgaaaaactaaatgaatggttgaaacaacatcagatttggatatgcagaacccagcgcactaggccatttgttaacttgggggttgggtacttactccagagctcgcgagattttgtttttcatacttataaggcttctaaacttaaggacgaggtatcttaccccctttttgaccatttcatatttaatggtcgcattggatttgacatttgagcaattgaaggcatcatccctggctgattatcaacatggtcaccggaccagcaccaggtcaacgtgggcgctgagccttgtttccaagggcctagtattgtgtttttcttctcaagtcttcttgaatattcattatttctgaccacaaaaaaaaaaattccccaaagactttttgcagaacttgattagaaacagcccaggttgacaatatgtcaacctgggcactaagcctaaccccaggtgtcaacctgggtgctgggtcccccttttggcccctcaaaaattctgtttggtccctagatatattttaatcttaatattttatgaaatgaagaagattctcataagtgttctcgaaaaattccaattaaaatggcctagattgacaaaatgtcaacttggtcacaaggctagccccaggtgtcaaccttggcactggtccctgtttttgtcacccaaaacttattgtttcttctctgaaaggacctatgtccttgtttttgacgaagactaagaagatgcaaaatttggatctccgattgattacttggaatgcgcctagattgacagattgtcaacctgggcgctgggtgctcaaggccctgaggccttaggtgttcaaaaatagactttctccgattcttattatgatacctcaaacatgtccgttgtatgtctagttgatgttccaatgtaaattttgacccatttgcactaagactttccttaaaattgaaaccttagttgaggttatcaacttaggcactaggtgaaaccctatgtgctagcgtatttctgcccccttagccagccagacctgttgaaggcttcctggttcttacaagttgtcactcctggccggccaggtatacatctggccaggaccttgctaacaggttcatacatctcattttgcttgtgtgtgccatgcaacatggaatctcaagggttgagaagctactcggcactaatcctggcaggttagtgctgacctatcttcaacgtattttctacttttttccatgtagaagagccacatcaggtggaaaaaacttaggataacacattcctttgcttgacgccccgaagaaactgaaaacctattaaaccctgaaagtgtaaaataattgatttaaaatttccatgacaaaagagaatcacatcattgcaaaacacaaatgcatcaatctcatctctttgtacctatgatggtatttaaaatcgtctagattatccactttagccaaaattctagataagtactccatataaatgacaaagagaaggggagataaatagtgcccttgtctaagtcctctccttgatgcaaaaaaagaccatgtaaagaattgtttatcatcaatgagaacttaggtacacaccatcactagattaatgaactttgttgggaattttaaagccacaagcatttttttttctcgaaaaattccaatcaatttaggcataggcttttttgagattcatcttcctcatacaacttgtaggaacattttttccatccataatgatggaccgaatcttagaaattattatattgtgagctatagacctttcatgaacaaacccacccaaattttgatcaataagatcttgtcaaatgaatttaagacaattacaaatcatctttgtttctatcttgtataaaacattacagtaaaaaataggcctgaaatccctaactaagcccagacaatatttttgtttaggaataagagtaatcatagttgcatttacctcttctagaaactgagtgtaagaaggaaagtatagcagtacacacatcttctcctattatttcctaattgtccatatagaaaccacttgtaatgactgcatgttagattatggattagtaaaggcaattaacattaattattgacatttttataattatttatgattttcttaaagtgtgggtcctatttttagaaatgggcattagagttataatttctcaattctagagattttattaaactctaacagtattatttattttaaatatgagttatgcaatttttatgatttttgctcggcaacgacaaaaaatgcgatggatgaccgtttgagtcacatgggtaagtttagaacctatttcttagtaggaaaaatatttgagatatttgaaatgtcggatttaggcggggttatggtttagaccattttacccctaagcttataagttgctcaaattggaagtaggggcattttgggtattttgcaatagggcttgaggtggctagcttgcagcttggcagcaggcacttaaattttattcagccttatccctttgattaatttgtgagaataattagtttaaagaaaagacaagaaagaagaagaacaaacctaattttaagcttcttttctcttaaccctatgagcccagctcatttcagcaacaaccaaagaattttaagagaatttgaggagtgctaactggattcaagcagagaaattcaaaggtattaatcctagagcttaattttttttaggtgttgttagttttctttagctttgagcatgaattatggaattttggtgttgttcgagttagggatagtaattgattgtttgtagcagtttgaaaaagttattttaggcttgaatctggtagttttggtgcctaattcttaggttgagaaggtttgagttcaaataaatcaaacttgactcaacaatggtgattttagttttgatgtgattttgtagctgttactgtttgaatgttatagtttgaggttggtacatgtgttttggaaggtttggacacgattttcatttttgggatttgtttggggttacatggtgcaaaccggttaaccggtttatagaccttgtaaaaccgattaaccagatcaggga

SEQ ID NO: 26251 - DNA, 3692 bp, Cannabis sativa
ttcctcatgattattaatggcaatttattgtaattaatgataaatagtaaattattgtttggaatttttacaaaaatactagattttgtgtcaaagtttacaattttactgtcacacgaatttttttacaaaaatactgttttaattaaaacaacctaaaacaacaaatcaaaacaattaaaaacaacagtagaacaactaaaaatcaaccgtaaaataacagtgaaaacttaagatagtacacagtataaaacttgcacagtatttttgaaaaaaaaaaacacaatatttttgaaaaaaaattcctccccatagtaaaaaaaaaaattaaaatttcagtatgtgatgtaaaaatcccttaaaaagatagttttttttttttttgaaaatgtaaatgtacccgttatacaaaaatgtaaatgtacgtaatagcaaaaattattgtatgtcaaatttaaccatcttgtagcataccatcaaaaaggttttctttttcgctcatgtattaatcctagactagtaaatggcgttgtttatgcttaggctaagttaggttaagtacttttaacaatatttggtgtaagagtgtaatggatcgggttggatctgatgcggctataattcgacatgatctacatcatgtaaggatccgccctgctagattagatactcgaatcggatcagatctgactcgactttttttttttgttttttattgaattttaatttaatatctaaacttataattttatatccattttaattttgtattagtattattcagtacaatactatgttttgtattgagttatattaatagattgtgtaaaattataatatattttcaaaaaactcgaccctaacaccaactacgggtcgggtccgggtccggatcccaggtctgggtctggattcccaattatggtctgtatcccggtctgggtctgagtcacaggtccgtgtttggattcgggtcctagtcttgggtctaggtctgggtacaggttcgagttcgggtacgagtttgagtgttggtctgggtctgggtcccaggtcttgggtcccaactcccgagtcatatgtccgagtctaggtcccggatccagatccaggtctcgggtccaagttttagtcccgagtctaggtccaagtcccgagtccatttctcgggtcccatgtccccgatccaagtctcgggtatcggatcccaagtccaagtcctagttccgagtccgggtctagatttgggtcctgggtccaggtctggtccggatccctggtttaggtcccgagtcttgggtctgggtccgatcccaggtccgagtccaggtctcgggtttaggtctggtcccatgttcgggtctcgagtctcgagtttaggtcctaggcccaagtttgggtctcgagtatcaggttcgggtcgggtcttgggtctcaagtcccatgtctgggttcgtgtccgagtccgggttcgagttccaattctgatccctagtctgggtcctgagttcaatttcgggtttgagtctcgggttcgagttcgagtccgggtcctagttctgggtctgggtctcgggtccaggtcagggtccggagctgggaccagggtcccagttcgggtcccgagtctaggtccgagttcgggtttgggtccgggtccagtttgagttctaggtccgagtttgggactcgagtttgggtctggttcgagtgtggtcccgggttggggttaggatccgggtctggtcacagattcgggttcgggtctcagaatctgtgtccgagtccgggtctgggttccaaattagggccctgaactgggtctcgggtttgggtccaagttcgggtgtctgggtctaggtccgggtctgatcacgggttcaggtccagttacgggttcgggttcaggtcctgtatttccgagtcctaagcttggatcccaggttcgggtctgggtctcggacttggatcctagattcgagtcctggtccgatcccgggtcttgggtccaggtttgaatcctaggcgggtttggttcgggtatttctctatctcccacccattggaactacatatatagcaagtacaatccagttaaacaatgccttggatggagcactcgggcttctggaagtacctatctttgcgcaaatacaaattaagagcattcgtgcttccaatgaactggtttctaaaagaataaaaataataaaataatgatctttatgtttaagcaaacacaaatacccagtgtgcagttatcatatcaatagaacacaagcatattgataataatcataaatgaatgatcgtaaattgaacagagattctccagttttggcagacactgaaacgccaagatagaactgctatcttgtcacaaatattattcagatcagaagaatgaaaaaaaacgaatactgactcattttgcttaagcacttttcacatattgatcaacacgtgagatgtgaaaggatttaagtaccaatcaaaatgaacaatatacccaagacaaatgctaaacaaatgggatcatccatttgacatttcaacaaatgctcactaaaattatccaatatgatagaaaaacaggcaagaaacgaatgtgtccttcctcacattattctggaattttgagatatcatctcgtatgttgtatcctaaaacaaaaagtttgtattcgataattgtcaaaatcttttttattgtcacttaaccatcttttatagcattagcactaaacattaaagccttcagctcggagacacatacgatgagcctcgatccattttgtacaagcgtcttccccatgttccacaatacattcatctctcagcctcttggtatctgggcaggcacagcaaattttcttcttcggctttgtttcgggtgcaggcttattgataggtgtttcatgtttttgctgggaacttgccaaagctaaagtagacgaagtattgtctgttggtaacccacccattgctaaataaacttggaggaaatgaaattgaactctgaagacaaaaaaaaaacagaggatcatgaacagtaatggaagtattatgcacttcaaagttcatgggttaaactagttcaagtaaaatattgtctgataaaatggacgaaaacaaaaactaaatatgtctagatgactagaaggttgaaaaacaacacttgaatatctacagcaagattatgtaacaactgagcaaaaacaaaaaccaattcacagcctaaatagctcacaaagtctaagctttattattatacagttgcacaaagtaaatactacaaatcaaaagtaaaacccataaaactgagcataacctcaacttagatataaaagtaaaataaaaatcacagttgaagatgtcctcaatgattgtctaggccctttaagactggaatcaacttaaagagaatttcctgttggattttcaatcgaccacatttactaacctttgaattcatggtggttcgtaatgggctgtaattgaaaatcaaataaaacattgattcatgcaccaaaagcaaaatccagtacatacacaaaagatccattaattatttgtactagaatggcgaattgttcttcaactggacatgccacaaatcttattcaacggtgaacccttttgggcctttgatcaaacatatggtgagtgtatttttatatatgtatgtaaaaa

SEQ ID NO: 26252 - DNA, 1264 bp, Cannabis sativa
tcccatatttttgaaaataaccctaattaataatacaatattagcattatttatttcttagtcctataacttcaccatatattttatattacaaatatagaagttgtattgtaattaggatttttatcttctgatcgactttaatatttattaaattatattctctgaattttttaattcgttaaaattttttctttaaagtattgaaattgttagatttaagtacttctgtctaatttcattcaattttactaatgcgacgattgcccatgtactaagtcatgtcttccaaattttaatatctactaaatcatactcccgaactttaacatgtaccaaattttaaattttcatccaagttaaactttttttaataaaattagataaaaaattttaaattcaacaatctcaataattcggacaatttttaacgatctaaaaaattcaaaaagcataatttaatacatgtacacaaaaatccaaattagcctcaaaataaactaaaaaattagtacactaaatattatttttcaaaatactaattgtaattataatatatattgttatataaattttttaattataatttttcctcatactatttttttttctttaaaaatccctacttataacaagaaaagtggtataattattaaatactatttacatattttttttaagcaatatatacataaatttaaatgataagataaatcctaatcaattttagctgttaaatttgtattcaatatacatcctactttcattttgttttcttgcccattttgttttccatttgaaaaggactatacaaaataatataacattactttaaatataataatacaatatcaaaatatctctcaattgattctttatttttgtaaaatatccctgtcaaaaggcaaaagcaaaacgccaaaatactaattctttggccttttattttattttatttttattatttattcttaaatcaaagttagaatacaaacatacataataaaaaaaaaataattaaaagttgttaaacttagtgctctatcatgatcttaaggaaaaaaattatatagtaatccatcaagacatacttaattactaattaaactatgtaacttctaataaattaattaatattcttacccactcatcattgaatatacccccatacaataactatatatgtaaaacattttctatttttaagacataaaaaagttgtattctaaatttttattggaaaatttttatttttacattttaa

SEQ ID NO: 26253 - DNA, 5564 bp, Cannabis sativa
agtgaccacatgaattcttctgagcattaattaggtttactacaaaaccatattgtggtacctcaggatttcgtggcaaggcataagtcaaaattgcattcaatatttcaaggacaagtctcagaaagtctgtatatatatgcatctctgttgactgctgagaaagatcaatcttagcaaacaaagaaacatctttttgccgtcaagtgtaataagaaaataaatttcacaattataagtgatcaccgtatcatcagcaaggccattttcttctttcactaaatgcccgctattatctcgtagttcagccaatttgttatacctagacatcatgccaagatgcatagttcagtaaaataataccacagagaatatgatataggattactacaaacctactaaatgatttgtaaaatacaaagctcatctttagagcaacacatacttccgtgatagcatatcgaaaaggctgaccagcctttgtgatgcatatgaactcaggcggtgtacatgaggtgccatgtttgccaatgttgctaaacaagtagtgtggagataaacatcctgttacaattcattcagcataagaaagatgaagaaaaaatgatatgggaagttgcagatcacaactgaaatagctcagcaacacattactgtctaaatctacacaagcacaagtttatttcgcgttataaacttacaaatcaccaatatgtacagaagaaaatattgtattataaatatcaactgattaattatgtttgtcgaattgtcattgacacaaaaaataaaatattttgtgcgcaaattaaatggattagtgggggaaatttttggttgtcctggggagaaaggagcctcttcaactgactagtttaatgtactgttctgagttttggtctaagatcagccaaagaaaaaaaaagatcagcccaaatatttgtcactaacacaaaaaatagcatattttgtgcgcaaattaatggattagtgagggaattttcagttgtcattggaagaaatgggcctcttgaattaattcatttaatgtacaattctgaggtttggtctaagagcagcccaaatatttgtgaatacagaggaagtgattttctcctggtgatttgtttaagaggatgcctagtatcctataaaaaacttcaccaggattgtgtaagcttcaaaaattagaacttgtggaagcgagggtgacttccaatcaggtaagttttattgaaccaaaaactcttgacgtggctaaatgatatcagttcggtgtctattctcatacactgatatctataacatgacaacataaacttgtatgaatcccatatgcatcaaattagcagactacaaaaggtgttgctaattaaatctcaagttacatggcagtctgatattgaacctggtaaagaaatctagcacatactatgtatgaaagaaaagtcttacccgcagctttgataggttatactgcacagtccttatcaagattataaccatcaaggaaccaagagatgtctgatggagtaagcgttccttataccagggaacactcagaagtatctgtcaatgagcaaaacttattatcatgatccttatttcaaaaggcatacatcaggaaacgatcagcagaggcagtcataccaatttgtgaatgcttgcattaaaagaagaatcttgactgagcatgagaagtataatcagcaacatgtaaatttgatttgaggacctctttggagcattgtataaagcttccagaacaggcatcaactgtcaatttcatcacagaattccatttcagaattagccagtgatacagtcaagccagggtaaccagctcaatgcattaaactatgatgcgtacaaaatattaggtaatggaaagtgtaaaagtacaaaataaataaataaattaaaaacgtttgcagtgagaaaatgtcaaattcttccatttttttttcccaaggaaaatataagttgttgttgcataccaatgtatccaaatcagttcgcaccaaaacatattccaggaagtcagagttgccttgaagtaatgagtaaagcaacagtacagcagcctcatctgccaagcacctgctaaggcagaaccaattaaacaaagttataaaagtagcactagcaagtgatttaataacctaagaaaatcatctgaaatcacttaaattaattccatgtgaaaagaaaaaaaacacactaggttaacggtgcacaccaaccactgctaaaaatgattctacttatttacgttctacaattagatttagttgctatttatattatttacaatcaatgactggtaatttttttgggaatcataaatggcacatacaagtcattagcaacaagtagcatatagctttattaaacagttttcttttctctgtttgttcttgcataaagtttgtacagtaatttgttgtaatcacagccttcctcagcataagcgaggactcaatatatttgggaggaagtcactcgagaacatgtaacctttgtctctctttaaggtaaaaaaggaaaagatcaatgaaagttttgtgccaaattgccaagaatccagtcaaagataaatagaagcagccaagaatcagaatagtttcatatattcttcacattaagtgtaactttcattcatatcccccaaacagacaaggtataaaataggaaaagaaaaacttacattccaagagtatcaaaaagagaagcaaaaggtaacctcagaactggtccattgggaacatttgcttccgtatctaagcggtcaactgcagcaccgtaagcaaagtcatcattcataatctttattttattaaaatgaagaggaaacagataattgagataaatcgtaaatgcaagccatacattcaacatctgttgcattctcaagggctttgcagaaaggattctcagaaaaacatgaattttgtttcaaattggtatctgatgcagtagtgtcatcacttttgtcaactataaactcatcccctactatgcatttgcgataatgaattagaatgagtagaatatgaagactgctgtctgccagtggacttctcgagccttccccacttgaactaaccagataattgaatggtagcaatacaatatttgctgcaagtaaaacataaaataaaatagatcagtttccaaacttcaaaattttgcaaactttaaagattcttttgggatcatagaagagatgaacaagaaaaatacattaaggcttcatcttcagactaacccaaataatgttttccactgaaatcacttttgtctctgtaattttgaacataaaagctggaattgctttcatggagagaaagtacatattaaagtgagcatgaaatgctgttatagtcttacattacagtatgatgacaccctaaattttattataggtattacataaactatatttagcaatagaaactacataccagctgcagaacccactttttgtagaacaccaccgggctgactttcctctggaaatagagaataacgtgcattgttcaagggagggcgtgtgatgtaattgagtagcagcctacgcactaccaacataactaaagacctttcctggaggttaaattattgatgtaagatgcaaattagataaataaaaaaatttataaagttgaacaaatgctaagacaaaaattttagtaacctgagccattgctgcatcaatgaaagggttcacatctttcagcccaggagaaggcccagaaagaagctgagtcgacattgcaatcagcatgaagttgagcagttccaaatggaggacataagtattgggacttgataggaaacagatatataacatagagtcaggaagatagtggctataataataataatactaaataaacgactgaataccccagcacatacctcacatctattgaaccaatgaacctaagcacagaattcataagaaagtcctcgattgtttgtcctgcaaaacaagaatatcaatgacaacaagatgagtagatgctaatcatgctacaatgcatttctagaatgatagcggcgagggatatatgtatatacatatcacatgcagccaacagcttttacataagtacattaccttgcgtaacatctgcaggcattgcttcactttcatctagggagagatacagctcttcaatcctttcagtttttgcattttctatcaagtactttagaaagatagatgaaatgtacaatgcgtttagagctttcccataaacaacagatggttcaccagaagtagaaagtgactcttgcaaacaccatgccagatggataagaatctttgcaagatgtcttgtatcatagttatttcgcactgcacatatagaatgtgaaactaagtgacaaatagtaaattacaataggtaactgaataagcatgttagcataattggttactagtatgatattttgcaatagttcaagacacagaaactttcatgatactaaggtccttatacactgaagcataaattttggcaaaatatatatttaaaatttattatgcctaacacaaaaaaaaaaaatattagtttaaatgagtttttgggctcttctatccagatcccgcctcaaggttaaacactgacccaatacaacattacattgcaagtgtttggtgagataatctatttcagactccagattactataatctccattagtgcctaatttctggaatgcagttgtggcttggacatgctgagcctctgtttgttacttgaattttaagaaagaaaagaaaaatagttcggacaaacagagaataaatccttttcttcagagaaaatgtgttaaattaaagtaattttacaaaatttagaacttatataaatacattcaaaagaaggaagaatatatattgttagaaaaatgttttcctctattcctctcacaaaattgttcttgggcaataatatctacgatcaaaacaaagagatttggccatttgaggcttgttagaattgtttggttgggagagtgtgtgaatgctctaagaatgtatttatgattttttttttttttttttgaatgcagaatgtatttatgtattaaaattaaataagtattgatgggattgattcgacaaacataagtatactgtatattgcaccataatttggctatggatttacattcccctgtgtcctttgtagtattctacatataaacatacaaacaaaatgctaaagtagtttgaggaaacatttaacttgctccacctagttccaaactgtaagattcgttctaatgttcctcatattctatctttggtcagttgtaggtaattattcattctaatagttttatgacatctacaagaaaactttgtcgatttcaacaagaacctctcagtaagtaccatgatcgagcacatagttcttcaattacaaatgttttcctctttttcaggaaaattgtgctaagaaccataattgcagacatttaattcgtttaactacataaattaacaccatgaaatacgaagattcaactaaaggatccaacaacaagaa

SEQ ID NO: 26254 - DNA, 1967 bp, Cannabis sativa
ttgttgtttttatgtttttgtgaaataatcccttatagaatacttaccatgatactttttgatacattaaggaaagctccattattgaaaataatatgtcacttttcataatatattctatgaattatacaagagtatgataattttttttttataattgtaaatgacgaaagctgaaggagtcacctactgtgttggttattttgcaaatatctaaaatagtaagagagggccctacgtatacaacccctatagtaatcgaaagtctaggggcctatgcctacaatatctttttaacccttatatcactatgcctatgcctatataagggcctatgcatgtgtaacgcccttatatctaaaacatgttatgtattttttaaatactatgcttacttttgctaatcaaagggtttacgataaaagtgtgattaaacagacatttgtaatatttaaaattttaccaaaactaaccttgtttaaacatttacaaactgggatctgatttctacatattttctataatattcagaaagtatcgtcaatgataaaatactaattactctagatgatcaccatagatctcaatcctctaggtcttggtggtcgatatgtacaatattcaccagagccctcgaaacactaccgctgatcagatttgcttttgtaaaacctaaacatatagtgaagcaactgtaagtcgataaattcagtaagaaaaatatacataatacaatcatatatcttacttataactgagcgttcatacactcaattaaccgtatttaatgcgaaaactaagatctaaacgtttgtacgtatagtatgattgaccataataccaacctaattctaatactctaatcgtacatgatattggtaggattaatccatactattccatactacctaacatactagatatgagtatcttggtgcaactccatgtacacacatattgctatctctaatatgctagctatatggcaatatcatactattgaacaccctttagtatcactagatatcaatatttaaatgcaactctatgtacattcatactgctatctctagtacactagataaatggtataaaatatgtacatataaacatgtgcatatatgcatctaaatacttttcttaccttaatttctaattcaattgtatctatcaacctgagtggagctcggcaatcggaggccctaaatcacattaacagtaaattgataagtgtctcgctaaaacactttttaggactaaaatacatgatctgaagttttctatcgataaataggatggaaatactctaaatatcctaaaaacatgaaaatcaagatactcttgagactatccattcgaataacaagaattcccactcgtacttaatattacgagctctaccaaaacaattgggtgcttgattctgcctagacactgcaactcaaaaaacttcgtattctaaccttcttaaatcgaccctaacttgtctcaaaccttaaataaaaaaatttaaacatcaataataccaatattacaggttgtacatcggtcggtttgggcagtttatcctatatattttttaaccaaatctaatgttcgggttgctaaaatttaagtgcaacccacccaatttttaaaaaatatctgtaaaccgattaacggtttgtgtaatttggtcgggttaaccggccgcccaaaccggccaaacttttttcttttttttttttttggctgtggaaccttcctgcagtttctctttcactcttactgtaataccctagaatttagaagtggattagcaaaaccctaattagatgattatgaataattgagaaattatattactatataatttaatatatgaaaatttatatcatttatgctatgtaaagaccctgttggtgagccaggggcattttagtaattttgactcgagaatggtgaaatgatgaaattaatttaattac

SEQ ID NO: 26255 - DNA, 3047 bp, Cannabis sativa
  modified_base (32)..(44): a, c, t, g, unknown or other
tttagggtggtaatcaacatacttgtgagtannnnnnnnnnnnnggtaaaataatttccaacagcaattacttaggtggcttctattatttggatactcattccaatgatcataaaatcatcgttagactccccaataagaaagagttcaagcatgacttcttttggacgacaaggcttcatccaatcaacaccacccaatttagaattttacgtaagtatccatcatcccaaaatcttagttttgagttagaattttgtgattggacatttttactaagtctttgttcttttatttgtccttttcagctgcttcaaagagaccagtcccaacacctgtgattcaaaggcgacacaaaatctttatgaatttacctttatggcttgtgagcggtagacttccttcttcatgattcaaatttaaagtcttgtggtcttctcgatagagaccaatacacaatgaattttaaggatcccaagtatcccacatggaaacaaatctcagtgcctgaagaagaggaagattgtgacgacatcgctcgaacccattacgcagataagttaaccacttgggaagttgctgaggctaaagagggagctccccgaggtaaaacttcttgcttttatggatggtcttctaccgtccttaggactgagccaaccaatttagtaaaatttagatattcaatgtaacttttacatttggaacgttgtagacttaatagcccataggtttcatagttggtaccctcagtttcatgtccaaacttcatacaatagctccttttatgggattgcttatcaatatgggactaataatttgcgagcggatgactgagagttatctcctttaaatgtgtttgatctttacgataaaattgagtctaggggaactagtggtccttctatttttgaacctcctcgccttgatgtttcgcctctccgagtagcttttaaccttcttgattatagtttaggttgaatattactcttacgtagaaagagtgtattcttccctttctttatttttaaattttacttccttacgtctttgtatggatggatgatttggagaatctcctttgcatccctggtgtctcgatcaagcgaggtaaaaaataaagagccgttgaggcagatacttttgaaaagtagtccaaggttcccaagaagaagaaggaggctggaaaaaagaatacttctaccactagcattgttctagaaaaggacaatgttgccccagctgatcctacttcatcccttgatctacgagcatagaaaagcaaactttggggtctgttcaccatgtcactttttctacagccaaactagaggttatgctgttggaccccatttgtccattgcccttggatgctggtattgaaggttccaaggcctgctcgagatatgtaactcaaacatttttccattttaggacttatcaatcagatgattggaacttgatcaataacggtgctcccaacaatctcttggcaagaattgtgaagctcatgcaatcagttagttttcaattttcttgtttcatcataccttttctcttttctctttctaacctcgtatcttctttcctagcacacttgggccatcagaacaatctctaaaatttaaatcatctatccctaaaactttgcaaagtcaatgaacattgtaagctgctcactcttcaaaggaatgatgttgaggcagagtctacttgccttaagaagaaagctcaagatatggagaaatctaagaaagagttgaaggtagaggtcgagaatctaaaaaacaactgcttgacgccactcaaaaagccaagaaagacctcgacgagataaaagaagatgttcgtgcaagagttactttaatggccaaacgctccatttacaaagcttggttgacaaacaaaagtatggaccttagctttttaggtgatgttgtcgagaagatgctaacttacgtcaagcagactgaataggaagagggggtggctttgatgagggaaatgaggctaagggtgtcgaggatgaaaatgaagtgctctctaattctcttactatgtggacttagttttataatatcatattttgaacaacggtcttctggccgagacaatatctggccctttgtggcatttatgtttatgtaattaattctattttactttgttggatggacaatttaattttttttaatcacactatgatttattccatttcaatttaaatgttttgttaattttttgtgagaaaattttattcgagttttaattttaaagtgcgaagcaaaaaaatacaccaaaaaataatttttttcctctatgtcctctctttatctaaccttaatgaaaacttaacaacataattgagtttttacgttaacattcatgcaaggacaaaggcagtctttggctattggggggccaaattgtaaagaaaaaaaattaggggtggcaaatataaattctccaaaaaaaaaaatcaataaattaaaaaaaagaaaacaaactaaaatttatatatcaatcaaaaatttgtaaggggccatggcctcccccttaagtaagatatatccctgcattcatgataaagaggtgttgatgctattaattatgttagttagggtagaacaatctgaaaataaagaatatattttattcactattccatctcatgaatatgtatttttataacaaaatattattgtaaataaagcttgaatactagagtttgacgtttagttggagataataaaataaaatagaatagaaaaaaaaaaaacaattttcatttcatttctttattttattacattttaaagtattaaaatgttattctaatattatattttttttactattttagtagaatgactatattctattttaaaattaaaaaaaaatctattttaatgtaacatgagaaaaaataaataaataattttttttatcagttattttatatattttaaattttatttcattctattgccttaagatctatatcatcattgttcaatttatacttttattttaggtctccaattcta

SEQ ID NO: 26256 - DNA, 3133 bp, Cannabis sativa
tttgctgcaaaaccattaaaactctttccatagctatgaatttttgattttctggctaatgtcgcactgaacaaagaacaatagtacaattagatgaaagaattagataaaattattaacaattttgaacacatattaaaaaatatttaaggtgtccaacacattaaggtggttttaattgaaatgaacgaaaatataaatacataaaaaatattgataaaaaaatcattaattttttttctcttcctattacatcagaatttagaacgatttttctttccatttgaaaatagaatatagttattctaccaaaatggtagaaaggacattccattagaatattattctaatattttaaaatgtaaccaaactaaaaaacgaaatgaaaattgtttcttttcaatttcattctatttcattacttccaatcaaacgtcatataattgcttgtgaaactgttattttttttttttaatttttatgatataaacaccttaagataaatgtagttattgtgatattaatgatataaatatgctttgttacttactctccaattgctgactcaagcaagttattgtgactttgtattaccattgatgtagtttgggaggaacttgctaattctcccatgtatacaatgtagggctgtagttcatcaaagcccaaaaccataattaattaacattaccaagaaagaaaaataaattgaagagatgcagccatgtatatacataattaaattctataaagtaaaatgtacgtagttgcaaatagattaaatatttatatgtatagtgaatattgaaatacctttctttcatctgatccatgaactaaagtagctaccaaacaaatattgaaagaaagaactaaaagagtttctaataatatcctcattgttgttggttaatataacttttctacggaataatttgtgtatgtgttttacaatatgttgaacatgaactaaaaggtctatatatatgtatgtatacacacacacttgctctaaaaatagatagagagaacggatttaactgtacatgagttttagtgttttaagcaaaaaaataaaaaacaattagtgaatattggaataaaggtttgactgaggaatttggtacaatttagttatggctgagagttcagtggcttggaaattggatcttatgttatataataattaattctggccatggtaataataatgttatttgaaatttgggaaattgaatgacttgcttattcatgaaatttccaagtacaccatacaatggaatttcaacgtttccactcgtccacatgtttgtaaggagtggttctgtcctagtctttaggatttggtaataaaataaaaaatgttggtattaaacaatttatgttatgtctgtcaaatggtgattaaaaaagcaataaaaacgagttaactaattacgtgaaacaatttaattagaagtgtatttttggtattaataattatttagtgtttgtgacactaatgcttgagtaaaaaaattggaaccaatacttattgttattgattgttatacatatatgtgatatttgattagatttagaagtaatgaaatggaataaaatacaaacgaaataatttttattttatttttttatttggttgcatttttaagtattggaatatcattctaatggaatgcgctttctatcattttggtaaaataactattttattttgaaatagaaagaaagaccattctaatgtaatatgagaaaaatgtaatgatttctttatcaatttttttatgcattttaaatttatttcattttatttctaaaatctattcttatttctatttttattcctatgtttttattcattctaaccaaatgctaaccttagtgagaatgttagtcgttgaacgttaagtttgtaaatgtgtatattgattgatgtcaatatagagcaagaggcaattgttagaggagattagatttggttgatgtcaattttacaatgaaaaaaaaaacaagagtttgagaagtggactcatcctgtgaaaaaataattttaaaaattattggcaagaacaagaaggttacaacaaatatttgtttacttttaagtttaattatcataaatttatttaattttgtggagtctcaaactccaaataagaaccaatacaacaccaaaaacagaacacaatgatcaagaacaataactgaatataaaaccagcaacaataacaactaatgaaagcataaaatcaacaccaagaacttacgtggttgggctacacaatcaagatgatcatgagcttaattcacgggagaaaacaacctcaaattggctgaggagatgaactttattatgtttgaacaaaggttacaaaaccagggtaaaaacccttcactcaatggagtcttgctccttacaatgtgtctcactagtgactctgtcagtcaaacacatgagaggccatttacaactcacaaacacactctgattttctctctaaactctctcacttcagctgtcttaaacacacacaaatgtggggtattagtaggcactcgggccagcacacttaactaacataactatcaagatagttaggttagttgagggagttggccaactgtcaaaactgatagtgagtgtgtcctagttcaagggttcaaacctcaacaaattttacttggtttgatctcttgaacacctttgtaatgacttgccaatagaagaactgctttctaagtccaatgtaggttgtctccgtgaggagacattgctttagttgattctgagtaagtttaaacaatgtctaaacttgtcacttgtggtactctttgtgaaaatgttagcagggttgtcatttgttccaatcttctcgacttgaacttgttttgagctgattatgtcacgcatgaagtgtaattttatatcaatgtgctttgacctctcatgaaacattagatttttcatgagatgcaaagcactttgattgtcacaaaaaatagtgatgtcctaagagtttatctccatttcatttgatattcctttgagccacatagcttccttaatggcttctatattgcagccatatattcattcagcttcagtggatgacaaagcaaccactttttgcaa

SEQ ID NO: 26257 - DNA, 1078 bp, Cannabis sativa
ggggggggggagaaaatgcttttttgattgtaaattgaaataactatttggtatataacatattttgtattaatatctttgcttctgctttattggtgactatactgggtctcttgtgggtaaaaattatgttttgcaaatttacagattgttttttttttctttctctcattagaggttttatgcatagtaacaaatattgacttataggattttggaactgatttatgtggtgtggaatgaaaatgataaactacatttttggagtcttggttggacatgtgagttcagctgcatccaattcatacaaataaattgcttaaataatacatttgtattaagcaatatttttttcttgtggtagagccacatttccctaataagatctattatgtcatcagaaaattacaccatgtaggcatgtacagttgtacttgtactagtgttctggttcatctatgctctaatttctgtggaaccgctttattatatttatgttatatatcaatttaaaagtaatattttgtatgagtttgttcaaactgtgcactgtttttcttctatatgtgatatttactatgtggaaaataatacttctcaaaggttaatttgctgtatgaggacattctttaataatgacattgtgaagttgacatagattttgtacatcagggaattcctgaacaggctgatgttccaccagttgcccaagttcctgcccaggcagcaggagcaaactccccagcaatcattcctccggtgcaagcatcacaacctgctgctgcacccgctgtgggtcctaatgcaaatcctctggatctcttcccacaggtagatattgtttaaaccttttctttgaattcttccccagatcatcctttacttttaactttgaattatattttatggtcagctaattaataaaatataaatctcttcctgtatcagggcctaccaaatgtgggtgcaaatactggtgctggcaacttagattttctccgaaacagccaacaggtacatttttttttctttactttctgtcttatctagatggagctttcttttttttttttttttt

SEQ ID NO: 26258 - DNA, 1403 bp, Cannabis sativa
aagatggtcatcgacatgatcatccatttgtcaatcgtttcatcatgaattacgatttcatattagtatattacaaatgataatcatgcatgaacttgtacccaacacctaatgttataatatatatatatatatgtacaagtaataattcacgcaatattgaaggtgtgatggtcgtactcgtaatatcagtactccaatatataaaagattgcaaattaacagagcagaacaaactaaccattgcaaatcattttgtgaaaaaagtattccaaaagtccaatattgaattcactcatcagagatattatttaaaagaaaatacactcatatgtatgttttgatccgcacaaacatttagtaaagggagagagagagagagagaataaatatagataattatattataagtataaaaactcacattatataattataggctttggactggggtgatgattatcagcctctgcaatttccggcggtttctggtctcttgctccagattgatccgaatagcttcaacaaacaaataagcaaaacaattactataacatatatacatacatatatatatatatttatatatatagcatataaatatatgatattggtgcaactatacgtatacgtacgtacaaacccttttcataaatactaattaattacttcaaataaagacacttaactgtatatatcgagagaaactgtactcgtcgatcataaaaacttatatatataatgtgtgtatacaataattaatacaagttagaagtgtagaacaaaccaaaaaagtaaaagaaagagagcaaattaatgaattgtggttataatatataatgcactaacttattatgtagtggtaaggagagacagagtaccaatatttggtatctgttcgttttaaataacactcatataataaggttgttataaaaatatatatatttatttatatatttcactggctttgaatatcgttgcgtgatcttatggccgtgttaggtggatactttaggtcttacataggcctctataataattatttatatatatatgtacgaaacgcacctatacacatctcattattttatacaactatcatcacctaaaaagaaaaggtatatattgaagcagagatattatatataggccatccataatgagacaaaaacaaaatcaagctcagccgggtggggtagattgatctatttagtcaaagtcgagaattaatgttgatatatctttatagagcatattaattacttaacttacgagaagctcaagtagcaaacagtaattagctcgcaattgtatttggcgtcattatataaccctaatcataacagtgctccttagccctagagttagctgttggggtcatatattaaatatatatatat

SEQ ID NO: 26259 - DNA, 1920 bp, Cannabis sativa
ataaaccaagaattcggttatataggcacactttatatagaatagatatatatttttaaggaaaaataataaactatcataaataagaaatgtaagtgacttacaataggagagtaaatcagcggggaaaagttctccatgtaagagcaagctttatccaactttggagcataccgagccaaataatgggcagccatattggctaaacgtttgacatgagtaacagcaactctagaaaaagaggatagcaggctaaaaatatctatatattaagtcaataaaagaagaaattgcaaaaaaaggagaacttaaagcactcaaaaccataaaggcatcagtcttgacatgggcgatagattgtggaaattgaagaacccaaataagactgtggaaaatagcttctgtctccatctcatgtgatgcaaagttaccaataataggcttcgaaaaagaagcaacaactcaactatgagaatctcgaatgatggcatcaatgccaataattcctttgtttttatctgcagccgcatccacattaaattttaaatcacttggaggagctggaagccatggaacaacagcttgaatagtagcacctagaggaggtcgtaaaacaaaggtgtcatgctgatgatattttgtttgagtagaccgaaaactttgcaagtgattcgcaacataatagaaaagtgagttttctggtttttacagttctcctatgtacaaccttgtttctctcaaaccatatcgaccacatagtacatataatagattccacattagttttggtgtaaatggttgagagatacatcaacttgtcgcctctgtgcattgagttggtgaaagctcgaatcaaacacaaaaccacaatttcatcaaacggaacgtgcatatttacattaaaatagggcatgtcctatggactcccaagcgcaaaaaaaaaagagaccaggttaagccgttaattactttttgtcaaaccaaagagatggcaacatggagtgcatcatggactactatctaggcaaagatctaagaaaatccacgatgatgcattcgaagtggagggagaagattcagcttcagtcttaataaatttagctaaatgatagcccaatttgaatgtgttatctcaatttttgcccattcgacgtgacatgtacacttaggcaaaactgaggtcacgtggaacatgacttttcaataggtgagcaaagttaccttgcagagcacaccaattaacaagggttccatataattggataggaccaaaactgaaggaaatggccagccaaggggttcttgccggaccacacccttgttggccaaaggaacatattatcctatttattgtactatgacatgtcattgagttggatgatatgtgttctataattccctacctagacaaaaggttatattcctaagaacccttaaagatttgtaaaaaggtctatgttgtctgcggatagcaggatgtctgaacatagtcatcaagggacatctgacaaaggcacaattgcgtgatcaacttgcatgcacctgacaagatatgtgagttggaaattttagagataggcatcgttcgttccaagacacgaagataacccctacattcgtgggattagggcaaagaataaaggcaatgagtttcggtttcccattcttttcattgtaattatggaattagtttagtttcttattttatttattatagattaagggaaaaaaattcttcaataagctcatataaatagtagcacaatttcaccattcagggggccaaattttgctaaacgaagaatagtcaatagagaaaagagcgatatctaacagagacttactcggagatcaattgtaagagctagagagagaatacttcattctttgtctcttaagtcaatacaacaaaaaggggag

SEQ ID NO: 26260 - DNA, 7083 bp, Cannabis sativa
  modified_base (43)..(51): a, c, t, g, unknown or other
gagagagacaaagtagatagaggggggtatttttggggttttnnnnnnnnngtcatattttttgtagtgtataatgtattggtttaaaaagaaaattttaaattttttaagtatagaaaatcaaatttcccttttaatatatacatatgaacaaaaaacctttaatttaccccttcctttattaaaatttttttatctgtaactagtaagagacaaactaccattcaattcttcaattcatttttgtccaaagacaaattttaggaatatttcaattcaatataatagatacactcctcttcaaaaaaaaaaatacatccaatcaaattatatccatttttttttttttggattatacggtagagcacaaaaatggtatataaacatgttttttatcatgacacaaaacgtggcaaaacaatttagctgacaaacaaaaataaccatttttgaaaaacataccaaatacatttttttttgtcagtacatatacataccacaaatacatttaaaactcttgccatccaaaatgttgcacttcatcatagtcaaatataattaaaatttccaacactcttgagtatacgaaatttaggggaacttgcttagaaattcaaatcaccagcatggataagtgaatgagaaaaaaaaaactaaaaaacacatctccatacaaaagctatgttatctttctcatcattatttacacgtttgacccaataaaaaggactaaatctaaggttatatcaattcacaaccttggccttttcttccacttttgccctacattcaagccccacacgaagaagaaacaaaatgaacacggttaaaaattaatttatttaaataaaacatccaaaacccatgaaagggatttgtctatacaagttatacaaaccccaaaagaagtgagatttctttcatagattttgtactgaaaagggttaggttatgcaatatgcattgttggatggataggtattaagaataagaagggctaagccattttggactggggacgcctgttttgtcttctattttagatttatatgcaattggagcccgaaaagactaattacaagacctttcctctctccctcattccaagtttcatcacatgtgaataacaaggtcttttagttgtgcaatttgcaattttagtcttatcaccaaaacaaaaataaagtgaagaatattataagcatgagatattgaaaagaaaaaatatcactttttattaaaaaaaaaaaaattatgtggaatatcaattgttttttactggtggttgaggaaagatccacagcttggtatctattgtaaaaaaaaaaaaactatttataggtattattactaataataataacaatatatcagtgcatcaattattgagccaatgctcacacaacaattacaagccataatccaacacgctaacgcaagaatcaatatttcactttcaatggtttcatatttcgttaagtaataaataaccatcattttctcaagaccattaattaacctctttgattagatcaataaacttataatatttttaattaaaactacactcctcccttgatcttataataataatatatacaaaacagaaaaactgtaacaattgtcttataggtgtatagaaattagaaaacataaatgcatagaccattttagtcatctctaatcaacgtgcagagaaacccaagtggactttaacatgtcataaatatggttaatcaaacataataataattcaaataaattcacaagaaaagggaagatttctcatataatgactttcttttcaataatgtttttcctaactgtacttgactctatgctaaacaaacacctcattttcttccaaatttggaaaaagtattgaataaagaatcatctaagcaacttgccaccaacttcaatggaagtcccacctgtacaagtgtcccaccaaaaagagaaaaaagaaaaaggaaaaaaaataaagctaaagggagagacattacaagccttgccagcccctcaattcaacatgacaagtcaattggaactgatcatgttgaatgctcctaagagtaacaaccgcgcagggaacagaagcacaacaaacaagtgcatgtgctgtgatgtaacaagcctgctaaatcgtttcaatgatgctctacctgtttttacaatgccagaaaagttgaactgctcttggcccatgttgcctgctgctgtcccgagagatcttctacccacaacaatgccggcattgacgctatgcagcgccacaagaggccaccacaccttccggcgattctctctcttggcctttctaatgagatttagctcttggcgaataaaccctcttacacattttaagtaggaattcatgtcatgatctctttgtatggctccttcggaaccataggcagatctgtctcgtagaatctcaagtgggtgtggtgagttcaagaacactgactttgcatctcgaagaagcttctctgcatcatctgttttcgacaacggataagttaaaagatatagacctgtgcctaaaggtagaagatgatggtttggggagaacttctcttctggctgaagaatcaaaaggttgcccatgggagcatataatagtttctgttatatagaaatacacaaaaagaattaatgccaatttaaaaggtgaacaggaaagggacaagcttgagatttgaacaaaatacacattctttacctggttactgagacagggaagattccgaaagctcccattaacagctttgagaaactcagcaacatgattagggtaattgcaagaaaacgctctaggaacaatgtctcggtgcattgtaacagactgaacatgacctagtggcaatcctagtttgcgaagaagacgatcccctccacacataatagatggtgagccaaaagttattacaggtagcagggaagaaactggcgccttgttccgtattagcaacatgagatttattagaagagccaagcttcccccgagagaatggccagtgaaacgaaaggttgcatggtctccctttgatttaagatgcgcaaggacttcgggcagcatctgttcatataaccctttcgcagcctcatatatacctctatgcacaagcacgtccaatccctggaaacgatcgaaaccaattttgttaagaattcactcatcatagctagcttccatgttctataagactatcaatcacaaacaacaaaaattagaaaacagattagcaaattaacaaaatttacctcaaatcgaacaggttcaaaaagtaagtttgcttgccaagatgcaagtgactctgatccctgaacataattaggatacatcagccaaacataatcaaaatgaaaacatttgcttacctaagaagatatggagaaggatcaattttccttcttcttacctgaataacaaaaaatcttgtgccactttgatcatcatcgcacacaaaccactcacaaggcgatgaatgtgatgagttcaaatcgtcagcaacggcttgttttacttcctcctttgcagcaaccacagcagtaacagaatcagtggtagccatcaaagaagccatctcagagttcatcatcctgacaccctcgttggtcctcctaatttcttcggacaaatctttcccaacatcaccttttgaagatttaaagggaagtatgctccttgtatgagaatgcaaataagaagctgcagaggcagcaatatggtaagcagcagatgcacttattccatatccattgcttttgttattttctacttcttcaacctcctttgattcttttttttcttcttgaatttcctctggctcctgagttttctcagctttagcagccaattcccttttatcaatggatgatgttacaaaacgcaggccataacatctgagaagatttcctggctgaataaacaaaaccaaaataatatgttcaaaaccaagtcgatttcaatagaacttatgatccttagattgaaaatgcaatgccaaataatgatcaaccataactttaaagacaacatttttttttctttctattcaagtgttaagaaaattcaatctaacatttcttatcattgaagactgactaaaacaagccaaaaagaaagggaaaaaaaaggtctttcttgtatatgatatattcgcaacaatatgaataatatgataacaaacatctccatgattagtccagaaactcctgatgtcatatgaatcaagtttatatatacaaacatcatataatatgagatctaactattttccagaatctaccattaaaacccatattcttaaattcccaatcctggcgaaaaggggtcctttttttcagcaacataacaactcagatcgaaagcagaagtttttgggagtcaaattttacagtaccttgattctgggaatgcagtaagccaaattccccaaatatgacatttgtgcatataacctggcctcggcaagagacactttccgaagcaatcttgaaaatgaatctctatcaaactcagccacttcttcgtcaccatcttctactctacacccatcacacgcatgacaaccctccccatcctcaccctcagatccttcaccctggttatcaacggccccaccaccatttccaacctccttccttagcttagcatcaagatcaaaacttttaccttcttcttcttctttctcctcatcgtccttccacatcgatcgaacatgcaaaatcttcaaaacccagttctcatttcgtccatctgaacccattacgccactcctctcaccacctaccttgtcgaccttctttttcttctcttcaccggtttccgtcaaaacggtgtcgtcaagggccattccaccatacctgcctccaccactccgaccttctcctcctccaccgggccaaaaagatttcaatgaatatttaaaagaaaacatcgaagacaccgccgccttcttttgaaccgttgttgacttgtcacctgtgttagaccttcctacggcgctaaactgagatgggtttgtgcggacttcaagccctccacccatttgaatcggcggagctatgccatgaatccctgttttcaaacacaaactgtccatgcctttttcttctatacaaacctctgttttttcttcgaaaaaatggggcgtgcttatatggatatatctgtgtatatacgcgaggaaaggcgattacttgtcttgaacttgatttcaacaatctttgaattgcaaatgtatgattacgaatttaaaggaaaacggaatgagagagatgaaagtttagcagaaatcggaatagtctggcatgcgtttctttccaaactcacaaccaaaaaaactcgtaactttttaaacgatctctccattaaaataatatattttatatacattagaaaaatatatttattttccttttattttttttttgtttttgagaaaaatcttttttttttttttttttgagaagatttttttccctttctaaatataagcttatttggttggaagaaattgtttgttgtattatgaccattgtattggtcattatattaaaaaaaataataaaaaagaaaacaaaaaacttgtttctaatagagcatcccttttgttgagactttgatctaaaaaaaaaaaaaacatctctaatactatttagaagtgtcgtcttacaattagttaataatattttataataattattaaattaaattaaaaattatttcaaaaatagacaaaaaaaaacaaaaataaaattcaaaaatatagttgtacaaaattttaaatattttataattggttagatcttatttataaatacggtcttttgatattttatattattttaatattgtatttttgttattatgttgatgaattgttgttagttttttattatttgtatgttatttgaatgttatttttatgtagttttattattgttttcgtattgtttttatagaataccgtaaaaatataatataatatatatatttttttactaatagtagtattttgtgtatattttatattgtgtaatttttactatttcttattaaataatgtgaaactcaatatttaattataccaataataatattatatttttgaaggtactaggtatgcacttactaataccctctagtatatttttttttctaataagataaattgaaccagaaagatattttttttaattttatttatattccaaaaaattataggtacaccttatttatttttttaaaaaaaattaattaatttttaaaaattacttttaataccttttcaaaaaaaaaaatctcattattttctcttcatattaatagttatttcaattttatttgtatatttattataaattcatgtatatattttgttaataaaattttatataatattttattttaatttatttgtttacatatttgaaaattattttatttttattttatagtattttataaaaatataagaaagaaaaaaaattaaaaaataatttaaattcaatatatcaataataaaatttcaaaatagagtatgtttttatgtggtgtaaataatttttttttacccgttaaaaataatatatatttaaagaatagttttaagattctttctttctcgttttccccagttttaacctttagggtcttaaaagaacgacacctcgacgggctcttttttctttgtcgttttgggatttatgtgccacgtgagtgagacaacgtattcgttccgttttgtttaaacaccaaaagagatagtgggacccaccgtgctgcgtttcgaaaaggaacataaggttgccacgtcagcgttgaagatgtacgtaagtatctgaatggcgtgtcgtttatgtgttctcttttgggtggttttatctgactgacggtgattacgtgtcaatggataaacacatccttaagatgagtaccttaatgtatgacagctcctatctaaacgtgacagctgtccccttaagaccgtgtttggttttataattttaaacaactactttagatactattaagcataatttctttcttgggaatttaattacaattataca

SEQ ID NO: 26261 - DNA, 7383 bp, Cannabis sativa
atttaacaatctcaataattcataaaatattttcactcaccttaaaagttctttagtatatgtcaaagtttggggtcaaaaataaaaattagccttatttctatgtctctctcctcatcacttttagtgtatttaaaataatcaaacaaaaaaaaaattaaagaccatagaaagtaaataaggtgcagacccatgtggtatgcacttgggttggggtagctgagacctaaggtaaggatagaggaaaaagagatgaaaggaagaaaaagcaaagcatagtttggggaacattaaacggattttgtagtctcccaagggatcttctccgccttccctacaacccatcattattcttgcgcagttacaatttgatctatactaatttaaatattactataatgttgctcttattaagaacacctcattttcttattccatgttatattaattatatatagttatacatatgactatgagtactgcataaagtatatatccatctgggaaacatattatatatataaacaaataagggtgattaaatattagctaattaattatatattatgttattaatgtccatataatattattctgtgaagataattaaactatatttagcatcggacgtcgctagatcagtacaagcactttaagggaatttttactttttcttgagtaatgagattcttgatgtctttttatatctcttatacatagtaatcgactttaacttatatatcaaagcataaatttgggcaaatgcataaaaaaagagcgattaattaaatacatgcattctacaaaataagcgtttagagtccatttttttagctaattaataaacaactgacgtcataaagtgtgcctgaattaaatttttatacaaaacaaaattattaaagtcatagggtaataattttttatttttaatgaaaaaaaatatagtgtttggttactttgtaataaccgatgaaattttaattaaaaaaaattaacgccataaggtgataatttttttaattttaatcaaaaaaatatgacgtcgattatttttataataattgacgcaatgtgtgtttatataactctctccagctatcgtctttctcaagccccaacataaccaatggcctttcttcctctcaaactcacaaaatcctcggccaaccacccctttcttccccccatttcttttttttttttttgttttcatccgcttttacctttttttttttaattttgtattttcataccaaaaaatatatccttaggcagggacggacacactcacgttggtgtgggggctcacccagtgaaaaaagaaatacattaaaaaaattaaatatttttctttttatttgataattatagcacaaaaaaattaaaaaaaaaatccacaaaaataaataaattaaataaagtagacctaaatttttttttaataacaattaagcccccacataataaaaattctgggtccgtcactgcggccttagggttgattgccttttgtttagttttttagggtaaactgagcttagaggtggttgttgtagctccggctaccgctttgggtggagaaatcatttaatctcatcgtccattaaggtataaatctgatctctaataatttaattaatgtaaattattttattttttattttataaattttgttaggattctcctagattgttaagattatgttctagcggttgtgcatagtggccagatttgatccgtattgatcgctgaatttcgataagtaaatttctaatttttaatagtatatatatgtattttatgttttacttaatatgtattgtatgtatacatatatatattatattgtatatgtatgtatgaaaatattataagtatattttatattttttatgtattgtgcatgtatatattgaatattttaaactaatagtattgtaaaatattgtgaatgagaatgagtaggtgagtgttgacagtggatttcgccaaccgacatggagtctgactaggatcaaatttcccttatgactgtcacgtgagaatgataataaatataagagacacagatttatagaggttcgacctcttttgtttagataatgacctactccccttttagtagtattcactattgagataataccaagtagattacaggctgaaacattgtaatttctagctatgctctcttgaatattacaatgagaatgtattttgcatgtgagaagtatgaggaaagatagaagaattattgctatagtacgtacttctgagcgtgattgaaaacataagttctaagtgcttatcatgacctttatatagtaatagggcctacaagctgcacatagagatatccttagaaaatagagaagttccactatatatatgtaataccaagtaaataattaataatccctaaagaattaaattgttgtttgttgatggtgagtccctatctttgcgggcagtttgaactgtttttaaattgtgggcatgcaaaggcgatttggaaagctcttatgaaaaacataagtgttggcatgtttatgtacacttggccaacaagccttgttaaacgcttcctgatgcttggaagttgtcactcctggtcggccagctataggtccggccaggacctacctagtaaggttgtacatctctatttccttgtgtgtattgtgcaaccatggaatctcaaattttgggaggctacacggtagtactgacctgtcttcaacgtattttatgatttttactgagtggaggggccacatcaagtgaacaaaattttgtataatattagtcctgaaagtccttgtctgaacgtttgatcgggtagggactttgcactatataactcctttattcgtgtaggtattcatagctaggtattggactctttcacttacgtgactttatggtagttattaattttacgtcaaaaaatgtaggacatcatgtgacggctgcacactttcccatgttgcaactcttggccttctctttcatatgcatgttaatttttgtagcattaactccccattatatttatgggggagaattttctagaaaccatatacaagcttcattcttctttttattctttacttttcacatttgaagaacaaacttctctccaagactccttagagcacaaatcttgtgagcttgagttcttcatggatttttgagtttctaacacctagacttgtcgtgcggactagctcgatcctccttgcatcttttgtggataagttcaactatttttttttaattctttaagcatctatgattattgagttttaatcttttatgaacttcttgattctcatgtcttgggatagtttttatgaattataatctattcaatagctttaggatgcataatttataactccttgatgaaaaagatcgaatcttgcactttactttgacaatttgatctttggggtttgaagaacacataaaacatagcttcgaattttagaaaatatgatttttaattcatttagggacctggccagcacatcgcgtctgttagagaccctggccagttcttcgtcctgcctatgacccctggccaatacttggttcctttccaagaactatgtccgacccttctacagttaaatcttatcctagggttcatggtgaacccatcatgagctaccgattcttggtgaactaaagggatgttggccagttcatatggtgaaacaaccatgagctgactagttcatggcttgacacttcatgggctggtcagttagtactcacaattattggcttgctagcccatgttttttttttatcttagtcttatgtgtgatctccgactgttcacctccctttttctttttgcacaaatgaacctgcgcaactattggggaagtgataacatgatcaacgagggcttactctgtcttttgtacgaagactatcacttagctagttgttcctctgagagctcaataggtagctttttgagggaatttgaagtgagcagtggttttcctgaacttaaagttcaacatcaccactattctaagtgaataggtgatgagctctacggtagactcatctgggaactaaatcaagggtggagatagttcctgcttgagtcttggacgtatattgtccggtagggtatgcctgacacattgcatgttggacaggaattttctgtatctagagatcttcctacagcagtggttgctgtaactattgcccaatacttccagcaacattcaaacatggtgaggatgaagaaatcttatcgcaaggcaccatcgactgaagcccatattttcaaacacatggcaaggggaatagtccatcaagttgaggaggttgaacgacctgaggcctgccaggctgaggagcctatggagagtcaagaggaagaagagctagaattagttgattaggctgagcctaaagcagagtctagggctgcttaaaggcaccctagggactgtgatgtgatctagggtacccccaagactcttacgatgggtatctccttattctacactattgaatgccaagcttaatggcatcattgatagtgcacttgttggccacgcccaatgcattaggcctgcttaagacaacttggctcaccatccgcatccaaattggatagcgtggtctggccctcatgtggagcaaggtgtggtacttcctctggacccatattttagggacatagctaacttcttcaagatgtgtccaactcagattacaaaaaaagagcaccaagtacttgtcagcactctttatctagtatgcggatttaggttggtcgctgccttcaccttttgaggtgaattactacttcgagctgaaatcctgtccaagctagaataagatagaatacatctactttagctagtatggctatcaatagttgggcgacactaatgacgaagccatgttaaaggtttgagggcatgcctgaagtttctttatggcatatatcataaaagatgcatgtcagttctttcacggggttctaacttacagtcacccacttcccatgttaagactaaaagataaagccaacaacattttgtctctcccaacagctcggtgcaacatctatacattggcctttgaggagaacttcaagaagtatggtctgtaccctcataagtgtaggtgttgctactccagataacactcatgaggaccctagcaatgctcttgttgggaaggagaaaaccaaaggaaagaaaccttctgttgagaaggaaaagagcaagttttctaaggaggcttctttggccaacgtggcttggatagagggtaggagaactacgctctttgctgacatcttgtctatgtgtcggcatggtttgtgatgccgcgattttgattaggcctgagagataggggccttcaagacctccctagcctgtgccgacagacaaaggtaagggcaaggctgtcatgactgaggagatttccaatgagtgctcttctaaggaggagggcctttcattttatatttattactttttatgctgaccttgttggttttgatttacagatatggcctacagaataaaaaaaatttatgaggtgaccatcgaacaactcccctagggggcgtgctcagtccaaggtatcttggatggggaattccattgatgtgacccaaacacctttgcatccacctccttcaagcccatttcccccccagtcacccttttattcatgattctttgcccaagataactcctcttcctcctcttaaagcacctgtcaagggcagctagaaacatagttgggcagcttgttccgtctagggtgaaaaagccaagtaagttgcccacgactactttggaaagtgcctgccaagtgttgattatcagcttcaagccctagactatttgacgaccatattcttgaaagatggggaatctgtaagttctcttattgtttgcttagttttttacttcatgcactgtacaactctattgaccttatttcttcctttttgatttcaatttcttttgaagcttagccatgcccatgttagggccaagggctctgcaatgacctttagaaagaaacttgaacggaaggattttgaacttccagcaaaagatgcatagctttctaagcattacaaggtaaaggacaagtacaatggtgtgggctagctgcttggtattcgtactaatgaggtgactaaactaacctcaaaaagcatcaagatgaagagggatttggaggccgcaaagaagacctgcaaggagaagcaagaaagtcttgttgtagcattgcacagtcatgatgacctcatggctgagttccgtgacttgagaatggagattttttatgagagttaccttcataatcctgggggtaacttttcttatgttgagtctcttaattgcgagggcatgattgctcggggcagggagctgtgtgaggccaaagcagcccaagagagtactttagggccgtctgctggccagctttgccaatattctgaggaagtacaagctagttagattggggaagctgtccaatattctattgagacacatgctggcccacattctgtggagacacatgccatccatggacttgtcgagcaggccaatgatggagctgcctaggctgttgattctacccacgagactgctgttgttgaagttgctgcccaggacccatctacccttaactcacctgcacttgacaacattaaaaagctttagttctattaattttttgtgtttgcattttacacatttttttctttattcttgcatggcccagggcttatgcatttgaaccaattttttttcttcttgtatagccttaagaccctttacttttgaactagtgaccaaccaagcggtcttaatcttggctttatcttcgttcaatttttgaacatgaagctggttgggaaacctttaatcctaggtttatgcattttttgctcaccttgaagcatgccattcgcacatacttagttgttaatttattgcattgccaattcttcaaaaaaatttgcctaagtatatatgtgcttattcgatgtagtgtgtgggtgccccccaagttatcaagcagacttatggtgtcttagtgacttgcaattagccaagtatatagatcctttgtaatgatcgctttagtaatttgaactagtaaaggcaattagaactaatttctgttaattttataattatctatgaatttgtttatttgtggaccccaatatttagaaatgagcattagagttataatttctcaattccgaagattttattaaactcaagggatattatttgtccgatatgtgaattatgcaatttttgtaattttttgcgcgtcgacaacggaaaatgcgatggatg

SEQ ID NO: 26262 - DNA, 4452 bp, Cannabis sativa
gtatcagcagacaatcaagatccttcttcaatggctagacccacaacccgttctcaggatggcattcccccatctacttctgagaatcaacacccggagtctaaccctgacactacttccgcacctccattaatggatacctcgatcgctactcgacggaacaacaatccaagatctcggatccagcacgaaccagaaccgatcgcaccagcaaactcctctcctgcacctattgctactgatcctcctgttcaggctcgacgttctttagccgatcgattggctcatgaagatgtatctagcccgttcttcctcagcaatgcagatcacccaggattagtcttagtttccaccgtgctcaatggcaccaattaccaatcttggaaacgaggaatcatgatggctctcacggcaaagaacaaatctgccttcattgatggctctcttcctcgcccagtcgctggtaacacccttctcccttcttggattcgttgcaataacatggtcatgtcttggcttgttaattctgtttcccccgagatagcacaaagtatcatgtactttgatcttgctaccgatatgtggcatgatttgcaagaaagattcaatgagggaaatggccctcgaatctttcaacttcaaacccaattaacacatcttcaacaaggtgatcactccgtcacctcttactttacaaagctcaaaatcctttgggatgagctaaaagaatttcaacccaacacttcttgcacttgtggtgcaatgaaagtttttttagaatattacaaccgaaaccaggtcctacagtttcttactggtttaaatgagtcctacgcttcggttcgtgctcaaattctcctcaatgaacccctacccaatctctcaagggtatttgccatgattgttcaagaagagagacaacgcactcttggctcttccacagttccttcagctgcctctgcccgtgcgccttcaaacaatcctcccccaaaatccaagaagccaagaccctcttgcactaattgtggcaagccaggtcactatgttgataaatgttacttccttcatggctttcctcccggctatggtgataaaaagaagcaagaaaaggccaaacccgctgccaatcacaccagcgctaactcagatgctattcccacttcaacatccaactcagatctgaatacacaatgccaacaactcatttccctcctcagccaacaattgactcaaaatgctacccgtgaggacatcaatactctcccagctgcttccaacatggctggtaagtcaaatctttttcctatatattcatggatcattgatagtggggcaactcatcatatgtgtgccacaagaagcctctttcaaactttttccagcaacgtttttcccacacatgtggtgcttcctactggtgcaaacataccagtaaaagggatcggtacagtccatttaaacaagcatattacacttcaaaatgtgctctttgttcccacctttaatatcaacttattttctcttactgccttcattgataatacccttactaaggttatcttctctaatgattcttgctctatacaggctccttctccgagcatggtgattgggacagctaaacggcttgggaaactctatgcaattcaacaagagcacaaccccatacttcagcccaattgttgtctttccttacataataatgtagatcaatggcattcacgccttggtcacccttcaatgtatatttccaatacattcaataaaagaattaactctagttttcccatttcagcaaatcaattttgtcatatttgccatcttgcaaaacaaaagaaattaccatttatctccaaccataactttgctgaaaatgcctttgatttacttcatttggacatttggggtccattccacataattagtatagaaggctatcgatatttcctcacaattgttgatgatgcatctcgatttacttggacttttatgcttaaaactaaagctgaagcgcaaactatctttcccacattttataacatgatctgcacacaatacaattccaaattaaagcaattcgatccgataatgctaaagaacttgcaatgtccgctttttatgcctccaaaggcataattcattaccactcatgtgttgaacgtcctcaacaaaactctgttgttgaacgcaaacaccaacatctccttaacattgcacgcgctttatgttttcaatctcatttgccccttgcttattggggacatttaattgctactgcaacttacctaatgaaccgaactccttcggtcctcctaaaaggcagtacctcctttgaaaaacttcacttaaaaccaccaaattatgaccatctccgagtatttggatgcttagcatatgcctccacactcacctccactaggcataaattttcgccaagaagccgtgcatccgtgttcattggatacccacatggcatgaaggcttacacccttcttgacatccaaacgaaacaaatctaccattcaagagatgtcatctttcatgaaaacgcatttccttttcttggtcaaggttccaacaattccatcgatatattttttcaatctcactgtatacctgccaatcgttcaataaatctcaccaatccacttacaaataatatgcatactcaacatccaactactactgctacgggttctcacactaaggaagacaatgttactggtgttgttcccacaccagcaacaaacaacacatatgaccctgctgcagaaccgattcctagtgttgtccccaaaccagcaataaacaacaatcacaagccttctggtgtcgacaaacctctcacaccatcagcacctactggtgttactctcacaccagtaacccctgctaatactcacccaacaacaccttccattggtgtcaataacccttcagttcatgttgaacctactggtgtcattcccacaccagatgcttcaacacataataacattcccactacacaaaaatcaattcaaccagctccagcaattaaatcaaaagctggccgtcagattaccaaaccacctcatctcaatgattatgtatgccacactcattcaacggcttaccccgttgaggagttcatatcttatgccaaacttagcccccacttccgagcggctgttttagctgcctattctcacattgagcctacctcgtatagtgaagcctcccaattaaacattggctcctcgctatggacgatgaaactcaggcccttgaaaaaaaccatacttggactatcaccaaattacctcccggccacaaagccattggatgtaaatgggtatacaaagtcaagtataatgagcagggtgaggttgtacgatttaaagctcgtctcgtcgccaaaggattcaatcaaaaactgggaatcgattaccttcaaacctatgctcctgtagcaaaattcaacacactcaaaattttgctagctcttgcagcgatgaacaactggaacgttcatcaacttgacattaacaatgcctttctgcatggcgatctccatgaagaagtgtacatgaaattgcctccaggttacaaagcaccacccgattcggtttgcaaactcaataagagtatctatgggttaaaacaagcttcccgacagtggtatgaaaagcttagcactactctcaccactgccggcttcattagatccctatccgacaactcactttttatcaaaaacaccaatactttctttctcgccatcttaatctatgtcgatgacattatcgtagctagcaacaatgacatggcaattactcatttcaaaatctttctcgataaacaattcaaacttaaagacataggcactctaaaattttttcttggactcgaaattggtcgcacaaagaatggaatttccatttctcaacggccctttactctccaattactcacggatacgggttatcttggcgctaagcctgcctcaacacctatggaaaccaatctcaagcttagcaaagataaaggcaagccattgtccgaccctacaatctatagaagcctcataggcaaattgatctatctcaccataacacggcctgacataacttacgccgtcaatcacctaagtcaatttctatcttctcctcgagcacctcatctccacgctgctcatagaatacttcaatacctcaaaaggactcctggacagggcatttttttccctgccacctccactccccaactatctgcatatgctgagaccaatctgtcccccaccaacgttcagttatctttctttgccgatgcagattggggagcttgtcaagacacacggcgctccatttccgggtattgcgtcttccttggacaagccttagtctcttggaaatccaaaaaacaacaggttgtttctcgctcttcagccgaagccgaatatagagccatggc

SEQ ID NO: 26263 - DNA, 6769 bp, Cannabis sativa
  modified_base (778)..(796): a, c, t, g, unknown or other
ccaccaaaatatgaggttggatggtttttttcaaataaattgatagttgaaaagattttgccgcaaattaatcgctagttttcggtctcattattaaattcttaactctttggttattgcaaaaaaaaaaaaaaaaaaaaaattcttcggtggtgttttttgaagctattttctcaaaataaaaaacaaaaataaataaaattaacacaaaaaccacaattcaccttaattacttcatttttatcagattataaaaaccaaactcatcttcaaattggaaggtgcttattaaagttgcgaaccaccattaaagccaccctctttcaccgcggcactcaactgccgaaggacgattggactcaacagcttataaacaatccactatcagtgagttcagagtccattaaagccatatactttcttgggcatttcttaatggccatggcgacaccctcttttggtaaattgacaactattagccaaccttctttaatgttttttttttctgttacatttatgaaatttgcaattgggtttctgacatttttgctttagcaatgattttgttctttttggacacaccctttctgatataaagattagttttgtgaaattgggacgtgggttttctagctactgcgttttaaggattggttatttggttaggttaaagtaatagctttataagtttatccttaggagtgagatgattcttttgggtgattgaaacttgttttaaggattagggaatctgaacactttatttgtgttttttatnnnnnnnnnnnnnnnnnnnatatatatatatatatttcttggctttcttattatcatataagatttcattatggtgaattcaatttttaaaatgccattttgttcaatctcatatgcatgtggtttgaaatggcttgggttgttaataactaatggaatcaaaattgtcatcaggagaagtgattgaaggtgatgcaatattaaagggagacaaactcattttaagaggcttgatgttccatggttatcatggggtgaaacctgaagaaaataaattgggccagaaatttttggttgatattgatgcttggttggatctccgctctgctggtgcatctgataatctatcagatacaatcagttatactgatatttatcggtgagtaattagttttagtcttctagtttcatatgggaatttgtaagacttcaacttgtcaaacctttatatgtgaatgattcttatgattaactaacttcatgtcccaaagaataaagttaagctagatggttttcatgtatgagcttttgtgatcatttttatggttggctagcttgttggggtttggagattttgaatgcaacccggtactgacctcttctcaaattagtggctcggctaactgcaatctctgctgatttgtaattattgtcatatttctcttagtttggctttgtgatctttgtaatgatagattttggtttgctggttttgacttggtataacacacagcatagcaaaagaaatcgttgaaggacaacatcataatcttctggaatcagttgctcaacgcattgcatcaactaccctgacaaaacatccccagatttctgctgttcgtgtgaaacttgggaagcctcatgttgctgtgattagtcctgttgactacttgggtgttgagattctaagatacagaagtattgatgtaccaaagtaagatacatatctgatttgcatacccatatacacttttgagaaaatggtgttgtcttgttttttattcttgttattgttcatgaattggaatttatagtcatcattgagttcatgatttcattctgctgttcatgttttacactttcttggatacttccaatgcaaatcaatggaagaaagcaaaaacaacagaccgaacaaaagagctatagtatttattaaaataagtcttttgttgatgcaagcaatttattcttgtaataagttgggcaaataaggttatcagcaaaagaggtttttgggggtgtattttggaactcaaggaatatggtacctaagtagtatccattacaactccattcaagttccagaaattgttgtttaattatcggtgtaacaccatgcatgtcgataagcatgtatgctgtattgagcggtgtaactgtaaacacatgctcaaataagaacctatgaaatccgagttgaaaagggtgaagctttttcgatcttttgtcattggcagcgttttgcaagcgcattctttctgctgctcctaccatcatctgtttcctgctttcgacagtaaaatttcaattaacagaaacaagaaaggaatgtcattagtctttaacaattgtacaaaacctttttattagaatgtgaaagagtgaggatggtggctcatccgctcattcatattcataccactccttaagattctcggagcaatcatgagagtatgttatgtactaactaattaggctctctcagattcttaatattgtctataaacttaaactaaacaattaattgatacaaacagagataaacaaataaaaggaatagctttataggataaattccttaaattaacaaagaaaatgacataataaaaatatgataacaaaatgacagctgtgggatttgaacccacgccctttcggaccagagcctaaatctggcgccttagaccactcggccaaactgtccgtgtttagaaagggcgttcttttacttactaatcttttctaagcttatttatataagccctgttgtggttaaatttggccaaaacaataacaggataaaagtaatcaaatggtttgttttcctttattcttaggattaaaattgaaaatgtaaaatctactaaagacaatgctataatacatacatattcctacaaaattaaaatattacggaactattctattcgtttgaacatttttttttccgttgattaggataatctttgcatttttatgtcttggttgcccagtacatttacattatttcttaagaatgttaccttaaaagttatgccactaatttattgtcttcccttcagtcatttctacacaccatttgaaatggatgagctccattttatgtgcaaatttgttacctcaaattcactattgtattatatcaaacttacctcatatcatgttttactcacttttgagttactgattaatgaactggcgttgtatctttatgttcttaacattctctttttggtgagaatagcgtttgtcaacgaatatgttgagtaaaggaaccactttttcactcccgcatcaaattatatttatggtaccaacttagtgcttataattaattggtaccagctatttttaccaccaaagtgcactttagattaaattttcaaacttcacaatcacaacccctcaaatattaatttgctacgtggatatccatgtttggtgaatcatcagtatttattttataaacgaggatggattgtgtttataatgagtgttgtgtatgatgatgccagaaacaagtaaaggaatatcatcataagcttgaagcagcataagagaaaagcacagctaataactaccaacagaatatgcagttaaacaatattaactgtctaattcttaatatttgcacaaacctttgtatatattaaaaatgcgaaaaattgaggaagctggctcatttgctaattcatatataaattaattagctgtcttcagattcttaacttttttgtataaacttaacaaatataaatacaaaactagaggcagttatctttttcttttgaaaactatcaaattattcagattcctcaaaaatgacagctgtgggatttgaacccacgccctttcggaccagagcctaaatctggcgccttagaccactcggccaaactgtcgttgttgaatttattcttctacttttaaaataagtgctgttttattaatattttcgttttgctaggaaaactttgcattaccttatagcatataagactgaccaaagtacatttccctatcaataacacattcgataatactttctgttgttgcaaatttcacattaaatttggcaaaaacaataacagaggcatataaaatgatgtttattacatatgaggctatatcatggcgcctaagaataaaacaataggaaaggcctgttatacattttttttatgactgttagcaatgttggagtgattattattgtggacgaagtttcctaatcaaccacctctttctaagggttgaatccaaagctaaaaaaatcctggctcttttttcatcttctaaaaagtcacaaccatccagtagcaaatcatcatcaatatccggaattgactgcagaacgcggagtactttctctattgacacaggtttctcttccttctgtttctttgagaaagatgatactgcagctgccatctctataaaagaatctccaacatcattttcgttgattctctgctctagttcataggtttgtgaagttggtgtaacctcaaggtggccccttttcttttcatgtgaaccagtcttgttcatagtaggcattggatccccactttctttctcctctgtggcttccttttttaaaattggtgtgctgcaactcggtggatcttttcgttcttttctcaaagtaccttcatttcggcaaatggcacacatatcagtataaaatgccattgctttgtttctgtacgtttggaagttggggtgttcctgcaatttgaaacagattaagacaaagctgcaaatggtggaagaagacataaactgtgtactaaggaaaggaacagttttagaaaccttcacataatgatcccagatcacatcatcagctaccactttcttctgtactttatcccacttaaaaccttcttggctaagcagaatctgtatgttattgtaatgccttctaagtatattgtaacgatttttcaatacatatctactgtactggagcccgaatttggaattgaacgatgagatcatgcaaacccatgatttcttcttgaagactcgtccaattttgttccccttatgaacttgctccaacaatagttcagtaaaaaactgttccatacactctgaccaatcaattcttttaggatcatcctttgtggaattcatagcttccaatccttaaataaatgagttttagaataataagtaacttgaagatgaaaagatcaccagagacatgaaatactacacacactaaaccttcattttcaaagtccaaatcgaaacacgagagactgtatcttccatcagcaacagcatgcccacatattatacacaactcattataatatggcacagctctcattctgtatggttgcatttccgggttggcctgcattgcattcatacaaaagttcaaaaactcatttggaacctgaatttcccattatacaaaatttagagataagatcaaagttcattctaaaattgacacaaaatgtatctataaaatcacatattaattacaaaacatgaacaataataatcctgcttttctcagaacaggaaaaactgccaatttacttgtaatttgggtggtctatccaaattttcaaactttttctcagttcatcaaatgaatctcttttttaatatatttttctttctttaaagtataaactttgatatttgcttaataataatattttaccttaatgtattcactccatcccttatcatcagctcttaccatatgcattgaatcatcccacttaaacccagtttgattaacaagactcttcatttcattatattgcttcctcaatcttttgtatcggttccttagaacatcagtatcatagtgaaacccaaattttgaattgaacagcacaatcatgtcagcccatgactgctttttgaacccatgagcagtcttgttcccttttctaacttgttccatcaaaagggtaatgaaataggtgtcctgagatggagtccaattagctctcaaactttcgccattctccattgcctcaactcaatcttcttctgattcagcctgaaatgcaaaacagttgagatataacgtggctttttcgaatttatgtttctgtttggctgctgcgaaaattggagggaaaagaaaaatctaatttaaacaaacagcggcgaggattaggtttaggtgatttacctgttaggcgagatagagatcgaacaattgagactcacagacagcggactcttcaccattggcaaaaggggtttagggttatccgggatagggagatacgaatttattgtttggtcttagattttgttgtaactattattattttttatattttctctcagaaatatagatttaacaataaccattttcactgaaaaaaaataattaaagttgagtacatcttaaaaagaatgatagaaaattattcaaccaaactagtttatcattaattgtgagtttatacacaattaattcatgagcggatatgaactaagaatgacttaggaaaattggagagtaaactattgttatccgtgattttagataagtgacacgtgtatattcaaactagctcattcactaagcccaggtagattagccacttgacccatgagtaaagccggactctttaaatcgtgtagggaaatttcaatgtgtaactgaaaatgaaaaaaaaaaaattgaaataacacgcaaaaactgtatagaaaagagatggaaatcggttgagtgtgaaggaagtgttggattaaaaatcctttgtgggcacatatgtataat

SEQ ID NO: 26264 - DNA, 1673 bp, Cannabis sativa
atcctggtaaaatattcctaacaccagtcccctccctcctccgcctccttgatcgtgcgacccgttcgggtctcgagtcttttgacccgtgtttgtgcgactgacgtgtgatacctcctggaccgtgactggccatgggaaccgtggccatcgtagttactgtagtcgtcagccacagtgggtcatggtggtggaccccattaaacccgaccctataatagtatatatatgtatatttttggatgtatatataactatatattacataaatatttttatatattttattatatatggtatataatatatagtgcatatacactataaattatcatattattatttaatgtaaataattaattattattttagatctttattttttaaatttagttttgaagtcaaaataaatattaaggttattaatttggaattgaaaattcaagttgataactatcttaattattttatattaaataaaaaatattattttattattttttataaatcatgaaaaaataataaaattttgggggatacttatttttagaaattcaattttgaattagataattacaagttaattttatgtttagaattcaaattcaaatctataaccatgttaagacaaaaattatcttaacaccaattaaagtaataaatataattattttaagacaaaactggcatggtaataaaactgtcttcaataaagaatttatttaagaagaaattaattaacaggttttaaaagacatcttaaataaaatgtttatttaagattaataagttaaaaacgttttaattaattttgaggcttacgaagatccataaaattacaaaaatacccttacagcgatggagattagttttgtaatttattttttattttttttttcaaatattataaaattaaaaatacccaatttttaacttgttaatcattattgtttacttattgtatatttttaaataaatgttcattaacagtcgattaataacatgctcatgtattagtgaataacatggtatacgtagaaatcccacacagttttgtgatcatgcatctcattatagaaacatgatatattaggattgtcctatgtgtttatgcgtttaccgtttttgaaaatgaaagcaagtaaagtgattaagcttaatttagaattaacttagtaatttttaaaatcaacctattacttcctaataattttaaattatgaattaaagagttaattcaaatttaatgatcatgacaagaaatttatttataagttgaagcttttaatataaataaatgaatcataattattaaagtggttaatatgtattaatcttgggaattaataaaagaaacacattaacgtcaaatagtgagtgggagaaggagtaatgtcaatgtaacttatgacctccattattggtcaacatcaaaggagtatagactagcctcgagataattttatttttgtcctcctaaggaaggtatgtgtctatactattgttcaaggttgatctctttactaagataagcagaagtgatgtattttagtgggatctcgaccctaaggcagcattgctaagttaagtcatgatagcaacatttcatcatatgtttatcattgttcaatgttttatttatagaagaaaaaatggcaaaaaaaaaaaaaaaa

SEQ ID NO: 26265 - DNA, 2938 bp, Cannabis sativa
  modified_base (2885)..(2892): a, c, t, g, unknown or other
gtataattgccatccctaatgtatttgatatagaggtccatgtaatatttcagaaaacttaattatgaataattagggtttattatatattatgggttaattaggaagtaatgagtaagattatgatcttactaatctattcaatgtgaattatgaattttaccataaatgggtaaataagtgtaatttattaattacagatattcatttagaatatgtgggtataatgtgagttatttgtggaataaaaatattttcaagtttgacaaccttaaagtcttgaagaccctatcagaggacaaaaatatcataataattttagttataacgggattattgggacaagttagtttaaaaattaccaaagtatttggggtaagcagaattgaccaaacaccctaagattagacattttttagtgactaaaaatggtaaaataattatttattagtaatttattattattattattattattttaaaactgcatatatattttgataaacattaagttggaaagtaagaaagtcatcatcaaacccttactcatcttctctctttctcttgagcaagcaagaaccaccaacaaccaaactaagttttttgatttctcttctatccaaccaagctcctcagtaccataagtaatcagctagagtaagccaagttgaagtggaagcttaaggtaagttttggttctctttttttctttaaaaagctttagatttatggttgactttttgtattggagttgctagattaaaagtgagcacttggttgtgtttttggcttggattagaagtgttcaggatactcatttgttaggttttcttgctgtggggtggagggagtcaagtttgagttttaagctcaaagctaagcttgagctcacatgataattttcgtttaagagcatgattttgatttttgtcatgtagggattgttatatagaagttgtatgatcgttctgtgaagtgtgaaatgaatttgttaggttttgatgggattttaggatgtgtaaaacttggggttctcgtttcttacaaaaaacggtccaccgttaatggaaaaatagttaaccgtttttcttgccaggaaaccccaaagacgggttgccattttctaaatggcttaccattttttgtggtgtttagaacccctgtttttcatgatttctcgatattaaggatattggtatcctagtgatctgtagggggacttatggtgatgaattaaggacttagaactggtaaggtcaagtgattaatcgttctttttgttgttgtgacatagggcccgggatcgttgctctttctccattcaggccaaccaatacacttgaattaaaactcaagataataaatgtatatttgtaccacatagcatgtttatatacaattattatcgttatgactcaattatgattgagttaatggaatagtgattattgttaagtggattaaagtcatgacgtcaagtgaaaattgttgttaggcctcctactagtcgattgtcttattagacaatgatagaggtatatggatgtcagattagcgcatcaactttgtcttattaggcaatgagagatatggatgttgggttagtgcattgactttgccttatcaggcaatgagatacatggatgtcagattagggtatcagggttgttttattaggcaacaatagaaatggttgctctatggagtaatagatatgacttgtcttattatacaagtaggtgaatattattgtttaattatattattatcttgatttggatatctgattgttatatactttcattgtttacttttcttgctaagtctttgtgacttatgtgtgctttgtggtgtaggtaaaggcaaagggaaactagggcagccatgcgacgacaatcttatcggacaaatgaacatatcgacttattcgacttgtatggttaagttgtcaagagttgttttggattgtacctgatgtgtattttgcttactgttgtatatagcctttttttaaagaggtgcattgccctcagctggagcttcatgtcgtacatatcgctgaagagcaacatgtttttgtctgatgagaaattctatcttgttccgcaactgattacactcattagtgttgtaatgccctacttgcttaggcatgctacaatacttttctgcttactgtgcacacctttactaatcaaagagtttctcaaaaattgcgtcaacttaattttttttattaaactttagacttttatagatatataaccgcacataaaacccaggatcttgcatgtaaagtttactacaatactcaaaatacattatacaaaattgtcgctctacgactacaaaataaaggcccaagtcgtcccaagaccgaactcaataagtctaaccatcctgaaatgtacaatcatctctgagctttggactcactggtgctcagccatagcctttccttcacctatacatttaaataatatatgtgagtcaacagactcagtaaaaaaagcatataacatatatcatattactaactcgtattcaggtacccatacacctatctacaaggcttaatcaagaacgttcttaataaaagtacgacctctataccatatgcactaagtactcgttccgtacttgtgttggtagggctgaaccgtacctcaagtactattgagtgttgtaccacatgcactacgtaatcgtcccgtactagtgttggtaacatcggatcgtatcttttgaacatcatctactgtaccaatgcactttgcatcgctattgtactagtgctggtagtatacgaatcacatacacaacatgcaatttacatacatacacatattgatatacatattttatatgttggaaattattttacnnnnnnnntagatctactcacaagtatgttctttaacaccctaaatatgaactt

SEQ ID NO: 26266 - DNA, 2943 bp, Cannabis sativa
actgctcaaactgcccgcaccacatgcgcaccgcaaaaaaaatgcggtttgaaattctttgcagtgcggtcgcggtttgaattttttccaaaccgcgcgatgcggtttgcggttttgaattgttaatatgcagttcaaaccgcaccgcacattataaaaataccaatttttatatttagttaggtccaatatatgaatgtccaacccaaagcctactaattattgtattattgaaacttaattttttttttcatatttattttcaaactttatggtgtttttgacaagtgttgctcaagctttgttgtatttatgatagtttaattattattaatagtccaaaccgcaaaaaccacacccaccgcaccatttttcgcggttttttaatttcgtggtgcgggtgcggtttaggaaatttgaaaaaccgcatgtgcgggttagtttgaaaaaatagtcaaaaaccgcactacctttaccgtaaacacccaactacaaatacaatatggatgcacaaacctgctgtttcagaatcccacgttttttttcaattaagaaaatcattatatcttttattggtaccctgctttctttcttgctcttaaacaaatacaagacagaaagaatttcataaatcaattgatgatactaacgagtgactaacactctccacgtcgttctcaaaagaatttcatataaatcaattgaagatactcagttttaggaacgtcataccctttaaacaactgctattatgtataaaattcaagtaaagacatataaagacacacttactggcaataaatttaaaccaatcatttttattcgaaataaattctacattttctggttaaatttatatatatgggaaattattttataattttttttttaaattaacggtttgactgtttgagttgtttcgatagtttttatgtgtatttttatatggattttaattgtgatttaaattgttctattgattagtaaattgctatataaaattctataaaattgtaaaaaaaattgttttgaaatataaaaataaaaattattttatacaactatatataattatatattaaggggattctaccacctctctcaatatgttaaataaaaaaaaaaaaaaaaaaaagaacaattatgaccacagcaaacaactactactaataagttgacctccataaggccataatggacaattccatccacctaaataacccttctaaggggctttcaaataatttgttattaagactaagatatatgtataagttgcaactcaattttatttgttataaccattctaattttttttatttatttattttttatttggccaaaatttttttaatcgatcaaacaatctcaatcaatataatgtaaaatgaaaaaaaaaaataaataaacataaaagcttaaatttttttaataaagtatacccaaatatatatggatacttggtgctacttaaaatacaacaaattttcgtacgttagtatttcttacgttacacaatacttaacaaatatgtcatgtttgtgaacagttgagcaaaaattgtgaggcatgaaatgaatatgatagtaataatttaaaatcaaaagtcctaataaatcattttattcatttattttattaaataggcatggttctactacagtctcacccactctaactcttaattatcaaacatttctatatatcttttatgaagctcaacctaaattacacttgtaaactaaagaactgaaaaatcacaaaactaacatttttcctccttactttttgggcttgaacttgggcctgtcttaattaaaatcaagcccataagcctttaccccatcaagcccaaaaatcccaaaatgcttctcaaactcttcgccaacttttccattctcatcaaaaagatcaaacaagtaaacctcaactccgacgccgggtcttctaggagtcccggcgtttctaaccgcacgcgccaccacattaccgttaaaaaccgccgcgttttcaacgttcgccgcttctccaccactcttcggccaaccagtctccgtcaccgccaccgtaactcctccaaaaccttccttctccatcgcgtaaaccaacgcgtcaatactcgcatcgtacacattactgtactcaaacgcaccgtctcgaaccgtacggtccggttcagatctgaacagagcgtaatccaacgaaacctcttctggtttactgttgatgtaactgaagtaaggatagagatttaccatgaacggcgatccggtctcggtgaggaactggaggagaggaatcatggcgaaacggagggagggatcgaaggaagctgaggaaggcgggtacgatgtggatagtacggacgcggcttgaggcgaggatatcttgattgaatcggcgagacctagggtttgaagagctatgtggagattgagaatggtgggaacgagatgaggtgcgtagaaggagtctttaaggaaaacctcgttgcctacagcgatgtatcggatttgatcggcggaaatgtggtcgaagatgttgaatctgagccagtcaatggcggcggacgacggagatgtggcgaggagtgggaggatttcgttgggtacgccgatcattagttttattccggtgccggagaatgatcggagtagggcggagtcggtgttgaagagacgaatgttagatattccatttgattggaggagtttaacgacgtcgtttgtgggtggtagattattggctacgcggccgtagcatatcccaatcggagcacaaactgcattaaataaataaataaaaattataatatttttttaaaaaaaaattggaaaaagaaggaaaacacaaactatcataaataaataaataaaattttgttgaaagcaatatcactacgtaaaaggtaaaatatacttaacactttaaatatatgatgtt

SEQ ID NO: 26267 - DNA, 1302 bp, Cannabis sativa
ttggttcttttatgctatatgtaactgtagcaacatgaattgataatcctctatattaattatggcttcaatttgacaggcaatatctgtgatggctaaaagtgggtttgcagagcttattgatttcaaccctatccgtgctacggatgtgcagttacccgctggtggaacttttgttattgcgcattctttggcagaatctcaaaaagcagtcactgctgcaacaaattacaacaacagggttgttgaatgtcgcttagcggctgtaagtttaatataatattacacaagtaaaatgctattgttttttttaaaaaaaaaatctcaaaatattaaaattgctgattgttctgtttcacacatctcttgaagattgtgcttgggataaagcttgggttgaaaccacaagaagcaatatcaaatgtcaaaaccctttctgatgttgaaggattgtgtttggaatttgctggtactcatggttcatcagatcctctcctggccctcaaggtactattgaatttgtcatttattgattgggttatccttatattaataaggatttatttaaaaaccacaatgttatttacaaattaattaattaaatccctattgttaagattattcttttatatatattatgataaaacaagaatataaggattatatttagtggttagtatatactaattatgttcaaacatgttgattaatgatgaagtttttttcttaatgaaaatatgcaaaaatatatattttaatgtaagaatacaacatcggccataaatttggtgatgccttaggcaatgtgaccttttgagctacttctatcaaaatatttgagttttgtaatttgttgtctcatttcttttaatttgtttttcaattatttgaaggaatatctgaaagaggagccttacacaacccaagaaatagaacaaattattgaagagaatctttcatcgatttttaaagattccccatcttcattagatgtgttaaaggctgcaacacacttcaaattatatcaggtgaataatcgtaaacatatataaaataaatttgttcttgcctagcatatatatgttctccatgacatcataacaaacaaactcactcacttgttttttattagagagcatctcatgtgtactctgaagccaaacgagtccatgctttcaaggacactgtatattcaaatttaaggtacaatcataccatttatagctgttatttatgaatttttagatgccaatcttcccatttaatatatttttctacgataaactgttgtttcagtgaaga

SEQ ID NO: 26268 - DNA, 3878 bp, Cannabis sativa
atatatatataggtagaaaatgtcatgagtaatatttggtgtcttgtacacgcaaaaataaagaaaggtgtgttgtgttagtgagtttctcctcaaaatgggatcatttaatattcctatgtatttatgttaattaggttattaataataatattccaagttttctttatcacaaaaccaagcacataacaacgtgcatatgattcactcacatgatcatattggatgtaaatatacttttttgattcacaaattatcaatgtaatttattggaataggtgtgaaaattacacaatttacttataagtttaagaagagtgttaattataacttcttattacaatttttatgtccaaaatcacataccgcaatatttttttaaaaaaaattgtttttataatatcggtattcgttatagttacaatattattcttgtaaattttttaaaaattctaaatagtttaccacaaaaatagaatttttaatatttcaatatgttcaaaaaatttcatacccactttagatacggtaaactatacaaaatttacaaatataatattgtaattataacgaagaccgttatatatgtgttttcaagtatagatgttaacttagaaattataataaaagattaacagtaacacaaataattttattaagttgaatgatattggttgcttgataagatctccatcgcattggcgttgaagccagattattcttaaccaaaagagaaaatgcttaaaggtataagtagtacctagcaccttccaatgtgtaaatatcactataagtctaactaaatattaaatctcatataatttaatgtaataacttttacgaagtatcgctattcaattgcaaaacgacatgtctagaaatgttagacaccacaagtgcccaataacaatattctaacgaaaaatcatattaccaaaagaaaaagaaaaactaaagcaccctcttctagggatgctttgaaaagaccccaaggcaaatatacaattgttgagtaaaagtttgaatacatacaaatacaagacaaagaacatcaacttctagtctagaacaaaattaagaatatcatcactattttcatcataggatgcatgtactcttctggtgtcccatgcaaaaccagattgtgttgctacaaaagatggcttgttcaacttcatcttctactttctgaaaccagtaatctaatctttacattcacatcccaatcgccatgattcctcgtaacattattaactaactcttagaaacttcgacaagcaagacaaattatttaccagctgtgagtcgccgctgctagtacctttctcttctcacccgaagtataacaacatttttccttcttcaaccctatatcacttcaagttcatagctatggttctgtgattcatgacagcactggtgtcactcacttgctttcctcttttctcacccaattaacttgtaaaagcatttttccttctccggtacatagttatacatagttctgtgattcattaccggggaaagatccataggataggagttcagtctagatccaaacaccaacaggaatttagaggctgcagtttagttttgaatgcaaccatctatgtagtcatgctcatgtgttcttctccttccaattgcaagtctcaacttgctaaacaatctcgattttgcaaataatcttgcagatctaatccccgtttaaacaattagcttgaagaaaatgcaggatcacgaaatgtaccaccaacaagctgaagcagcaatagttgttgcttgtggccagcatgaagactcaaaaggtgcaatgatccttaaggacttgcctagcaagatcaatagctccgcttcttttatagattaaatgcagattgaacgctgcttccctgcggaggtcacaataaccagacctctgattctctgagtcttgactctcacttggacgattgcgcatggggtgatccttctcacacattgccagaactttttcataatatgatgctgccaatgttaccagaccaacatgatggtatgctcgagctatattgtacagagcttcctgaaaacaaacacagacagtgggcatgacagcttgttacgaatattctatagcgtaaaaatttccatcagttgaaaagaagaaaaataaaattaaagcaagcttcagtattaatgtgagatgtagacttcataagaactacacaggccaggtcttgaaagatgtcattagagccaatgctatgcagaggtatgagtctaagttgtatttactagaggggccttcttaaaattccttcaatttccacagcacgtagttatttcgatacaacttcctaagacaatacagtcttgtagaaaagtttaacacgtggcttctttgttgggtgctatcactaagaattttaaagagtgtcttattattttacttatttaatcatggataacaatgttcgaaagtgttttatctagtggggctaagtttactaggagtccttcatttggtctttctgtattttcacccgctccttggtcctctcctatatcggtacaaagtataaatgagtagatgaacacaacagattttcagtcattcgaatcaggtggtccttgaaactctctaagattcaagactacaaatatgcaaatagtcaacagtttggatcaattttagttccagcccaatccatttcacacaactgaagctagcaccttacaaataatcaacttgcaaacaaacaaatatcaaacaagttaaaggggtaatagaaccaaacctggctactttcacaatgccttaaattattatataggaaggctaagccttgtgtaagacactgatgtttattttgaagtctgaatcctagtgctaaattgattaaagtagttcctgcaagaagaaagaaaaaaaatcttattttgctttattattacattactccaattcaaagaggtggaagaggaaaaagagaaacataccaacacagagatttatcaaggggctctcgggtaacagtttataagcttcgagatacttccttgcagcatcttgatgatggctgccactggtaagctggtgtgcagaaataagaatgggtgggacacaatctttaagttttccttgcataaactgcagaaacttataatgtcttgtatcacgattctccaatctgaaacgttgcaaagaacaaaatgactaaaattacaacagcaaaatgaagatctgaatttcaaacccatatatgttataattgaagggacatgattcacacatgaaaatacttttcattaccttgaaataactttgtagtagcaattccatgcggcaatactgtatggatgctgctgaacaatgtacttaacatagtcgaaaccatgctttggttctgtgatgttgtaggctagttctgttcaagattatacgtgtaatttagccatcaaaacaataaaactgtcttataataaaaactgcctaaaaaattaaatattaaatatttgtcagggaaaataaggaacaagatccaaaagaagatgagtagaaaaataaaagccttactagctccaaggatccgaagctcctcctttttatcagcagataaactgttatttgccaatctcagactcagacttataatctctaatgcatctgaaaatctttgcaaggtggctagtgtcttacataactatgaagacatgaaagacatataataagcaaacaaataattaatgtgtttatgcaggagatattaagcaaaaagcaacttaaagaatggtattactacttacattgatgataagaagatgatgctcttcatctttaagaatattaggcagaggagcttctctatgttcttgtaactacagatatcacagat

SEQ ID NO: 26269 - DNA, 1418 bp, Cannabis sativa
caacataattggtcactaattttatatcacactttataatagcatatacattatacatatgtgccacaaagaattttaatccaacaccttagttcttcatttttgttaatcacaaacttgtttcagtataataattgttttgctttctctgatgtgaaggagagaaacggttgtagttgttgaggtatagaaagaggagccctgaaatgaagaagtgatcaagtttattttacattttttgtattgatttttgaaacattgggcggtttcacaaaaaattacaaaaaattgttttattatgattatgtttttaattaacgtgcattgactatgtaatatatattagcaagacgttgatcatatcatatgtgtactttttttttttttttgacgcgatataatatgtgtactttatttggctgtttttatagataatgtacttaaacaagattggatgcatttattatgaactaaaggttaattaacattttcacatctcgaacttttctcgaactttgacatgtattaaattatacctttaaatttttctggtcgttaaaaatccctctgaattattgagattgttagatttaaggacttttatccaattttaataagaatagtctaatatagatgaaagtttagggggcatgatttgacacgtgttaaagttcgaagagcgtgatttgatagatattaaagtttggggagcatgatttagtacataaacaatcactaaattagtaaaattgaataaaattggacaaaaatccttaaattcgataatctcaatagttcaaagagaatttttaacagtcagaaaagtttagagatgatgatttggtacatgtcaaagtttaggggttaaaaatccttattagcctgaactaaatgtgtcagaacaaatagggtgtgcataaattgatctaatccaattacaaccgatcgatctaatcacaatcgatcgccaaatattggatatacaattatgattggattggaccaaatgttattttgaatattcaattggattggatcggatactggatgggggttcaaaaatcaaatacatctaatatctaatcgaactaattagtatttttatttagtttagataaataattaaattttatattgttatatctaaaatatatatgtattgttatacaattattgtgaataatataaaatagataagaagtaaaaaagatgaattaaagaaaaatataaatttggatgatttgacatctatatatacatgaaaattaaaattagagtttacggattgatccaatttaatttaataaaaggctatttacaaaaatatagaaaaacaataaattttgatatctattctatataaagtgtgcctgtataacaaaatttttggtttatgagaaatttatgggagacttttt

SEQ ID NO: 26270 - DNA, 1949 bp, Cannabis sativa
tttcaattctagggttttgttcaagttttcatctttgtattgagacatgcattttagtgttgaaacttgacaatgtagtttcaacttgtttaatgcttttttttttttttttaaagtaaataattaaaataattatgacagttgatttttctagtttgcattttggggtcttcaaaggattcatctttgtattgaattgagatgtaatctcttgtttagttgaaatatagtatcaatcaaaactatcttttttatttgtttcaacttcctaattatggctttttttctggataaacagtttcacttccctattttatgtatgttataagttaaagttttagagttgaaacttgaaagataatatcaagactctctttttatttgcttcaacttgtgtgataattagtttgtataagcgaataattatgatgatgctatgattgttaacaggaactaaagtattcaaaattcagatcaggaacagctgtagaagtgaatctaaatcctgaaaatgtaatcactgcatggatgccagcaattgtgattggggaaattgatggtaaaacttctgttggggtaaagtgtaagaagaatattaaagatcgtgatgagggcgttttcgaagtagatcgggagatgattcgaccccaacctccagaaacgagtgatgttgataaagttttcgaggtgttggataaggtggatgctctttgtgatttgggttggtcagttggagtagtcactaaaactcttctaatcagaaagtacattgttaaattcgatcatgggaggaagttcacgacggagatgatgtttgatcgcactgaactgcgttatcacttggattggattgatggaaaatgggttgacaaatcaaaggtggtatatgtattgaagctcatgttatgttagctattcttaattcaggctggaccgaaattgaaacttttgtctgtgtttatttccctttcaggagaacttaattacaccggagaatcgaaaaatatcaacatgtgatgaaggtagaagtattggtttaccaaccttaaatggaagtagttggggtagtgttactgaaaaagtaacatcatgttcaacaaacatggatgaagatcaaatgtctccttgtattgttaattcatcaacatttgaacttgaaaagcttcaactttcaactgcaggtacgaatgatcggtcctcgggtagcttgtttagttcgagttatttaagtatgtatggtaaagaatagagaaataaagtagtttcactatgattttgcagctaaagctaaggcttctagtacacagaaagatgacaataagtttactaagtcgaaccaagtagaagaaaatgatgattcgggtaggttaagtgagcctcaaggagcaccagtccttgtgaacatgggcagcgcgtcttctttgcaggtatatatgaagccattttgataaacctgaaaagataaattggaaatcttaatgattttggtactctttagtaatctatcttagatttcagatttcaatgttccttattgtgggttttctcctttgaatttaggacggggatcaaaataatatgaacctgaagcaccagtctcctaacaatgatattgctatatcgaaccaagtagaggaacttgacaattcgggcaggttagcagaggagactcaaggggcaccactattggagaacactggtggaccggcttcttcttttaaggtataactaaagctatttcgatatacctgaaaagataaatcttgagactttattttatgctatgattttttattttgtgcatcaacatttctcttagatttaagtgttgcttattataattttcttcctttgaattaaggagggggatcaaaatgatgtgaatatgaagcgcctgtctcctgacaatgatattgctaagtcaaacctaatagaagaaattgacaatt

SEQ ID NO: 26271 - DNA, 2384 bp, Cannabis sativa
caaattcttcccaatgtatacacaatttgtgagattatttggatctaaaataacctcttctagctcttcaataggtttgagctggttattttcgtcttggatcctatgatctagatcctcatcttccttctcgccttcttttgttatgactaccatcaattgatgattggctcttctatttcaaagttttatgcgataacattcgcgagccaataattggttgcctcggactactcctactcccgcttgtgttgggaatgttagggataagtgtttgattgagcttactgcccctagtccaattaatgtagggagacccatcaatacattataaactgatggaagatcaacaactaagaattcctggattagcatcgttgataatggtggctcttctacagttaacggaagatcaatgatgccttggctggtgacactatcgtgtgtgaatccacagaagcttacaatgcaaggcttcaactttgcatcctgtaaccccattttctttaatgtatcaaaggatgttgactgagctctcattgtccaccaatactctcttcactcttttgttagcgagctgaattgtaatgacgagaggatcaacatgcggatactacacatgttttgtgtcttcctccgagaagataatcggaggttcatataatttttttttctttcaagtggttctagagcaaacactaattgtccattctttatttcattgatatatctttctgggcattattactgtttctagcgagatatggccctcccgaaatgaccagtatatccttgccctcaacaaggggaggttgtattctctagttatttgggttattagggtttgggctggtttggctcgtttccttgatgtcttacatattatctaaaatatccacgcgagatcagactctctatctcgtctttcagttgtcgacattcttcagtagtatgccccatgtctttgtgaaattggcaatatttgttgagtctcgcttatgtctcgcatgcctcatgggctcaggcttgcaaaatgcaatcttgttttcatttgtgagaaatatattttcacgagtttcatttaactcgatgtatattgaataaatcgagacatacttgttgtgctttttctttttgtttttatttttagaagattcttttgaatcatcttttctttatgtgtttgaaccataggattatcctccttagtggagattgtacttgctattgcagtactcgtgctgggtttacttcccgaggaagtcttcaacaacttcatctcgtttgtagctttttcttttagcacaaatacttgcgctctttcattaattcattaatgttcctcattgggagaccttgtaggtcatcccacaactcgcccagctgtagataggtcagttgtgatccctgcctaaagagttgtaagatgaatactgtcattctgatttctaacctttacattacagtggctgtgctaaagtgacttaagtaagccttaagtgactcacatggttgctgctttatgttggttaagaacgacgctttaggtcacctgtctctagcagcttgaaattgttttttaaagtccttagacagttgttcccaagacgttatagaatgatgagtaaatttgtcaaaccagttactcgcagctccagttaaggaagtcgggaataacatgcaacgcaaattatttgagacattgctggctcgcattagagtattaaatttgtttaagtgagcgattggatccgtagtcccatgatattgcaaaacatgtgggtttttgaattccagaggacattcagaattcaaaatatcagggtgaaacgaatttgtctcttcatccaaatcgtaaccaggcaattttccatgttttccatcctgatactttctgaacttatcctctagttcaattatttgcaattggatgggatctatctgctgctgattagcattaagttgatggcccaaattaggtgcattttggtttgtttgctcgagaagatcaggttgtcttcgattcaggtgctcacaaagatcaggttgtcttcgctcataattactcacagaccttgtctgtgattaactcttagattggtagctttgcatgttgctcatgctttcttagtcagcataacgtcaaggtctactttcctctcgtgtttgcctatgcgatcgattgtgtcctcgagaccttaagtgtcttgaactagaacttgcttcatcttgtaccaaccttctccttcaaaagaggttagatacacgccctctatttagatacatgtatacatcctatctctaagatcgagaaggactttgagggtgtcttggaggtagcccacttatctattcggttttgtgccctaaataaaacccattac

SEQ ID NO: 26272 - DNA, 4102 bp, Cannabis sativa
taattaattggaacgagttaattacaccacatttaataatgcaatttaattattatattttttgaactgattcatattccttttatagtacacgtgttagcttctggtgaatagccgaatttcaggtataacaccaaccctaaatctaacataaacttacagatcacagaaatttatcatacattttaatcctaaatcaataaactcatacaatttaacccaaaaacacagtaaaaaaagagagtgcccagaatcttactttcgacattacgatggtctggcctcggtggtcgtgggttggagagagggtcagagatgccgtgatggtcatggattggtgagagactttgatatgtttgttgttaggagtttggtcagtagtaatccttcgatccgagaagagagtgagagagaggcaggagtgtgttgaaaaatggaaggggtaatatagggaataaacaaaagttggcctagttggccaatattaattagttttagtttaggaaaaaatttaaacctaatgaatggatattttattaaattttccttatcaattcaatgtcatgttactttcctctaacagaaagggtacaagggttaagaagattgaaggagttgttccactttcgctgcatgcaatcatgtaagttctatttttaatttaatactaacatattctaggagtttagttgtatatttgcttatatgtaaattgtttgtaaaattctttataagagcccaaatatggatatggtatggatgatgagtagcaccttaaggaatgtcaaagacttgaagcaaataagaaaatgtcggtgatcctcgaaccaactattgatctagaatgccttggtgagttattgcctcaccaactagggaattaggcgtgagttcctcctcgagatttctttcgcttgaaaacaaaatcattagtcttctacgggtattggatgtaacttttccatgggaaacaaatgaatagtacaatttcaactcgtacaaacaaaaagaaaatatctcaatccaaacatagttacccattcacagtttagatgttttaattttttgttcttagaatttggagataagatgaataaaattctatctcaaaactaattgatacattgataatgagagaagtagcccatctattttatatatcacaatttatttctacacattgttcgggactacctcttaaaattcaccgataaaaaagaacaaataaatcaagggtaaataattggtcatacatattgttaatttcaatttgcaacattagtttgaaatggtcaatataacagagcaggtaaagacttatccacctgacctaaaacattaatttgtttggttcacattaaatgatgtaacaataagcgaaaaggtattttcaattagaaaaatagttgggtttgtctagaggtactcatcgtctttttcgctttcttctcaaggcataggagagatattagataacataaaggaaaaggatgatcttcccgaataatatatcctgtgttcatatttgagttgtttatacaattgattttaattacaactgtctttgaacttgttgacttaaaatcaatataataatacacctaatatatatgctatgaaatcttctatagtaagttgtaacggtccaataccaagttaccaacacttcattcatggcatccatgactatcatcactcttttcttggtttttctttctttaaagttccaatattcaaaagcacaatcttgggttagagcagggtactggttttcaggtagtgaattcccaatttcagatataaattctgaactctttactcacctaatttgtgcttttgctgatgtgaactcttcttcctatgagctctcaatatcatcttcaaatgaacaattattttcaactttcacaaacactgtcaaacaaaagaacccttcagtcacaacacttttatccattggaggaggaaatgcagactacaaagtcttttcacaaatggttagtaattcatctcatagaaagtctttcattgattcttcaataaagctagccaggctcaatggtttccaaggcctagacctttgttgggtctcagcaaacacaagctcagacatgtcaaacatgggacttttattcaaagagtggagagatgccactagcaactcatcgagccaggaaccacaattaatcttaaccgcagctgttcagttcacaccagatgttgaagacacttctttccctgtggactcaatccggagccacttggattgggtaaatgtcttggcctatgactactacgggcctcagtggtggaattcaaccgctgcacaagctgctctatttgacccttcaagccaaactaatactgattttggtatcagctcatggattggcaggggaatatcttcttccaaattggttttgtcattgccttactatggatatgcttggaaacttgtgaatcccaatgaaaacagtattggagcaccagcaagtggtccagctatatctgaagatggttcaatgacttataaggacattaaaagttacattaagaggtataatgctcaagtaacatataatgctacttatgtggtgaattacttctctgttggatcaacttgggttggttttgatgatgttgaagttgttcaagttaaggtttcttatgccaaggagaagaagttacttggttatgttgcctggcatatagctaatgatgacaattgggtgctttctcttgcaggtaccaaatcaaaattcccagttacaatattttttcttgcttttttatgtaaatctttactatgtttacagcactgcaaaaaactcagaaccaatgttttttttttaaaaaaaaaatgaaatttaatggcaaataattttgatttccattgtgtttgctgataaactttcttgatggagaccttgccaagtccttttccctaattttcaaacattatcacatctggtgggcctaaattatagaaaatcacagttcatagtatagttaaaattgttgacatttctcattagattagttggtcggcaagacaaaaaatgaaatttcctgtataatccaaatgacacggcaacaaagatagcatataatccagtttaactgctatgctagttcaaactagtttgacaaagtaaaaaagatgtaaataaaaaaatcactttcctcttgtccatttcctcctctgattattacctaatgataatgttaattatccttgtagcaaaagaaggtggtggaagaaagaccaaaaagaagtggaaattgttagtaatcattttcacatcaatagttactactgttttaatagtagctgccttgctattttacttcttgaaaagaagactcaaatcaaaaggtatactctatactctcaaatatgtcaaataacttttcagctctctaataagattctagagaacattttaatgaaaccaccttttcttaatagttgaagtatcaaagtatccaaaaaacagtgcagcagctgctggagattttaatagcaatattcctaatcttcgagtgtttagccttgctgatgttgaggctgctacagaaggtttttcagtcgaaaataagctcggacaaggtggatatggtcctgtttataaggtgagttttcattaatattagcatttgttgctcaaacagctaacattgtcttacaaagaaagcatataaagcattgagtgtctgtttggtagggtgtacttccaaatggagaagaaatagcagttaagaaactgtcagcggcttcaacacaaggattcgaggagtttaagaatgaagttgtactcacagcgaaacttcagcatgttaatcttgttcgagttatgggattctgcattgaaagagatgaacaaatgctaatctatgaatacatgccaaataagagcttggacttgtacctatttggtctgccatctttccttactcttagtttcagtaccctaaattaatgatcagtggtccaatatgagtaagttgccattagtactaattttcattcataatatccatatgtagatcctcttagaaggtatgtcttggattggagaaaacgtgtaaacatcattgaagg

SEQ ID NO: 26273 - DNA, 3641 bp, Cannabis sativa
  modified_base (170)..(179): a, c, t, g, unknown or other
  modified_base (223)..(223): a, c, t, g, unknown or other
ttgtgttgtatgattacaacaatttaaaataatgttaatagtataattgttttcgtcttgccttaaatttgttatatatatatatttttttattttcctcaaaattttttgttatttttattttaattattttaatttgttgtttgatacataaaataacaataatttannnnnnnnnnttgttagttatgtgaaaaaatattaataaatattaaataatttnatattaaaaagtaatcaatccaatttacacttttggaaattggattaaatttgagttattatgtagattagattggatccaaaatataatattcgcatttacatcggatgaatttatcaacattattaggaatctacttgaaccatatgtttgttattcagggaattcaccaagttctagaaactagaaaccacttcaatcttatagaagaacaaacctataaactcattgtgatgggtggtaattgatccttgaatggtccgattgagagctttgatttgtcattcttttttcaattgatggtggcaatttaaatagaaattggtatttctgaacagagataataatagaatattggtatgggtcatcctattattatcaattatataaaatgctgtattaagatctggcataaaattattagtgggaaataatccctaaattatttgaatgtgagttttggtaagtcatttttcatcaaatagaatattattaggagttgcaacttacaagcatcctatttgtatcaattagtgatgtatcaacattttatatttaaattacaccaatcactaatatcacatcaagtactctagtgttggagatatatatatgtagtggttactcgtaaatgagatggtttgccttcttgctacgttgatgtatgatcttgaagtcaaactagtatgccatagccaacttttgaaggctttttcctataaaattttttgtgtgagtgggcaagctctcaccatccaccattgtaagaaaagtaatgtcatcattgcaagatcacaatgttcgactacaaaccattactcaatcaaaatcatccaattttgattctcttatacatggaataataataacagtagtaattaaacttcataccccccattatgcaattttattacttttaaaaactagtaaatagaaaagaagttctcaatctcagctgctgctgagtactaataagttagtttaaccatcttggtggtgcctttatgccatgaccaggattcagagggtgacttaggcagtggaggaagcaacacaaccttgcggcacagaccaaaaggccacccttcacagtgacaaaactcttgaattatcgaacgcctttgatactcttttaagtcgagctcaattggacttggacaatgagaaaaacttgtattgacagaaagaaaaacatctttacttgcagcaacacttgaacaacaagaaaaacagcttttcactgataaaaactcttctttttcgtagtcttcattactatcatcctctttttgttcgagtccttttgagcttatgtatagttgtctggttattggagagtaataaacccaagaaaagttatctgagctcataaggataggcttcttcttcaacttctctagtgccccacttcgaattgctgaaacaacttcctgatgagatgaataagaaacaggaaaagagattcagtaagaagaaataaaatgaacagcaattcagtggttttgagtttggaaaagttggtacctcttcttcatcatcgaaatcgcttgttgggtattcttcatcttggcctaaagttgaaattcttcctcgaaagttatggcaattggaaaatgcttcctttaaacaagcagccagaaatttgcatcccttggaaggatttgaatgctcttcatgacagaacacagtcattttgtttaaagaagagaatgttgaaacataaaatttggtattggctttgtgagcactgaaatatatacagcattcttgttagataatttcaactcgttttgatgaccaaattgacttcctttacctttatttgatagtggctttgcaccttatttgacaatgctggattttctatcctttggggtaaaggcaaagttaaaaaagtatttatacaagaattataaatgaacttatctttgaattggttttaagattcactcttgaatcaatgctattaaatttatcccactaagaaactgattttgtttgtttctttgattttctttgcttaagggcttatttctgtagttttcagtggctcacttcaagataaagttatggttgaactagagacatattaccaaacaaagattgccatttgataatgtaattggacaaatattttataaataatacctctttctgttgaagttaattcaattgaagataatattgcataataatttttttctttttcaaaggataatattagaaacaaacaagtaaacagcagccactacacatctgggccccacatccactttcatgggataaagacttagcccagaaaagaaatgaatagcatatataacagcaaaagtgaacttttgaattgcagggtagccttaactcaactgactgatgttgttttcttgatatgaaaataagtacttacttgaatttaatgcttaacaatggtttatgtgaattttgtgaaacttcaaacttcaatataactcaacagaattgcgtgcagccaatataaaagattttgttccattccatagaataaagtaagagaaaattaagtatcaagtctcacatattttaattttagtttagaaaaatgttaaaaaactccggttttaaatgtcatattgtatattattattggtacaattaagtataaaatctcgtaataactttaatagaaaattgctaactacaatgctcataaagcaataaaactcaattagtcataaccaaaatttcccctttttctattaccaagatgtaaaaatcatatcttgataaaaggggcttagtagaaactaacacaacttttttttcaccatattatgaatcaaaaagatctttacaaaacaagaacaagaagatttgaagttttgagaactttgattaaacacttgagttaacatctaatctaatttacaaacaaaccaacaagtttattaacatcagttggatgatttctgaagttgcttagaagttaaagagataagagattgaagtttagtaatggcggaagtctgacccggtgggcacttggaaagcgaaacaattaaacagcgaagagcctcatcatgttttccagcattgaaggccgtacaccctgccgtaaaggcttcatcagccattcgagcatcatagttctgagccactttactcgaatcaaagctcttctttttcgaaggagaagaagaagaagaagatggtggtggtggtgagcgtgactccaacagagccgtggctcgtgaaaattcaagattagatatggcagaattaatgtctaccattagagcatctggagaaagtgggaaagctttaacagtaccatcaaagacggtccaatgggattgggggcttattcttgcttctgctggaaccagaaggccattatgagccatgtctcttaaaattaaagaaccctagttgagttaagatt

SEQ ID NO: 26274 - DNA, 3464 bp, Cannabis sativa
ccaactaactcgaggtctaataaatgcatagtaatcaccaataaagagttaaaactagtaaataaataagaacacacaagattgtagaggttcggattccttatatataggtaattacctactcgattcctttttttgttatattaattgtgagataatatcgtgtagatcactaagaaagagaaagtgtgtaatgccctaaatcatagggacgccacgttgtgtgctcttgaaacacaatttactaatagtagattaagtatttaatcaaatctgtgataatagtaaaaattttaccaaaatatgactatagcaatgatcaggataacatcgctaaaaaattgtttcgggcatcccctatttcaaaagttttataaaaaaacaatgtatacaaaaataagtcaaaatacacatcaggtacagtccaaaataattcctcacaatccaaccatacaagttggataagtcgatatgtgcatttttcggacaagattgtcatctcatgattgtcttagttttcccttgcccttacatgcaccgcaaagtacccgtgactcacaaagactcactacaagaaaaaggcgttttaccggcgacgaagctcgtcggtaagagtaagaggaaatagccgacatagttttttcggtgacattttgtgctgacaaaagatgccaacaatggttcatcggcatatcaccttttgctggcgacttcagtagatgcaccagtaaaagtgtttacaccgccgaattaaattttctgacataagttcatcgctgcaattttgtgtcgactgaggtgtccttgtcgacgttttgacagcaagttaatgttctggaaaaacttttgacgcaaatttggctacaattctccaatttactgcctaagttttgccggtgtattaactcgtcggcaaaactatttaatattaaataattaaaaagatttatcagagagttaatgcaccggcaaaacaattaatattaaaaaaattaaatacttttgccagcgcacattaacactcactggtaaaagtatgttattttttaaatttaaatatttataatatataattaaaataataataaataaatataatatcaaatatgttatgaaaccgaaatttatattgtaatttcaaaattacataaaatgtcgtaaactaaataaaagtacttttagttcataaactataatcttatgtacaatgtaaattaaaagaaaaaaaactacagatccacagcaacatcgtcgccgtcgtcatcaccgggatggccagtttgagaggaggacccagtagcatagccaggagactgaaatggcagaataagtggaatcagaggcattgcgggcatgttaaatcctgaaacagtgttggccaattggatcatttgttactgaaacgcactcatgatttgattccgagtcttcatcaattgttgttgctacttccttctcttccacccttcacttcagtgcctcatattcctcttgagtgacagtgggctgctcggagggacttgccctgggagttgctctttttgcccgtgtcttaagtctcagtaactggcccagtcctttgtggtctgaccgctcacccaacacctgtgtcataacaggcatatttgcgagaaattaggtgaggctgacattgtactggcactgacattggttggcgctgattgagtttcacgaatctcaacaattttggccttcaaaaaaatttatgaaactaatagagttaaatagaaattaaaatatacaaatagtttattataaatataaaattacttacaagcagttattgtgtgtgctcattgcgccatttgttgtccttgcagtggaactttgcaagagtatccacaacattaggaattcttccatgcatatggggacaacctatttttatacaatataaaaaattagaaaaatattattaaaaaatattatcatgttgaaaatatcataccccgctcacaatatgaccaattaaggtcttagattcccatccaccttgaatcttcatttgtcctcgatttttcgcattttgtttagctcttgcttgtaatttaaagtaaatttattgttaggaaattgaaaaaaaaaatcataagttaatggatattaaatattataactttcaattaatacttactgttttaggtctttccagtatgcgataacctctgcccacacctccgatgtcaccatatctggacgtgatctcctggttgcttctttctccctatattttttaaatattctccttccatgccttttttcgtatctgttctccagtctcgtaattcttttgacattgatttggtgacgtaatccgcgaatataggattattagttgtcaactcaaacttgatctggaaaaaaataaacattaaagtcatatatatttatttattttggtataataattttgtttgatctattacaataaaatttagaatgttaccgctattctgccccatatattctgaatgacagtatcctcaacgtcctcgaactcaaacttatctataggaattgtattacgaacaagagactttatacaattgttaaacttgttgctatagtcgtttattgtgccccattcaccatatgaaatctaaatttcaatttttgacatgcaagctacttggccagttcatatgaatgacactcacatgataatgatacatcatttattaaagagttgtataagtgtatttctaatggtgaagcatcaaataggtgatgccaattatattgcaaaaaaacttgcttcaaaagaattttaaaagttgtgccaaaattgatacattacaaaaattatactaattttatcacataatataacataatttaaaatttatatcactataaatacattattatttatttatttttatatattttaatattatattaaaatatgtagttataggtcataacgttatattataatttgtttacattcttttttatattgttttagataataagataataatagaattagtgataaatgttttttttaggtattttaatagaagtactagttgaaaataaatttgcacgaatcaaattttataattgtgagtacaatgctaaaaattaatactatttaaaaagtggtccttagaggcagttttttggaacttacagcattaaaacctaacataattcatttatattttacactgcaaatagttcaaaaagaatattcaaaaaagaaaaacaaaataaaagacacaagttaatagtagtcctaaagaatctttaatatacaaacttatttcctctttttaaaagaaaaaaccaaaagtaaaaaaaaaaagtagaagaatgtatactacaaaaagtagaaaattaaaaatatttttttaatgcaaaattatgaaaagtaaattataacaaacaatttttagtaaattatgttggtaataaattttaaggctaaatttcttaaa

SEQ ID NO: 26275 - DNA, 2449 bp, Cannabis sativa
ctgttatgaacaacctaacaaacaaaccaactaacatgacaacctataacagattctagcttaagactccccctcaagatgaagtatagagatttgatacactcatcttggacaacaaataaccaaattgagagggaaacaaagccttagtcattatgtcagcaatgttgtgccgagaagcaacaaaggataattttattttgttcttgttgatttgctcccgtactatgtgacaatctatgtcaacatgcttcgtacgctcatggaatacgacactttctgagatgtcaattgcagcctggttgtcacagtgaatggttgttggttgggaaggagaaattccaaaatcagagaggatgttgtgtagccataaaatttcgtaggtagtgttggcaagagaccggtactcaacttcagctgatgattttgagatcgtggactgcttcttaattttccaggagatgagggactgaccgaggaatatgcaaaaaccattgattgatcgccttgtatcagggcaggtgccccaggctgcgtccgagaatgcctggaggtgaagcaaacgatcgatgggaagttgttgctgttaatttgagtgaaacataagtccctgacctggagtgcgtttaaggtactgaacaatccgatatgctgctttaaggtgcggttgacgaggatcactgagatactgactaagtctattgacgatatagctaatgttaggtcttttcattgttaagaacaatagttttccaatgaggctgcgatatgaagtagcatcattgacaggaggactaacatccttactaagagaaagattagcatccattggtgatgaaacagcctttgatctaaggagacctgtttcattgagtaattgaagagtaaagggtcgttcagagacagatatgcctgccttggatcgagcaattttgaggccaaggaaaagtcttaagtggccaagatcctttatctgaaattttgaattaaggaatgctttaaattttgttgcttcggtgtcattagtgctgacaattactatgtcatcgacatagattaaaatggcaaggaagcaagatgaattagatttgataaagagggagtggtcatatgctgattggtgaaaaccatgttcaataagtgtggtgctaaatttgacaaaccactgccgagaagcttgcttaagaccatagaggcttttgtgcaaaaggcaaaccgggtttgggggtaactccccctcatggacatagcctttagggagtgtcatgtagactttttcattaagatctccatgaagaaaggaattattaatgtccatttggtatagagtctaattattgatggcaaccaatgctaagaatagtttgagggtattgaattttgcaacgggggcaaaggtttctgtgtaatcaatgccttgttgttgtgaataccccttagcaacgaggcgtgctttatatctctctatttcaccttgttcattatattttattttatatacccatttgttaccaatgggtttacaaccaagaggtaaggaaacaactgaccaagtgttgtttttcttaagagcaaagaattcagcatccattgcttttaaccattgaataaattgagatgcttgtttgaaagtggtaggttccaactcagtatatgcgtggaagatggcattgcgaaaagcaacactgagtttgtcatagtttaagtatttaaccaaaggatgattggtagaggaatgacaaacatattctttgagatgagcaagggtggaagtttttctacctgttttagtaatgaaaggctgctggggaactgtagttgttgcatcaggagctggggatatatcagtagcttttgctggtgtgttgttatgtgagacaggtgctaagttgtggtcaggaggcgcctgtgatggatcaacactagcaggtactgatgtaggtgtatgtgatgcaagttgagatggatttatagcagatgtgggatgttgttgatcaacagatggaaaaacagattttgtatcaggagaggaggtgtattgaacaggaaatagatgatccaaggattgtgtgttgagagatcctttaagggaaaaatttattcataaaacaccacatctcgagaataaaaaaatttattagagcccaaatcgagtaatgtgtatgctttcataccattgggatatccaatgaacatacatgcatgtgcacgaggggaaaatttgtgcctagtacttggtaagaatgatgcatacgcaagacatccaaagttccttaaatggtcataggcaggtggtttattgtgcatcaattggtaaggtgttaaaagttttagcaatggtgtaggtgtacgatttatcaaatacacaacattgttgataagatgaggccaatataccaaggctatagatgattgaaaagccaaggctcgagccacatttaaaatgtgt

SEQ ID NO: 26276 - DNA, 2209 bp, Cannabis sativa
ccttaacatgtgccaccacttggcaacttgtgggcatcaccttgcttgtaacgtgccatcttggcacgcacgttacacatcgcgcaatttaggaaaaattcaaaccgcaactgcaccgaaaagaatttcaaatcgtatttttttgacagtacggtgtggtgcgggcggtttgagcggtttaagtagtttgatgaacaaccctagtcaaattatcaactataaattctaaatttcaaattaaacactataaaatacaaattttaaatgtagtttaactattaaacgcaatttatatattatattatagacaattttagtaaaaaaatatataaatcggttcattcagtatattcgggttattcgggcgggttagaataatattcaacctgtccaatatattcattgggcggtttgaatttttcgtaaagttattcgagttgtgttttttgtcggtttattcaatttgatttgtacagtttattcgggttggacgatttgtaaattttgttgaacagccctaatatataattttttttttccctttttaaatttcgtggtctttttataattttctaaaaatcaaagttttaagtttggtatttcgacgaaacataaataataattaaaagtatattgaaacttgaatggatgaactgtgaacaggggcgttaccttgtcttcccgccgccccaactgctatcgaccactgatgaagacgacgactgtgatatcaaacttgtacgagtatactctattacttacctcttcttactttctctaaccaacaaaacctttcatatgatgcaaaaaagagggtttaacacactctttcactttcactcaattctcaaaaacccctcaccactgctcctcttttcttctcccagaaccccattccataccacttccactcccttcgccaccaggcccctctccacttcttcaccggatgatcttcaagggttggtcgacccggaagatcctttggcgctggagtccttttcagctcacgagtttgctttcttgcgtgactcgttggattccaatgttgctgattctggctcttccgaaggtaagattgcgtcagcgaagttttccagtgaggctctttgtatttccacggccattagagagaataatgacgggtttggtcaccagactcagagatttcttaggcagtatagggacaagttgagtgaaagtttggtggttgatgtcttgaatcttgtacaaaaccctgaattgggtgtcaagtttttcatctgggccggtcgccaaattgggtatagtcacactgttcctgtgtacaatgcattgttagagatgttgaagtttgatggtaagcgtgcaatacctgaatgttttcttcaagaaattaagagtgatgacagagaggtttttggtaagttgctcaatgttttgattaggaagtattgccgaaatgggtggtggaatgtagcaattgaagaaatggggaggcttaagaattatgggtacaaacctaccagagcaacttacaatgcgttagttcaagtattcacaacagctaatcggttggacactgcacagttggttcaccgggagatgtgggacttggggtttaggatggatgagtttacgttaggttgttttgcccatgcgctttgcaaggttgggaaatggagggaagccctcagtttgattgagaaggaagagtttatgcctgatacaattctctacacaaaaatgatatctgggttgtgtgaagcttccctttttgaagaagctatggacttcttgaacagaatgcggtctagctcttgcattcctaatgttgtgacttataggattttgctttgtggctgtttaaggaaaaaacagcttggtagatgtaagagaattcttaatatgatgattgcggaaggttgttatcccagtcctaagatatttaattctctaatccatgcttactgcagatcagaagattacaattatgcctataaattggtaaagaatatggtaaaatgtggttgtcagcctggatatgttgtttataatatcttgattgggggtatctgtagcaaagaagaattacccagttcagatttgttggatttggctgaaaatgcttatagtgagatgcttgatgcagggattgtgttaaataaggtcaatgttagtaacctcgttaggtgtctttgtggtgccagaaaatttgagaaagccttca

SEQ ID NO: 26277 - DNA, 4400 bp, Cannabis sativa
taaatatcttattctcaataagcttctcagtgttcataaaattacttaaaaattcttaagtgtctcttagtttgcttgtgataattttgttttttttttttactttcatacgaacttttgtgttgtgaaatatcaggtttccaaagctactatggtggaagacaagcttggaaatgtttatatgctttccatccatctatctttccgcttgcttagtctactacttgttccacttctttcacgctgatagcaataatgattactggctaattttgtcttcttctcttcattgtaatgtaacatttgtttcattagtttctttttggcatattaggttagaacacccttctgccagtgttgtcaattttatactacacaattataatattccaacaactaataaaatagtttttttttttacttttgtttagcttgttgtcaaggcaaaatacacaagttagcttttccaaattctaacattgtttatacaaaaccattaaaacttattcactttgagctatgggaaccttctcctatttggtgtcttgtaatgactataagtactacattcactttattgatgcattttctcgatttacttgggtggttttacgcaaatctgatgctttacaaacgtatttgaatttaaaagcttatgttgaaaatggatttgagataagattaaatctcttatttgattagggaggtgaatttcaagcttttaagaaaactctttcctatcatggcatctctcatagagtgtcatgtcctacaactcaggaacaaaatggtgcggttgagcgcaagcacaacacctgattaaaatgtctatagtacgtatagcgcatgcttctttagcccttaaattatgggatgaggctgtgaggacatgagcctttcttatcaataggttaccaacacttgttaatggtaacatttcccctcttaagaagcttaaaatgtttcccttgattacactcaactaaaagtgtttggcggttcatgttttcctaatatcagaccattcaataaattataaactataattcaggtctaaagagtgcacctttttgcggtatagtctcaaacataaagattataagtgtctttccaaaattggtagactttatatctctagggatgtaatttttaatgaatttttattcccttattctactggtttctctcatactcctaccccagttccacaagcttgtcacacttctgatatctctatccttcttgtttctccaactacactacctgatttaaacactcccaccacttcctcatctagtccaccatcatctcctcactcttcctatgatatggctactatttcaccccatcacaacctacttgcacacaatctttctctgtaatatctcacaactctcataccaactctactccagcacctgtaccagctcaaaatctatcaaatgatccaccttaagctcttatgaatacccacactattattactagatccaaagttttggtgtataagccaaaagtatacatagcctctcaagaatctcttgttgtgaaagatgctctttaaagcatccaaatcagtttcaggctatgaaaactgagtttgcaacccttcgaaagaacaatacttggtcacttgtgcctctacctaaggataggaaagctattgtctactgttgggtgttttaaacttaaagagaatggagatggctcagtcaacaaattataaaacataactggttgcttaaagttttctccaagaagtatggttttgattttgaagaaactttcagtccaattattaagttgactacaaattgatttatcttgatcatttacctatctaagcactagataattcatcaactagacattaacaatgcttttattaatggggttttacaagaagaggtctacatggtccaaccacttggttctgaagaccaatatacttaatatgatgtgtaaactacagaaagtattaacaaactacaagggtctggtttgacaggttaaagatagctcttctcctgggttttcacaacttaagagctgatcaatatctctttattagacgaacatctcatcatacaatctataacttggtttatgttaatgatattatagttcttggaagctcttttgttaaggtatctgttctaactcagaccctaaatttcaccttttctcttaaggaattaggttcgctaaactatttcttgggtgttcgagttcaccgaaactgcactagtttgtttctctctcaaaagaaatatcactactaaaaaaggggatttcccaactttttttttatttttgtcaatctctatgactaacgcctatttgacagtcgcaaaactgggtggaataggcgttgatggaaaatcatcaagtatgcctatgtcctgactatttaaaattttcgacaataacttacactatagctgagagtttagaacagtcgacaaaggaattaccaactttaaattgccacatgaaataacatccagatctaagctacacgtgcctagatttgctcatatctaccaaaatcaaaccagacaaacacatttctaaaacaaacaaaaatacacgaaacagatgcacaaaattaaaaaaaatccaaacacataatttaaaatttcaaattactaaatttagagttggtcaggttcgatctacaaattcgaccaactgtgatcctaaaactctgacacaagcttggccatttgcgagctcctaacacagaacaaccacagatctatagacaaataaaacaaaaaaactcaaagattcagtgaacaaagagagaatccaaatctacacaaaaaataaaaatggaaaagaaaaagatgaatctaaaaaacaaaaatgaataagaagatgaagatgaagaagagagaaggagatgaggtggacatttacctcattaagttttggggggtccacgttctcaaacttgtgctccatttagggttgttgatcgtcaaaaataggcagagagggaagagagagaggtgataatagagatagagaaaagtgtgagagagggggtttgagagtgagagagtgaatgagatcctatttttttaaaatgttttagtgaataagcagtatttaaattgtctttgagagttttgtgagagaagagaaccgatagtcgactataataaattgtcggctataccttagctgatgattataaatcgtctgagattctaatctcttagcagttttaaatcaacaggtacatttgaaaactctttaaaattgacaggtattctcaactatatgcgtcagtattaaaactcacttacttttattagtgatagtcctaaaaaaaaactattttgaggacaaacaagaataataacttttgtagtaatgaatattacaaacctactcttgaggaccaaggtgcaattatccagtggtctcactactcccatgacaggtggtgagaaactctcaactcatggcagtgaccccattttaaatccacaaccctacaaaagcttagttggggccttgtaatatgtcctcatcactaaacttgaattgtcctatataattaacaaggtgtaccagtttatttaaacactattagagtcccattggtagactgtcaaaaggatgcttagatattttaaaggctctattgactatggtttgtatctctccatctcacctaagatggttctaacaggatatttgatgttgattgggcatcgaacccagatgacagaagatccaccttggggttctatttttttcttggtccaaatttagtatcctgctcctcaaagaaacgacttgttgtgtctcagtcaagcaaggaagctgaatatagacgcttagctcaactcacaacatagattacctgactgcaaacccttttgtttgagcttcaaacaagacctccaatttcatggtgtgataatctcagcatcgtgcatatgtctgccaatctagtgcggcatttttggacaaaaaacattgagattgacttgtattttgtatgggaaaatgtcattagcaagtaactcagtgtgcgtcctctactacaaaatagactttggtgtcgattcaagggatatttttttattattaaaaaaccaacaataaagacaaccccaactctaaggtttcagttcataactgatacctataatggctttagtgtttgttagtagaccgacactaaaataataactaagactaaaaaaaaaaaagaaaatgtacatgctgattgagtataagtgtcagttcataactgacacgaaaagctcctttggtgtcagttctaaatcgagactattgaattgtttcaaaaaatagcccacattaaactctactatatatacatattatcctaacacaactctacatttcaagcccattta

SEQ ID NO: 26278 - DNA, 1805 bp, Cannabis sativa
tccaacaataataacgtattgtgattcagttttactcattctatacggcaggcaactagattgatgggattgcagcactaaatgtcattattaatgacttatcctattgtgaactctagtgtggcaccacagcaaagttgttatttttttctcttcaaaccaaattaaataagcatctccatcatcacttctaatattcaaattgtcaataggaattaatgagctgtttgaaattggtgaagattagcacattccgcaattccccacttgaattgaatactttttcctcggaaaaagaaagcacacactactgaaaataattaaaaacctcaaactattattttatggctaacaccatttaaaggaaatagcttcttttagtttcttgcaggtaaattaagcagttgccactttattgggcaacaaaactatccgttttttcttctttgaaatatatttcaagtactatacactatcctcaatgaagctttgagtaagtaaagagaagacaaattttcagatacccctggaaccaggaatattaacccactcaagctggagttccacctccccactctcgacatttttaagtcggagacaaaggttctgaatgagtttgccgtcactccaaattatggagctttcttcagataggcagttttgtctacttggttggactttagtgatgatggttccacttggtaggcctgccaaacgcatccttagagcctcaacaaatggcccaatgtcaaactcggcgtctcccattttgtcatccatagaaaatgtgtccttgtcatacacgaactgcagaccaaaaccattcatagcgatagacaagtgagtacaacaaatttaataccaaaaactttcgtaacaatagttgcatttcatttcattttataaatgtcggcaacattaatttaaaatcaaaaaggcaaaaaggtctaaatttgagagataaaatgaataagagtgtttacaagcttgactggaagagttggatctgcaattgagagagttaaattttcattccattcggggttcacacaattcttcaccacacgagtcttcaacttctggaataaaacaaaaaaaaacatagatatttacataaacaaagtaaatattagtatcaaaacttgaccaaaatggctagcctacccaaataatcagagtaaatacaaattgactggatttggaaacgggagaaaaaccaacataatcagggtacaaatagctctttaaaaaaaaaaaaaaaaaaaacaagagtacaaaaagctagatatatgattaataaaagaataaactaaaaaaaaaagttcgaaggaaacattaatcacaaatacaaataagagcaaaatataacgtttgtttttacataaatctatagattgtctctatcagttgagaaaattttcaaggtaaaattggaaagaaccaaattccctgcactaacgacaccaatgactaagaaaagagggcttgaccaagaagtcaatgacacgaaattctggaaaagcaaatctaaaaacaacaaacaaataaaacccataaacaaaaatgaatcaaaaacgaaaacaaatgtctaagaggttacctgcttgcccattctgatcacaacataagggtcactacttctgacatctcttatggccaggtcaacccctctgttgacgtgaactctgagaagtcccattaggtgctccattgaaaggaaatgactatgaatattgttacagagaaaataaagagagaagtaatgggaattgataaagggtacaatgaagtcttttttttttttt

SEQ ID NO: 26279 - DNA, 1675 bp, Cannabis sativa
ttcctattcctattcccattctcattctcattcctatattttcattcctcccaaccaaacgcctaaagttaaaaccaaaacttcattgagagttatcttctctcgtaaacaataaaattaagctgaatatcatatacgtattaaataacacccttgaaaaaaagaagacattatttattattataacaagatgttgaaaaaataatataagaaggtagaattaattcattttaatactaaaatttagttaaattatatggatttttagatctactctatccagtgtggccttatgtgtatgcagtttagtaccctttcagcctatgaaattgaccattgatttttttttttcttttttagattgttctaaaaagtcaaaagccaaaagagaggtaatttggtgccgtccacacattaattttttctctttcatagtatataaggcttccaatttatatatgtacacttatgttctagatcctaatttggagtaaaaatattaatatatatatataaatatgatctctcgttttcttaatgttttataccgttttgttaaaatattatcaagttgactttaataggcaggttgtttgtaaatttttaattaattagtattacacagaacaacctaatacaccttgttttttcttcactaacactttcttcttggatctctctcttatgttcaagcaaatcaccttaattacgtatatatctcctctttccattattttacttccaaaaatataaaaaaaaaaataaaactaaacatcaggatatctttcatgcaattaattattaagacaaacaataagtactactagctatataatattgttgcatttatcaagcttcttttcgatggctaacatattatgtactttgtttttttatttttttgtcaaatttattgtgaaaaacggaataattaataacttacgatacaatttatagtatcgataaacacgtaacacgatcaagaaacaataaaccaagaaatctcaagaattcaaaataatgaataaagcggtaaaacagaaaagaacaacaccagatttaacgagtttgagctatgtgcaatgctctacatctcagttgaaacagcagcagtgaaagccggcccaaattttgggagccttgtgcaaaagattaaaattggtcttttaaaaatggagggcttgtgcaatggtccaagttgcccaaagtttaggccagccctgacaacaagatctttattgatatcagtgtttataagattccaaaaatcttcacaaacttttcagagattacgagaggaagtttttctttatagtttagactcgagtactttacactatcatgattttcactcaagtatatatagtctaattctcacagatgattacaaagatttacattcatataaagatttgcattgctttcaaaattatctcctaaatcatcgaggcacatttacaccgccttaaatgattcagctcatcgccagcaacaataatctacgtcatcttaaaaaacgtgcctccagtacgaacaattctaaagctctataagcacacaagcctcactttatttttggataaaaagggaattttgattttatatacttaacaaattaaaaaattttattattaaaccaaaaacttaaaacctaaaaaaactatacctttttttt

SEQ ID NO: 26280 - DNA, 3611 bp, Cannabis sativa
  modified_base (32)..(32): a, c, t, g, unknown or other
attcatttatcagaaaatcaattatttatttntttccttaaatagaaaatcattttcttaattagaaaataatttccataataaaaatattctaatatacttgacaaaaaatgtagaaaatttctgtagtggatctccaaaagttgttttggtagatttattatctattttggcatttaaaaatattttttagttttttttttcataatcaggtacgttgtagctatttaggaccacttgtaaatttttaaaaaattctaaaataatttacagttctgaaaataaggtttaaactacgtaagaaaaaatagtcgtggtgcaccaaaatatgtaaatcttattttttgacattgtaaactactcgaatttttctaaaaatttacatgtagtcctaaataactataaatacatgatcatgaaaaaaaaaattgaactaaaaaattctcccgaatgccgaaacagataggggtctattgaaacaccacttacaccactttagagagtgtactatagacttacctaaaattatatatgtaataataatttaaagtatcattgccgtataataatatagataccggtatcaagtatataagaccatctcaaatgatagttttctttgtacatcatttttgacactcttacatcttaaaacacttcattggtatagcacatttcaagaatgtcattataaatatattacttgttttaattacaaattgtataactttatttactttaattttctattaaaaaaacaagatagcatcgatgttattgtgttgcatctttttctctctaatagtatagcaccctcatattttgtcaattaaattgtccatctcaacaaacattctccaaaatttaaccattgaagatgttctttctaacattgtcaaatcaagtatgtaacaatatgtcatatcagtatcacaagttaacacttttgatcggtgattaagatcacatttgatcttttccactcttttgttcgtgtgttcttgtagttcaaagctcagagctttgttaatggcgattaaaagtttctgaactagaccgatagtcgattagtgtgaattgaaaggagttcaatcacatcttcgcaagtagatttgcaggtattcggatctagagttacaaatctttcagagtttgccaagagagttggcatttgaggtaatttcattacagtaaggaatttggcaattagtacaaaactagggtttgtaaatttacaaatcatatagtgagattacttatcctggttcagggaacccaaataatactcgactggaatttgttaccgatatcagagaggaagcttgtaaattgattgtgttcttcatttagcttcatcaattcccagtcttaacatttgaaacgatttgaaggaatgaatcaagtataatcagtcattgaacttagtaaccaaacactctaacatttgaaacaaattaaaaaaagagtactgatttcagtttgttcttcaaatgcctttcataaacaaaaattaaaaacaactctttataccaaagataactgaaaacctgagcaaaagatttactttttattataacttcaaaatttcaaactttacaacaaaggctatgcaaaatggtcaaaaaaacataactttactttaaacaaggagtaaaaaaccaaacacatgacaacaaacaacaaatggggtttgcaaatcaacgattagtttatctaaacattaattagagatggtctgtggtttctgctaatgggaagatgaacataaacctcatgaacttcctgtttacacacttctcctctgtctctatcgatggcatagcagatgtagacggtttcaatcacgttatccagcacatgaacaaagtaacccaataccaatattagcagcagccaggccagtgcagccacaatgtacgagtcattccctagatcgcttacaccctttaagatagcccaagtctgcttatgcacaccataatcgaagaaatattaacagagtatattagagaagaaaccaaaaaatacagttcaaaaagcaaatacaatttgttgaaaactcttcaataagtcctgttcctaattctcatatgttagcgctctagatagttcaccccgaagttatcaatgaaagccaatatgataacttggatgacagcagaaaaccgaaacaaaattcaggcaacaagatacaaaaggtaaaacttttgacacattttggttgcttatgattgttggtcaaattaataccgtcgaatgataagttaaagctgtgttttatattaaaatagttctcatcagacttaaatgatttggcatatattataattatgaaccaaactttacagtatgagagtatctcttcactctcatgatcctttctctaaattctctccaaagaataccaaaaagaaaatgacaatgaaatggttatcatcactatcctagtaaaagggtttagtacaaggatgcattacgagtgaaacattatgatttactcattatactctgaagaattttcgtcttaacaagcaattatggatagtaaataaaaagggaatagaatacgcaccacaattgcatatattgctgagagcacgaagacaattccaactagtaaacgagaggagatagtttccacgaaaacagcagaaagaagattacgtcgaagaagctcgtatgtcatccttgcagatgagcaataagcttctccagttattgcagcgaagttgatagtgaacttgttaagaaaatcaatagcagacaagaacatattaacgcagcaacgtaatacaaggttcacgaacccaggaacgtcctcttgacttgcactatcaacaatggctcgtaccactcgaacaacaactataagtaaacccgagagacagatagtaccagaggaggtgccaaaggcatttctgcaatatgttttataaacatgagaaactaaaaccatccttcataccacaatatgacttttataggtattaaaaaatgtaattcatttcattcagatttggacatttcactcacttaacactaaatatcagaaactaaatccactattcatgtttccacaaatgtaaagcctttacggtctagattgaaggtatgcaaaaagttgtactaaattaatatcaccccttaagataccggatcccatttatttcaattattgtcaataagatttagacatttcacaactaaaatcacatgttgatacaatatcaattgtatcgtatcggaacacactcttcgagtcagtgtcaaactccaatagactcactcctaattttcattcatttccttgataatccatttatgaaatgacattacatatttataggtatttcatactactataaaattgctaataagtccctatagtaatttgatagtgaaacacatgtcatgtcaactttgacaaacatgatcaaaacaattgcagctatgtatgaacacaaccataaattataaacacatataaacaaagagtttaacagagtaaattcacctcaaagagcttctaatagtacgtttgagagttgactcttccttacaaaagtaccactgtgcaacagtcccactaatcacaaacacatgagcttcaa

SEQ ID NO: 26281 - DNA, 1523 bp, Cannabis sativa
taataattataaatgtgaaaagaattttactgtaaatatctcattaaattattaagtgattttaaaaaatatataactattaagtgtaaaattataaataaaaaagttgttaaaaaagaaaaggaaggaaatcttaaaaattatatatgtatggatgaaacatagagataattaaaactactagactattttagtggtggtaatagttccgcaaaaatactaattagcgttaaaacgatgtatattttttaataaatcggggtatgcatttgatttgggattcagtacttggaaacaaaccattatgatcatataattgtcgttgatatattattattgatataaagatatactattttttggaagaatgttttgttatgttgtaacaggtggacctctgtggtggggtttattgtttgaatattattgcattgcatttagtgaaacaaatggacacatctctgaaaatgaaaatgaaagaatgaatgagtaattaggaaattttagtaaaagaagaataaaataaaacaagatatatagaatgaaaatttggggccctttcagaaaaaaaaaaatggggtcttttctggtagaattaaagtggcaaaattcatgagatgagtgattcaattcaatggcgttgatgtagggaaagagagaatacttggtttggtttgatttgatttgtaattggtgctattgacacggtaagagctagtgtacaagatcaaaaataactatgcaacttacaagtatgaatgcatacgtcgtgaaaaattagcggaaaatattctccatcctatttccgttaagaattttaattctcattctcatttattttttattgaggatgtggcaaccccctcatagatgcggggacgagacaaagaattctttatagaaaaataaatttaaggtgtcgtttgataatatttttattttctaattttttaatcacaaaacgaaagtaaaatttttatttttaagaattttgtttttgaaaaataaaaatgcgttctgtaacaatttttgtttttcaattttaaaaatagaaaacaaaagtgtattctgtaaagtttatttttattttttgattttatttaagtcaagtctaggtctggggtcaacttcgggttcgtgtcagaggttgggttcagcgctagggccgtggggagagatttggatccgggtctggtcgaagtcttaaatattaatttaaaaaactgtttaaaaaaatattgaaagtgattttcttttattgaaagtgactttcttttatttttaaaaaatattttcacttttctaattttaaaaataaaaactaattaaaaaagtattaccaaacgccactaaaaattaataataaaaatttaaatatttaaaaatattaaactacataaaaattaaatattacatattatttattattcaataaattaataattatctaaaaatgtaatttaaaattcataaaaagaatattaatatattaaaaaaatacaaatacaaattataaattataa

SEQ ID NO: 26282 - DNA, 2435 bp, Cannabis sativa
ttctttttcttttttttttattcttattctttttctctttcttcttctatagtgctcagatccatcgttaaccttcttctttctttcactcccatggtagttgtgagggctttgcagaatggagatggcttagcaacaaatcggatcagacttcgtctgtgatgggagttttatgatgccaaatcggagacacgggtcggaggtcttcctctgtccgccattaacgttggctgtgcgactggaataaatctatgtttataattttgggtcatgagcaaattaattatatttttctgtatctccattccttttatatatatatggtttgcattattttttttttttttggttttggacagccatatatgaatggtaggtttgcaagtaggtttgcaagttttttttttttttttaatttgattttagttttgagcttgattattgtattctgatgttgttgaagatgacgactgactggtcagatattttttaaggaagaaaaatgttttgttttttaagttaatgtatttaattataaatatgaattattttgttattattatttaatgattttcttttttgaaaaaagtaaaatatggaccaatagaaaaaaaagaaaaaaaaagaataaataaaataattttttttataattttttataatattttaataagtaataatacgttaaaaatttgctgacatttgtgtacacgtaggcagtccaatgtggcacttaactgggatttttggacggaagtgtgcagagcaaaacggattcaggatttaggtagtttagccgccaaaattttggtttttgtggttaagtgttacaaacggtaaaattcaggtggtttagccgccaatatcccaaaaattaatactaaaatgtgaagtttggttgtcaacattaatcttatcattcggctgccactacgctgaacctaatttaattatattgggtgttaatttagttaaatataataatcaaataataaggtcttaaaattttaaatggcctctataaagagtgggccctaggcaccggcctagctcgcgtatgcctagggtcgggccaggccatgtagtacattataattttcttaactttaattcagattcatacatatcggccaatccaagtggagaactatccccgatgacctcggccctatatgtcacaacaataataacccaaataagtgtttatcccaaaacacttctttgcagctgcaaagaacacctagggtttcttatcaaatctcatagcacaattacactaaaatagaacttatattttggctctaaaatatacaccatatgatagagcttgttgcaagcttcaaaacggtatatagaatgtccaaaatggatatccgagtgaaaagtcatgacaaaaatacagttttttatctcttaggaatttccaaaaacgatagaacacgaaatttccaaattttgcactcactgaaacaccgccgaaacctatccaaattacttcaaacttcacatggtacatatatatcataaatactaccatctttatgtaacagaaattaaaatcgatcccttaaattgaaaacatcattaacgttcaaactaagctttaaaaagttccaaactcaacttctaactcaaaattacctcaaattcaacaagtaaacatcgaaactagtctcatagctaccaaagaacaattctataatgtcagaatctccataactactctaatcacaaagtcactatataaaaccaattatttttaacttaaaacgaaattaaaccataccttaaattttcattcttcaaggatttgctatcccgttactactggagcttagatcgctaggtttcggattgaaaatcaaagaaagtgaatagagagaagaggatttcgtcaaaaaaagagaaaggttcgtatcgtactgttttcgtttattgtctataacttaatatatgttttatatatactaggtgaggttagcacgtgcgatgcacgtgcctagttcttcaattacaaattaaaatacatatgttaatattatacaagtgtaagaataaatatttaaattaagtattttagttatatacaagtatagtcgtatataagatggtcattattttgatatattttacacattatttatataatttgtacataatttttatattggcttataaaaaaaaatcataaaattgttacataaatattagacttatttatttttatataataagtatttttttattagagaaaataagaaagttaaattaatataattttcaattaaaagggatttagttaaatttattgaggtgagtagtaataataataaaacataataagaaagttattttttttttattatcattagtgctctaaaaggtaaatgagatagtaaaagacaatatattaaactttgcttctctactatcat

SEQ ID NO: 26283 - DNA, 7284 bp, Cannabis sativa
  modified_base (34)..(36): a, c, t, g, unknown or other
ttaatgaaacatacttgttaataaatctagatcnnngtaaaatatttccaacagaaagatcattggatttggacgaaggaaggtaatggccggttctcttgtaagtcagcatatcttatccaagccctcaagagaaacccccactgtcagggggctccagttctctggaacaatctttggaatagcaagatctttgagcgtcacaagattctgtggtggagcattctctccgaagcgctcctgaccaggtcgactctaaataaagattttcttatcgaggacacacatggcccaatttgtggaatggaagatgaatcgactgggcacctgttccttcattgcaaccttgcttatcacttgtggtgcacttctccgtggagaatcttttctatgtctgacaccgggattagagtttgtgattggattaagttcatttggaatcttcagcacaaaggtgtaaacccggacgaggtgttcctttatgcttctgttgttgtggacacgatatggagagtttggaatgataaggtacatcataaaatggataatgtgaagcaatgtattgactaaaattttcactcttttgcagattacaaatcttcctttatccatcctccttctccgagccgctctcttgcttggtgtctgcctcctcaagattggttcaaactgaactgcgacgtcaaagtaggttcgaaacacatgtgcattgcagttgttgctagaaacaccttggcgaggtgatttgggtgaccttagcaaaattggatttcgctgacgctctatacggtaaggcggcgtctatttgcttggttttagaggtggctttagaattagaatgcaaatttattattattgagagtgactttaagacagtaatcaattccatcgctagggtggactctaggtgggaaattgaaaatcactcctctttttgtaatagagtcatgtgctcttttgctagttgtttattttgtaatatttttaaaatttgtaattttatgacttataatgtaactaagtgagtgtttatctacaactaatttagtcaactttctattttttcatttttaagaatatattatgtaataacggcaaagtttaagttttatattttattttttttaaaaaaaatcaaaagtaatataaaagaatgagaaaataatatgttatattttaaagtggtataggattttgtgacaaactttcaacattacttgtatgagagatgctttaaaatcacttctcttctgtccgttccatacaaacccaatctgtacacgtgtcatccggacaaactgaccgtacggtcatttccacgcaaaggcgagtaagctaattaaaactgatttttgagaagataaacaagcttcgttgatgacacgtgagcaattgtgggcccctattgggcctttctaccagcccaagagagaaaataccatctcgaccagtagtacccacctcgaacaacaccaccatcgttttctctctctctctctctcccgatatcttttttctcaatttttcttatcgataaagtccaaacatggcgcactgaacccactcagccataaccacacacatgcgcacatagtttctttattgattctctaatctacctctcactttcactttcattctcattcacttctattctatccagaatcgctaaactaagatcatcataaaccgttgattctgcatatataatatgtatatgtatatgtatatcagtatatgagtcagtgaagatattattaaccagaaaaaaaaggagagaatttgagctatagagatggggacggggtcgtctaaagatacggacggggcttctcatggaagcgatggaagagaaggggaaaatttagaccaggcaggtggtcaactttatgtgtcgttgaaaatggagaattacaagctcaaagaggagctcattcctcatgtctacggctctgttccgcttattggttcttgggattcttctaaagctgtaagaattttacctatatatcacttttttctcttattgctattgttggtaaaatggtatatatgaatttaaatttattgttcttggtggacgtttttagctttctatggaacgggaatcggcctctatgtgggaattgagctttgttgttcctcccaatcacggtagctttctcgtggctcttcttctcaattcaaatgctttatgctatgaatacataagactagcctttcctaatttgggtttttgctgaaatgacctatacaagaactcattgtacgactgactataatcatgctttgttcaattacgaatcttggtgttgtttacgtttactattatcttgtgaacttaggtttattcagcttcagcttcagggaaggggtttgttttcacgagttttactcacaaacatattgaaaatagaaaccaaataggaaggatgaaagaagtattaggtgtctttattattggattggattaaaatatggtcaacgttctcttgctggtttgacttaatagttcgtcaagtatttttttaatggttctatttgtgttttttctgtttatgatggatatagaatcattggatttcaagttccttttgaagccaaagcacagcagtgtgccttgtgtagttgaggaaggatcaaatcgtcgacttattaggggaaccttgcaaggggatgcaagagtggctctatttaagctaaatggagatgatattctggagtatcgagtgttcattaaagcagacagggtatcgccattcgatcttgcagctagttggagggcttatcaagaaaatctcaggccttcgtctgtacgagggattcctgatgtccgtatagattcagtgccagagatcagtgttgaggtgtgttaagagtcttacacttttcttgttggtgcatttctaaatttcctgtaatgtttgacccgtccaaagtcttaggtcttgaaattatatgctgcaaattagggtgctttccaatcaaattcaaattattatttatttttgctgaattgctttgaattgttatgctagattaatattattcccgaaccctcctctttattacttgcctatatatgcacagaatggatcttcagctagcttggaccttgatattgaacattatgttgtcccagctccatcaacttctgccacttcaggtctggtttatgcagctaacatgacagagactcctaggtcattaacccttactggagtattttcaaaagctgatgggtctagcagtgctgcatatacctacaaagatggtgctggtgtgtctgcagatcaaacttcaccaaaaaaggtttgtttcagcaactcatattgtgtaaattagagctttagaaagttgtgtgcgcaaaagtgttatgttggatcatatgaggttcttcactgtattttgtagactttcgatgcttaagttcaccgtcatcataccaaccatgttcatccaaagcttatttattttttttgtaagtacgtaaattaatgttgaatcattagtttagacatgatatttgtgtatgaagttggagagcattttgtgatcaacgtgtgggtacgccgtactcgtgtgtttggaatatcctccaaaaaaagtagtttttgtagtgttctagattgaatgcattactctaatttcataccaggggatggaggttgttgtcccagacccgtccaaggtgtatgtatcttctgggatggtagaatctaagtcagtgggaacgctttcacctttgcaaaggcaagatagtcacaggggtctctttgtggacagaggtgttggttctcctaggctggttaaatcgtctagtgcttctactttctcttttgatctcaaactggacacagaaaccaaggtttgtgtagaaatacatttttcttttttttcctatgaatatttatattgcacttactgatttatttaagactttctttcaccctgttttctattggctgttagaattcaatgccagcagctgctggagctgttgcagcagcagcagtagctgatcaaatgcttggaccaaaggaggataaacatttggcaattgtcttggtactctctttcctgatttatgaaataaaataaaaaaaagaaaaaaaaaaagattcaatagcagaaacattttctcacctactttttttgtattcttagtcataaacttaagaaagctgaagttcaatataactttttcacattccaaaagtcagaaatttgatatgctgccaatatcaccgggtttcagttggtgctttaaatgtaaattattagtttgctgagtgcaataatgtctaaccatgtttctttacttcaggttggtttacctgctcgtggtaaaacttttactgcagctaaactgactagatacctacgctggctgggtcatgatacaaaacatttcaatgttggaaaggttgcttgcgtaattttttgtgcttaaaatttgtagtttaacttatgaagttagtataagttgaataacttgtttccttcttttggtagtatcggcgcctgaagcatggagctaatcaggtatctattgttcaaactttcataggtatctattgctagaggtttttattagagataagcattttactacctttttatgagtgatcaattctttgataattcatcagtcatactctttgcgggaccagcaagctcactttttcttacaacttgtattagttgaatttttattaaatagatcaagggaagactacattaattttgtcaggttatcagatatttcttaatggatgagatatttgttgatgcagtctgctgactttttccgagctgataaccctgaaggcattgaagcccgtaatgaggtatatattataagaaaaaaataaagaaaagttgatttatttttaatagttttgttttcatttataggaagacatgtgctttcttaaagctttagttgtattgtgaatgagggaatcatctattttgcttgagaatagatctatttgttttcttcactatttgcaaatacgttgttagaactagtctctaggaccagatgcatttgatgctttgaaaatgtgcgagtatagctcgatgtttttagaaagacagctgggggtaggtgtggggtgtggggaagcttatgcaaacacagggaagcaagataagaagtcatttgaggaggaaaacgaataatatatttctcgacttacattcacgatgccatctttatgaacaaatttattaaatatgcatagttgaatgagtcattagttgatgtttaccttcataaattgggtgtgccattccactttttgccaactgggtgttaaagcctatagtaaatttgattccctggatgcttggtaatgtaacaccacgttaaccttttctctttgtaaatagttttaatgtatcacatggtactaggtagcagccctggcatttgatgacatggtttcctggatgcaagaaggtggccaggtaaatcattgatattagatgttgggattcctttatggcttccatgtaatgcttttgttttaattcccacaaaatgaattaattttaggttggaatatttgatgcaacaaacagttatagtcacagaagaaatatgctgatgaaaatggctgaaggaaaatgcaaggtaccatgagcaaagtttgtagaggtggtttaaaagtttctcatcaattgcttggtgcacatttataaattcatcattatttttttcttgtagattattttcctggagacaatttgcaatgacgagcggatcattgaaagaaatatacgtcttaaaattcaacagagtcctgactatgcagaagagtatgattgcactgtggaaccagttgtttgtccttctcaacatttatgtacatactaatttctcggccttttgcaggcctgattttgaggctggattgagagacttcaaaactcggcttgctaattacgaaaaggtagttcctgaaaatgctttgatgttcgttctataggagttaagtcttttagaaaggtaagtttcatataatattataatgatgtcgattttacctctttgactaggtttatgaaccagttgaagaaggatcatatatcaaaatgattgatatggttagtggacatggaggacaaatacaagtaagtgcgacagttgcatgattctagtacatttaccatataaatggttttcttatggccaacgtgtatttggatatccataagttaaaataatatcttgctgaatgaagagtacgactttgtaattttcgttgactatgctgtgtgggttcttgatttttgaaattgagcagttctgtttgaaatttattttattttgaattgttatttacacctaaggttaatattttttggttgcatctcaacatttatactgtgactagtattcttttaatcattctaaatttatctacaggtaaacaatatcagtggctatcttcctggaagaattgtctttttcttggtatgtatttctatgaagaatatggttccaaaaactactgcttataagtgtagaaaaattttgttgctcaactcctactcttcattaatggttgctggtttatagcgtatgagatcctcagtgctagtagcctaatatttagaggttattattgaaatacatggaatacactgcaagatataatcctggtatggtaaagaattttatcaaccaaggaagcttgattaccagaatatttgatattagcttttttgttagaaacaataatgaagttcccatgactcagaatgtcataatattatttatcatgccacataaaggtgtgtaattgcattatattcttgttcaaattaccacaatgaaatgcaaggttttgttttggatgtttgcaaaataatttatcttaaaagtattttacgtgcaatattatgggaaatttaatctgcgatgttttgcatttatgtgatgttttatttggactgcagtttgaaaatagattccgatcacttttcataactatcatactgccagaattgcagtggtaaactgctttagagagtttgctcaactgattatctcaactgattatatatatatatatataaatattatatagaaaaatgctatatatgtaaagatcattagctatttcattttccctttggttttacctcaattcttttattaacacttctgttactcatgtaggtgaatacgcacctcacaccgcgcccaatcttacttactaggcatggagaaagtagggataatgttagaggaagaattgggggtgacactgc

SEQ ID NO: 26284 - DNA, 3131 bp, Cannabis sativa
aaaagttttgtgaaaggttattcgataccccaaaggaccagatcactaagagctacgattagagttgaaagcggctccgagacgacgtaattacgttgatggttcaagatagttaaggtcaggactagctattaaggttggttatcgtacaggcgagagttcaaacaaccacaaaagcggccaaaccgtaattctggtgccagttgggggtgacggtgatcatttaatggaggagagaaattcaggcttgacttcagggaagaataatcaagctgccacagataaagggattgccaataataataaatcccttatatcaaggattcgaatatgggggaggaaaacatggtaaatattgtggaggatcccaatgacagaatgatctttattgattcgaaaagaaggaggaaggctatgggccaagctagtgggccaagtggtgtaatagatgtggatgtgggttgtactatttcagctgaagatgttcaagaggacacagaaattaattttgttgatagggatgttatggtggaagatgtggcaagctcaaaaaacttatttggggcaggctttggtttccagacccgccaagagtcatgaatgtcttaagttggaattgtcggggccttaggaaccaacggagtatttaattcctttgagaaattgtatctcaaaagagacccaattttttatttttatgtgaaataaaatgtcaaaaactaaaagttgatgggcttgctagactattgggctttgatggcgtgtttaccgtggatgcaataggcttggcgggtgggcttgcttttttatggaaaaataaagaggatggcttcttgttgggttactcaaatcatcatattgactttgttattaaatttgctcaatttggtaattggagactcacgggactgtatagagagtcaaatcgcaatagaaggcaagacacacggaatctaattcatgctttatgttctcgttcggagttgtcgtggtgtgtaattggagacatgaacaatatagttagacaggaggataagaggggggttgaccttaccctcaaagactacatgccggttttattggagttttacaacagtgtggtttgacaaatttggagttgcaaggccacccattcacgtgggagaaaggaagagctacgaatcactggattgaaatctgtttggttagagctctagtcacgccgtcttggcttcagattttcccttcagctaatcttttcaatttagatttttctacttcagatcattcacctatttatcttgaacccacgatttgcaataattttgctccaactcgtcgtttttgctttgaaaatacctggttgaaggaaccattatgtattgaaattgtgaaagattgttggaaaaatggtcaagctactagcttcgatgaaaagttgagtttgtgtgttgaaaaactcaaggagtggggtaaagagataacaggtacacttaatcaccgtataaaaaagtacacaaaagagttgaaggtgctccacggtaaacgggatgtggcctcggttcaatgctacaatgaggtcaagaaaaagcttttcaaggcccttgatcagagagagagctactggaagcagagagctaaacaattttggctgcatgaaggtgaccaaaacagtagctattttcataaggcagcaagtagcaaaaaaaagaacaatcagattgagcagttgaaggatgatcacgataattgggtaacttgggagtcaggattatctaaagttgtggctgagtgctttcatggtttgtttgcttctggaaacacttgttgcactgaggtgatagactgtgtttctaaggtagtgtctgacagtgttaacatggagttatgccaacctattggcgaagaagacgtgaagaaagccttatttcagatgaatcctgataaaagcctgggtccagatggaatgacccctgctttttaccagcggtgttggtctatagtgcgacatgatgttgtgaaatgtgttcgttatttctttgatcaatgcactttggaggatggtaatagtgaggcaaatgtcgtgcttattccaaagaagaagaacccagagcttatgtctgatcctcctccaattgccctttgtaatgtcatgtacaagattatcacaaaggttatgttcaataggatgaagctgattattaacaccgtcatttcagaaaatcaaagtgtgtttatccctggtcgtttaatttctgataatgttctggtttcgtttgaaattcgcattacttaaaaagaaaacgcaaaggaaaggaagggtatatggctctcaagcttgatatgagcaaggcgtatgatagagtgggtggtcttttcttgaagcgatgctccgtaagctgggattttcatagaagtgggtccgactagttttgaaatgtgttacatcaaactcatccatgaacttaaaggtgaggtgaacttggaggagtcttcggtgaataaattttggaagaaattctggactctcaagttgtccccaaagatgaagaatctagtttggagagcgggtagttgctgtctccctaccatggttcaactttggtcaaagcatgcggtggtgacctctctctgtccggtgtgttcccttgaagatgaaactatcctacatgctttggttacctgtatagttgttaagctttgctgggacatagttggtataggcacgggtgtgcaacatgagacaaattatttggcttggtgtgttgagagttttcaggcactcgatcgggagaaaaaagagatgttggtggcggtttccgggttcggtagaataaaattcaaagtgaagatagcatcatttcgtcaacaaaaggcttccttaactaatggcaaaatgctcaaactgctggttttgagctctcgtcttctggtatgattcatggggacagaactgagcattgggtgcctcacaagaacatagtgttaaggttaatgttgacgcaacggtctttggtgaaacccgacaatttgggattggtttggtggctcagggtttgcttattgaaggtcgtactaagattttccaaggacactcttctcttgaacttgccgaagctatgggtgtacgtgaagcattaagttggatcaag

SEQ ID NO: 26285 - DNA, 3078 bp, Cannabis sativa
gctaattcctctcactaggagatggatcagtactagaacaaattctgcaacttcatgttattgtggtcttataaggagaacgcgaagcttaggagtattcatggcctattctagaacatgcttttattgaaatatgcattccatgttattgtgtgaatgtatttgggtcctagagcttagcgcacgtcgaattcggagagcacctttatctttggatctactttgtgcatttttgcacgaaggtaggactagcaccattctaattcattctccaagtgtataaattattggcaggatggttcatcttttgtaagaataagaacgtggaggaccccttgcttgaggaaatcattttcttttataaggtggagtcaaaccccatgtgaaggaacatgtccaaggtgggattttacttgttgaagaagcgttcagatgttaaatgcactgttagttcatgcaggcatacccatgacttccaagagtactggttattcgcgtctagaatattcccgttgaagaggcatccaactctgacgttggacttctgtattgtgggtaagtgatagcattttcccattttccttcttttaggtgttccttggtattgatagaatctaatctaatgatttatttttgtctccatagatgaacctccccatcctacaatgacccctttcctgagtgaaagggtaaaattgtgtagcaccactactccaaaggccttgaaagtggagggcttggtgactaccatgaatctttagtgagtaggcttaatcactcctcacaaagcatcaaatgcccctgataattacaaactttgctctaaccacgctatcatcagaaaggttgtggccgaggttatggccacgacggtgaaaaaagccatcaagaaggaccagtgttagttggttgactgtgcgagggcccatctcaatcccgtgaacaaagtggaagagttggaatttcacttcaacgccatcttcccaaatagaggtacccttggtgctagcacattcaaaacacataagtcccctttccaccttgttcacgctctaggtctgaaagagctagctaataacgatcagggggtctttgacccttactttctaaagctagatcatcttaggtatctggtcacctattatatggatagggtagacaagatcgcagaatgtctaaaccatttctttcttccatcacagtgcactagggtagatcctttcattttaatgagctacttgggattcttccaatatgggagtttcttggatcgagaggatatagcactatttgcacagggagacccttagtacaacggagtcaacagttgagtccagaccaaagtcttttacttgtttaataattctatgtacttttggtttgcttcatgcatctaatcaatttgttttcttttttgcagaaggtttgaatactcaacagatggccattcgcaatgacttacttggtgaagtggaagtaggaattgaggtggcttgtgcgctagccaggcctagtcggaggattaaggcttttggttctaggcagcccgccatgatggctacccttctggttaacaaggtggatgccattgttaaggtgactttagggtccataactactattatacccctttcggtggctcctcttagctagattctactggccccaaaagtatccattcctacctaggtcattgcctcggtggatgatgaggaggagaaagaggatgcggatagattcatcttcccactgaagagggtcgggggggaatgttgatagaccagcaaagaaggccaaagtggaggttgttcaaaagctagctctgcaacgaagggcttaaaatgaaagggctacgaaattggattgggagaagagggactcccagagtagcaaagaagctaaccccactggatcgtaggagctaaaacctgcaaatcccaaactgacactgaaggtctcggcaaagggagtggttgccttgccagctacctttctctccatgtttagccttagacgacgagtacaatgctccaatgcaataggcttctcaaattttcccctaaaggtacgaagctccatcgattacggaataggagatggctaaggtgctatcctcaaagcgcaaggtcgatcagggtaataaaggctcaaaggacctgttaaattccatccaagctctagctcatgcgtattataagggcatgctcaggaaagagttggcgtctttcattattgacattctccaatacaaggttgttactctcagagagttgagtacaaaacgctaggctacagttggaagtagagaaccgatctaccttgccaattgtctttgccaccaaacgtttgcgataagtgctcttttctaaatttttcaattgtactagtgagctttgtggttgttctattaaccatctcatacaatttttctatttttgactttttaggtaacccttcttgttgaacatttctctaagccagtagcacacatgaccctggagcttgagagcctccaagctgtatacgaggctgctgagggtaaggaggtggagattatggctaacttagagaaggccaaggctgactttaagagtgcccaagaccacatgcaaagcacagtgaatcatcaggttaatgagtaccttcaggctggcttagaccaggtcatagcttctgtgagggacgattaccataaattaaaggaagattgctcaaaacttgagaagaaggtcgaaggctagaagaccaacttcaaccaggctaaaaaccagaccttcattatggaaaagagagaagtcgccctcaaggccaagctcaaggatgtggaggtcaagctaaagcaggaaaatgacagggcggaggatctatctaaagaccttgaggccaaaatagaacatgtttacattctacagagggcgttgaagctagtcactgaactcaaggatgcttttgtggtagctcaaaaggactggtaggctaaattgaatgcatccaatgccaaggtagttgaggttgaggagaagtgtggtctcttggagctcaacctgaaagatgtggaggaggacctagtcttagcgg

SEQ ID NO: 26286 - DNA, 3565 bp, Cannabis sativa
aattagaattttaaaattagactatgtcttatttatgaatattctaaacaagggcttaattgtgaagaaaagagatttttgtatttatttgtaaattaagagagtttattaagtctaattaataaataaattaaatgacaattgatgcgtgtcgtatgtcgtatcaaatttactatgtttttttaattctaatagtttcaattatttcagtataaaagcaagtacgggtcgatcccacgaggactatgattaatttattattcactatcaaacagaaattgaaggggagttttgagttataattaaatatcataaaaaaaataaaaacaaattattacgatatgagaaactagttaaagattatttttcacccttgacaatcatattcctattaatgaatgtaatttcagtttccaatcaactattaatcctgtagataacgctaaagcagtcaattatcccaatctccatattacatataatcaaggcgaagctctcagtaattaactcttttacctaagcagtaaatccacgaagtatgtaatttatttaacttagataaggctttaagatttatggagatagattaatctaggcaacaatttaatgaagcatataattcatttaacctagttctattcttcattacaattaaaaattataatttatcacaaacacttagaatcctagactattaggtgaatagtaatcctaagatgacgatagattaaagtaaaaattaatttagtggccatctaaaaaagattaaaacaataatcatgacattgaacatagaagaatagaagcaatttgatatatgatggaaactagaatttaacatttaataatgaaattaagaattcatgtctcaggctttgaaataatccttaactaaaaggaaactactcagaactacacattataacgataatcttaataaatagtaaaaatttaaggtgaagaaaagaactatgataaagaacacttcgaagccgcgatttctgtctcttccttgctctctctctctctctaagtttctatctcaatttggtagctctagggttctcaaatttgtagcctaaaaaattctatttatagtgcttgaaaagatagatgaattcccttagaattaggatttttttttttaaaaaaagataagtcggcgctatagcacaggaattgggcgttatagcacccagcacaatttttatttctacacctgattagtattttggtcataacttcttcgatataactcaaaattggacaattcaagatgatccggaaagctaagaaggagatataaaactttcatgtggagctctaagtccagttctgcatctaaggttgtcaaaatttgtaattaagctctgccttgtaaaattgagctcgccgacattcactattttccactaaaatatgctaacatccttccaaatgactttaaatgcatgattagtctttaaattatcctaaacaattaaaatcaccctaatcaataatttaaagaatcaattttaagaatattaatacataaattgatcatatatataagataaatatggactcatcaacaattttatttgataattaattataattattaaataaatagttttgacatttaaaggattaaaattggaagatatgacatttgtgaaagacaaatatggactcatcgaattcccacgtacttaattgttgctcgtcctcaagtaagttaatgataaaatgaattatacttaaacgaatcggtctttatgaaaaataattttagtttaaaaaattgtacaataacttataattcaaagaaaatttaaactcttcaatcattagaatttcaattcaagataattacttttcaaactcaatttttgtgtgtgtgtgtgttcaatcaactcatcatattactaacatttaaatcaattcatggatgccaacaatcaatgttcatctcaaaataaatttgtatttcaacaaaaatctactccataagcttaattatcaaactattctctactaatgtaattacacacaatctaaagatcaataggactttatagacttatagtgtaattctaaggtgaaagataaataaagaaggttaattaaggctcaaatgacaccatagcatagatatacaatattctctcaaataattctcatctgtattccccaatcacttccctcaacaattcaatattgtatcttttttttcataaaacttatgattcccccacacttaaattgttgcaagtattcatctatttttcattgattttttcatgatttttcttttgaaaatacttacaacttacaaatatttattctaaggaaaaaaataattttctttcatcacgtatacataaccatcaatatttttccctcaagaaaactctcacacttttacaaatacataaaacatcaatactatggtgtgaaaaagaatgaacaagagattttttttaagctcaaaagttattgtatagggttaaatagaaaaaataaggtttcaacatttaggctcaaatcgggtaacaagggaatcgacaaatacggtaggcttgaaaagctcaatcgatccaaaaaaaattgcctgcatcacatcttaaaatcatgtgtaatttattgatttcgcctcaaatgattatcatacaagttctagagtggttgagattttaaatcaaaagtcaaacatgcattcatctttccaaacattggcaaatatgataattcaactgatgtccaaaagttttaaaaaaaatcaagcttgagcagtaattaattataagttaagcacacaaatcataagaatctattattttcttagaattatttattttccacaagaccatgcataagacatcaaagtaaaaacacatatcaaacatgagcaatcattgtcaacagaatttcattcaacccacactcaccacaattaaagagaaaattaaaataaaataaaaacgataaaaataaataagtaaataactaaacaactaagggaaaaaatggatagacacgacagttaatctcccattcacacttaataaaagcattttcctcaaggctcaatcaaataaaatttaggcaaaataaaaagaaaaaggtaagaaaaactcatgtaagtttgctttgttttaatctcgttagctcgactgcatgttgtgctcatgtgatcttcatgttgggtcttctaacaaagactcataccttatgtacctagcaatggaatctaacacattaaaattgattatttcaccatcaaattccattttaagtatccatgcttatgtatccaacttcttagttgcagtgagtaagaagggtctcccaaatatagttgatgtaggattctgatcaccctcatcttccatctttattatgtagaaatcacctggagtgacaagtctattagtctacacaaaaatatcttcaactatccctaaggaataagcattatgcaatgatcaaacttggttttaccaattgtgcattgaataagacatcatattaataatttctcctaaacctatcatgtaatgatcaaacttggttttaccaa

SEQ ID NO: 26287 - DNA, 1183 bp, Cannabis sativa
tatatccccacaggatgtgtcttgaacagtcccagtaacttgtttgaaatccccaccatgctgaacctgatatccggaatctaactgctttatattaggacaggattcctcacaagcagagttttcgatacaataaagaccttgattagctgaattgtaacaagcattgtcatcaagctgaggcgagaaataacccattttcttctcctcttctgcaatataaaaaatgttacattatcaacaaccataaaagattctgaatatcaactgctgaattctccacaaatcattgaaacaattgaaaagttcagagacatctttttaaatgtaattatctaccaagcatatacactgcttattctcacctaaagtttgccattcccttttcttataggcaagaggatacatcttttgaagcaagcggtgaagcaaatggcaaatgtttggaaaatgggcgtacggatttctacatattgggcaatgtgattctctaaaaatatccatggattgatgcacgcaccagaaacatgatacatgaccacaagctgaaaaaaaaaaacccaataaaatctcttaagtcatcaaagattcatattgaaatttaaaatgacatctttgaaaaaaagagtgacttacaaagcactataggcttgtataaaagatccctgcaccaaaaacaacgtagtaattataactcaaattcaaataaaactatcaaagctctctgaagaaaacagccgaaaactaaaaattaatcataacgaacgaactgcactatatcttaatcgtaataaattgtagatagaaatttcaaattcccctttctcagcaataaaaagcctaatcaaataacgaaattggaatgcgtagacacgtaatgaatgatcaacttacaaacaaacgcagcatatgaacgaatcagagatctcttcagattcaacaagtcccgaattgtgatcttccattgaagaaattacagagaggaaaggaaccctaaaacctaaatcgtgggtaggaaatggtagattcttgaatttgtagtgatgcgttttcacaaaactgaattatattctatcattcatcacccaaatgaacaagcagcacaaatttacacgtgctttattctatttttggttacattataattaaaattaaaagactaattattataattttaaccacc

SEQ ID NO: 26288 - DNA, 2493 bp, Cannabis sativa
gagagagagagagagagagccaaggatagagaaggtgagttatgtgatttctaattttttttcggataaatgagatatcaacttaatattatctaactaaatgaaatttaaaatcagaatatgacttaatctatttcactaaaggacaaaaataagaaaggccaaaaagaccattttgcccttacccataccaacaagcacacttatcacttaggagcattttggtcatttctaaaacttcaactatttctgatattcccaatatctaactatattaccccgctactagtaaatactaaaatgtgattttatatgtcatatataatacactctggatttaaataaatctccataaaatgacaaatcataattaatattctagtttataattaaatcctaattatctgctaattctcatatcaaaattaaacggtctttacactatctctcctttgctttttgttcttataatggaatacctaacgagaagtcttcttttggctgcagataactctccatttagataccatccaatgtgcaagaatctaagattattaatctttgttttgctgatgatctcatcttattcatcaatggtataacagtttcgataatggtgatcaaacatactctggatgagtttggcatgacttcaggtttgttcttaaataccaataaatctcatgtgtattttggtggggtgaatactgaggataagtaggctgttttaaaagactttcatttagttgaaggtttttttttcctctcaaataccttggtgtccctttaagaccaactaaatggagagcggaggatagtggtatcattcttaagaagataaagcgaatattgcacacctggtcaagtaggcatctgtcttttgcatgtaaggtgcaactaatccattctattttacttggacttcgtaactattggatgaacatttttgttcttccccatagtatcaaaaaagagattgaaaagatgtgcaaaggttttctttggggaatgaacggtaacagaagtaagattcacatagcgttctgggagaaggtgtgtctcccgaaggcttatggaggcctcggtttcaaagacgggattaaatggaatcaggctatccttgctaagtatgtctgggcaatatccactaagcaataccttctttgggttaaatgggtggataatatctacttaaaatccaaaatcttctgggagtatgatctcaaacttgacgtcagttggtattggcggaaactatgccacataaggaggaaatttaagagggaaattcttaaagctggtacagcctctcagttcaaaaccacaagcttgtacaacagcaagttatctcaagatccagtcaactatcataaggtagtttggagttcgcttaatgtttctaaacacaagtttatcctctagcaagtcttaaactctcatcttctcactaaagacaatttactccgatttcatatagaattggagttaatgaactgtcttatgtgcgaagaagttgttgagactcatgaacacattttcttctcttgtgttgtgtctagaaaaatcattgatgagacgttttcttggatgaattttaaaggctagctgagtgactttaaaggctggtatagttggatcaacttgagaggtcactcttagattcaaaggattaacatctcatattggctgctgttatttacaacatttggcttaacaggaacatatgtatttttaatggctattcaagagcaattaaagatattgtaatgatataaagagtaccttaaagtatagatggcaaattataagtaaaagaaaaatgtctacacaggaaaaaagaatacctagctagattatgtaataggtagttgaatcttttgttgttggtggctggtttccccgggtatgtttcttggggtatttgtttgtaatcattggtgttgattaatgaagtttttccttcttgatcaaaaaaatatatacaaaaggagtctttcataattcccgttaccacttttaatagattttcttttttaaaaaaaataaaattatataaaaaggatatagaaattgaatatagggaaaaattaacaaagtgacacgtattggaaaagaaaatacctgtatggagacattttttgtgactgtacataaaaaatttccttaaattttatagttttatattctaacatacaatatttataaaaaatatttaggtaaagttacgaaaaatgttgtacatacaatttttttaattattatgtatcactctcatatttcatacgaaaatttaattaatttcttttatgtatgaataaagttaattaattttgtttatgtatcaataaatttaattacttctttttatgtatgaagcacaattgatctattgaatgtacaattaaatttgaaacaaaaattatatttcaacaaattcctttgtgacttatatatatactaggtgattgttacgtgccaagccacgtagtgtta

SEQ ID NO: 26289 - DNA, 2604 bp, Cannabis sativa
  modified_base (1896)..(1903): a, c, t, g, unknown or other
  modified_base (2556)..(2563): a, c, t, g, unknown or other
cctttctgtaaacaaatgtcataacaatcttcattgtcatgttctactgttggtaaagtgacttgttggaatgttaagacttccttctgtaaatattaatggaaacaaaatagctttgactgaagcctaataaccattgttaatctgtcaatcctatttgaaccaattacttaagatgtattccaataatatccaaaattgattgtctcgattgtcgcgtgatgcacaggcttcgaaaactgaatgggtggaagcctccgaggatgaaaatgaggacgatgatgaagatgatagtgacgacgaaggtgacagtggtagcaatagcgatgagagtgatgatgatgatgacgatgatgatgacatggaggtgcctctttatactcctgtgcttctgctaagttaatgcattgtttattaaactagagaaaacttaagtagtttaatatctttgttatctgttttatgctgtttgcattcctgtactttgaggtattaagcttcgattatcacattcgaggaaaatacccgaacttctcttcttatttgttgtaatttcttgtgtgtagattagcaaagatgaatctgttcaaatgggggatgcagttgctttaatcaagggcggaggaaagaaacttcgaaggaaggagaaacgggccaggatagatcaaataagagccagtcttggcctttctgattcgcaaagaacaccattggtactttgttctattctcttctaagaataatttagattcaacactgatttttattgttggcaccgtcactatctcaactgatctgctttatgtttatgtgaagcccggcgaaaccttgagagatttttacaaacgtacaaacatgtactggcaaatggccgcacacgaacatactcaacacactggaaaggtttgctttggccttaaaaaaatatatcatgccatatttttttccttctaatctttgatattaatacgatggttctcaggagcttcgaaaagatggctttgatcttgctgaaggtcgatacagggagcttaaacctattctagatgaggtaataattctctaagctatgccaaggttcttgaacacccaattcattcaaatttaaatggtttttattttgacaactgttcagctcgccatcttggaggcagagcagaaggctgaagaagcagaagcgcccgagactagtgcgaaaaagagaggcaagaagaaaagataagctttaagtctctccataccattttcacgtatcaccaaggagagtgtaaattaacacttcattttgttacaaaactggtcttggttacttacttcatatgagtgtcttatatgtcttctctatttcatattcatacaattttgagttgattggcttataaatccatgtttttctttctcattggttttccatcttcttctgtctccatattccatataataccaggagctttttctccttacattagtcagtcttgtttgtaaagtaggattgaattggatagagtagtatataatttattatgtgattttgttatgaaattggagatactgtattaaaaaaaatagcaatgcttaaaatacactatttttttacatactaattgtgcacacaatgagggtgggcaacattcaattcaatccaattgaaccgaactgattcaatccaatccaattaaaccaaattaattggatgctaatagttgaattctattggattggatcggttattggatgacaatctcaaaattcaattaaaaattgatgcaatccaattacatttatgaagacacgattttgtcccgtgatgtactttcacggaatgtattccgtgatacattaaatgggtctcagggtatattacatgagtgtcagggtacgttactattttttaannnnnnnnacccctagatcaatctcagccctcagatcaaataactctttcatttaacggctgccgtacatcacggaatacattccgtgaaagtacaatcaggggataaaatcatgtcccacatttatatatgttaaaaagttatttatataataacaatatattaaaaaacataatatatattaattatatttttattggattttcttttgtgttgaatttgtaatacttgattgttttgtgtatttattttcatgatattttgttctagtttattacttaaaaatatagttattttaattatttgaaacttttagttgcattacattgtaacgatgatatgtttatgaaatattaaacttatataaagggtgatatttaatttttacgtattttctttatatttttatgttaatattaaaatttaggtgtttcagaatacccaattaaaaaatcgatccaatccaattagtaatttgattggattttgaggtttaattagattggatcggatgatgattttttaaatttaattattaattagattggatcgaaagaggataaaaaattgaattgaatcggatgtccatcctaaataaggtgttaaattttgtaacggaaatttgaattattatgcatgttttaatacaaaattggtttgnnnnnnnnttagtgtaggtaatttttaaaataggaccaattttcaaaaa

SEQ ID NO: 26290 - DNA, 2726 bp, Cannabis sativa
gacgatgtcatcaagctcaggctgttcccgttctcgttaagggagcgagccaagagttggttggtatctttgccacccaattctatcaacacttcagaggaattgaccctaaaattccttcttaagttctttcatccgacaaagattgccaaattaagagctgaaatcaacaacttcattcaacatgacaacgaatctctttatgaagcctgggagaggttcaaggacttattgagaaaatgccctaaccatgggattttgaaaagtggctgcaagtgcacaacttgtacaatggattggttagcaacacccaaacactcatagatgccgcagctggtggggcttttatgaggaaaagtgcgaatgaggcctttgaactacttgaagagatggccatgactaaccaacaatggtcaacagagagaggccaatctcaaatatttgtgggtatgcatgaagttgatgctataacaaagttgacagctcaggtggagggcttgactaagttgatgattgctcaagcaaagcaagctcaagttatttgtgagctatgtgggggacctcacacttatgatacttgtccagtggatgtgaacagtttgccaatggagcaagcacaagccactggaaactatcaaaacaataattatggtttcatccaagggggttgtcagcaaaacttccaacaacagtttcccaaccaacagcaacagggattctgttaacagagtcaacaacagaatcaacaacaacaagactctagtggaggggctgatctttagacagatatgttacctcatttcatgatagagattaaatcttccattaaggtcttacaaactcacatgggacagttggctactcaaatggccaaccaaaatcaaggtaacttgccaagcactacagagagtaattcaaaagagcaatgtcaagcaatttctttaaggagtggaaaaaaatataagaggccaagggctgagcaacaagtggatgaaaagaagtcagatgatgaagaccaggatcaacaggcaccaacaccaactcaagacaagaaaaagactactgaaggtctgcaacaaaaagaagccccacttcgagccagcattgatcgtcatatcaagatccttaccctcaaagatttcgcttgataaattggtgagttgttattagaattgtagtatcttagatgacttgttcatttgtattatggactcattgtccttcaagcttacaatttcatatgttggtagaaagataggcttaggattagatgatgaggtagtttagaattgttgtttaccttcctttttaatcttgcaagttttgtatttcttattttatctaacaaagcttcagatttgtaaaaataaaaaaaataaataaatgaaatttcacttttttttttatataaaaaattaataatactatttattgattgattagtatatattctctaagtaccgctaacattaattatttcaagttaaaacatgaatatattattattattatttaatttcacaatgaaaggaaaaaaaatgaagattctttcgtgtatcgataagcaacttagaatttagaagtatcatatgcatgtggttcttcttcaaactgagaataattaatgttatggaaattgtaaagttaactaaggcttaaatgtaattgataatcgagagagtagtgcaagcaaacctatggtaactgttttcccgtaagagttatcaaaagaaacaaaagccgcaacttaatttgctcataaaaagatgacataatatatatgattaattattcaactctacactcattaattcactatattgtatcacatgttaattaattatcttataaaacaaaagaaatgttcaccaggaaaaagaaaatgtgaatgagacgaatgacgcaaatccctagcacaatataaaaacaaaaactatacataaaatattatttatttatatatggcattgtccttttccacatcacacatattactattaactattaagtcagctaaaagtagaatcttctgaccttaacattaggaattttttcttgtcaatacgaatttaagaatttctaccgttttaacaaaaatgttgttattctatattcttaatcaccagaaaaaaaaaaaaataacaaaacaaaacaaaagaacaaaaaacgaagtctctctatgttgtgtactttatttcagaatgataaggattaaaattagtattacaacaaagaaacaaataatcaaacaaatgaaattcaagtcttgtacctaaattgcaaaccaattctaatattcagtagtatcattactatttgcacaaaacatctactctttcaccaaagccaatacagatatattttattttagtatatgtatgatgtgtttaagggtcaaactttactcaatatataccatgtagtaaatgataaatatttcacaggatctattttaagggtctattacttttagttttttcatttttgctagcttattagtcttttagttaaaaagtgatgttaggattttttttcttcttgtttttgtaaatggcacggtttgcatatatttgtttattcattttttttagcaatatatcatcatataattaactactgtttgatttacctattattagaattttttatttttttcaaaaataaaaaacataaataaataaataataacaagatgtaactagaataaatatattaattgaacaaca

SEQ ID NO: 26291 - DNA, 4395 bp, Cannabis sativa
agaaaaaatgagtataaatttaaaaatatatttaagacaaaataaaaataatatagtgtttttctataagatcttagggtacaaataagcctaatgactatatttctataccttttaacaattttaggtacagagatatataggaatacctacggtgaaaatcttagctacacaaaatattaaatagggatggtcctatttgtgttaaaattaagtaactaaaaatttatgttttttttttaattaacaaacctaaattattatggtttttttgaatgaatgaatgaaatttctcattaggtctacgagcataaaaatttcggtattaatttcttgctaaataaataattgaagtatttaaatataatatgattgtaatttaaatatttttactgctaaaaaagtaaatttacttaaatactactaggtgagtgaggactataatttccattttgtacccatatgatgcaatgataaatgtgatatcatatggccacataaaaagtgtaacacagtgaaatgaatcagatcaattgatatataaatattatatttaattaatacacgttgttatcttctcatcatctgtaaatattgtattgtattgtacaggacacaatgtaagtatcctggtaaaaacgtggccttccatgtgaatgaaggttcaacaaattattggctatcacttttggtcgagtttgaggatggagatggagatgttgggtcaatgcatataaaacaagtaagtaaacaatttctttttctttgtactcattttttattcttttttactttccgactaatttaaagcccatgttaacttgaaaagagaaagtaaaactttagtacatttaagttaagatgatattagtgttatgcatgcctgcctagtcaacaatagcataaaaaagaaaattgttattggaatattgcgcttttctttttcttttcttatcttgtagtcaaaagtgaatcatatctgccttttctttttattattttagcaccaaataaaattaaataaagaactaaaaagcctaaacgtgcccacaaagatcacaaaagttattatagggagttagttttaaatgaaagaaagtacagtattattaattatgaattgagtttgtatatgaggattgtcgagtctaaatgcaattcctaatattctggatgtctctctagttagactctgtcgatataaatagcccaaaattaattgctgtctatatgttaaaaatacctttttttaattggcgcccagttttctttatatgttttttctttgttttgtttttttttttttcactttaattttttttaattaatattcatttgctaatggagtggagccaatgtgttactcctcccccagaaagctcttttagtaattgcttataacatttggtgcatgtgatagaataggccccactattaaaagtagtctaattcagaacatgtgcagtagaatactatatattcttttgcttttaattaatttcttctattcttactctactgaattatttacttttagtcttacaaaattaaaaatgatgagagatgttattatttacaggcaaactctaatgaatggctacaaatgagccatctatggggagctaattggtgtttcgtcggaggacctttaagaggacctttttcagtgaagttaacgacattgtcaactggaaaagctctctctgccagagacgtcattccaaccaattggtctcctaaggcaacttacacttcccgcttaaacttcttctaatactaaccctaaaaccgtaattaacgactatacaaatagagaaggagaataaaacaattaatctcttcttcatctatgccagaaaaggctctattggtttcccacgactcgaaagtagccgttgtcgggtttggtttgtttttgagggaaaaagtagccgttggagagtgcccaattgctctttcctttctatcctttttgttgtttggttttttttgatctaattatgccttttgtgggggttagttttcttatattatttttagggaggaaaactgaatgtagaatatgtagccctctccaaaggagagagagctgttgtgtaatgttttgttttatgtttgacctttgcttgtttttgtacttttgtgggaccaatgggtttgtttattaatgaaacgagaaaaatattgttggtgtattaaactgaagtttttattattttaacaaccaatggcaatgagccctcacttttcttttctaatcaattaattattgaaaaatgctaaaagtttgctattagtgcaattaagtttgctgcggtaaatgctttggaaggtagctgtagtaccggtgtggtgattagagaatatcaaggtgaggtggtgtgttccaaagctgatttcattaggaaacctttctcgtctcttgttagggggtaattgatgtgaagagtaggggattgggtatattttgagagaagaacactagaatttttatttagtaggcgagttagacttggtggtggctgccattggggaggaagctagtgctactgggattttggattttgtgtttcagactacaactacgaattggggagagcattatgtaggaaggaaaatatggttaaccaatccaatagtaatgctattaattattagtttgtcaactagatttctcttattattgtttttctgaaaaaataaggaaatttaaccaaatcaattcataaaagaatatttaagcagtagcaacgccgtctgtgggaatcgaacccacgaccacatggttaaaagccatgcgctctaccagctgagctaagacggctgtatgcttaatgctggcagaaagcattttctgttaacagtgccaactattatttatttattttgtgttatccaaaaatatagagcatgtattcaattcgatattaaaatgacttatgagtttttccagtttatatttcaaaatatatttctagtttttctagttttttttttccttccatcaatatctacatttttttaacatgaataattttacaacaaatatggagggagtcgttgtttattatttgcaagacattatcacagtcactaatagagatatatgtgaacgcattttgttctatacttagctaagcttctcaaatttagaaaaacgaaaaaaagattaaatcatgttattcatatagtgggagtatgaaaatgacactgaacactagcaatactcacatgtaacaaaccaaataataattgaaatttatatatataagataagtttataatttatgtgaatgcgtggatcacatgattggaatcacaattcacaacatttttcttgtaagaatcctatggaatccttgtgggcccagaaatctattgaaaatttaagagaattcgtccttttagggtcccatagcttttacacatcttctactgtgagttgtgtttcttatcgtcacccacatgcaattgcctttgaaaagctcttcactatttgtttatgtgactggtgggggatcaccacgcacgtgcaagtgggtaccactcatctttcggatgatgagcacgtgacttctctcatcacatcttgttggtgttggacatgttggtatgccatatgagtaattatttcatatattaatttttttttttaaaatttataatttatgttggtatgttatataaaatttagttgccatttcaattgtccgattgatattgattactatctaaaatatttatataaaaaaaaaaaactataaagaaaataaaaaaaataaaaaattcattaaaagtaaaatgtcataaaagatacactaaacctttcaatgtgaaagaaggagcgaaaggtagataacatatatctatctacttcactatcaatgctcaacttgtcaatagaatgttgccaactacatataaatggatttgaaagtaaggtttcatttggattgaaattcaattcaatgtgtgcaaacataagagagtgataagagagttaagttgagtaatttgactctcataaaaaatactgttttgctccatataattctgcatatggttatctgttggatgatgtagttaagttgggcatgcatgtattgccttgtcggatcaataggatcgagtaattgctatggcatgtcctcgtcctcattctttcttggccatcaatgtgcctcttttcatgtggttgggcctcaagtggaggttgcccataggcatgtgggttcttgagcctatttaccatgcccacatccatcttcctttgtggtatcactttattgtcataagaaagttgcttcacgccatatgttctacaaaggtcggtgatgactccagccaacccaattctatctcacgtggctccttgaaccatcaagtcaaaacttt

SEQ ID NO: 26292 - DNA, 3018 bp, Cannabis sativa
attatgattatgaggtattagattattggaattttgatttggggttaacttgagttctgttttttcggcagtcaactgattcttatgttggttcgccaccaaaattggatgggagaactatttattaccatatagctgatgaaaatggtgaagtggacgatgaatcagtggagggttactctttcacttttaggggtaatggggttgaagaattgactcgtagatttgaggaagaaactggtattgagggtattataatgtgtactcggagccctttgaatggaaagctatatccacttcgtttgcagcttcctcctaataatgttactatgcatcttgttgttcttctttcacagtcaaaaggtgagctttcttaggctttttattgttgcagtgaatttatcattattgcttttgtgatgttgaagctttaaattttttattatttttatttttggtatctgcatctacgctatttgattgtgaatatatttaacatttgtattgaatatactgaaatctttatcaatgcttttcttgataaaggatattctaaaggaagtttttggtctatagtttgtcaagtttgtctaacgtttttcactttttgttgccttttgttgtatgtatcagcggccaaagaattagaaagcaaaggtttattataggatatgcacttgttggagaactagagatgtgaatgaaagctctggtagaatgatatgggccaactatctattaatgtaaattctcatctatgtcctctgtttatatggtatctgaattctgaaagtgtctgaatcagttataaactagaatctgtcgtccccatcatgatctcaatatttataaggttcgactttattacgttgttagtggaggaactgtgttagtgggtgctcattcagagcctttactagagtctgaaagcttaatcttaacacagtaatcttggggaagaagcctattcatcaatagattttgttgtaacactatattctcatatttttttgttctttttttgttttaacttatattttggttagatcattcatggcctttgtattcccttattggtcaagtttttattctcatgcttcgtgttggtgtcgttttggtaaaaactgtttgttgtggattattttattctatacatgattttattactgaaagtgctattactccacaattctctgtttcttcttaagaggttgctgaggctttttggaagggtatagtgagtatctgtaagaaaaaactttgattcttataccattataactaacattatatataagaacaagctttgattctatttctaataagcttgttcttcttgcctctaataaaaaacttgagttgactttgacagatttcattcaagcactgatttgtttggaaaatgttagtagatttgcatgagcaatcagagctatatgatcaataatattataatatttatataaaatattataaattggttgtaaacattaatggcagccatgatttcattaagagaaattattacagcacttctccaaaatccaaatatttggttacctaccaaagttccaaatgactactataacaaatgtcaattctctctttcatttccatctgtttttttaccaataaaaataacagaaatttgaaaattggattaagagaatgagcctgcaaaaataaataaataaataaataaaatacatgaagattagctgtgtaatatagaataaattacatgaaacaaaaaaccaagcttttaaaatgttctatacataaggcagaggaaaacagaacaaaatgatttttggaaataactgagtgaaaatgaagctcaggaatgagctaagaaatcttattgagtatttatagataagatttaaaatctaagcttagttacaacagaaaattaacatataatcacttaactaaaccagacataataacctttcttagctaactctcatcattaatacatatacataataccaatcaggaaaaccatgacttcacacacaaaaaaagccatttaaatacataacaattgcaatgctaagattcataatgtgtgttcacttacctaaggctccacaatgatctttccagtagcatggccatcaatacacttggcccaagcatcttcagccttgctcagtggatacttcgagtcaatcgcagtcttaagctttccttcattcaccaacttcacaagatattctaaattctcactctttgtattcacaaatataattggcactaattgcttggaagagaaggtaagtttcttaagagcaaaagtccacaaggaagctggccctggagagatatcaataaccttcccattcttactaagattaggctcgagtgtggaccaaggaattcctgtcacgcattggatcacaacatcatattttcgacccgaagggctttggagagctgacccttctggggttgtgtagtcaagaacctcatcagcacctaagctcttcacaaactcaatgttacgggcgccacaagtggctgtaacatgtgtgttttgtctaagctttgctaattggacagcatagtgtcctacaccaccaaaggctgcagttaccaatattttggcaactgcaacttcggctgtgcctggatcaagattgatcccggcaatttgagtgagtgcttggtgtgctgtgaggcctgaaatcggtaagcttgcagcttcggctggcgaaacttgaggtggcctagtgactatcaagttctcactagccacaacaaattcagctagtccacctccattctgtcataacacaatctcatcatattataacacttcaattatcacactaatttttcatgtttctctctctgattcttctgtttttttatgtatgtatacgaataaatggaaaaaagaaaaggttaactcacgacatggttaagagtaacaacaactttgtcaccaactttgaatttagtgacaccatgtctaacctctactatttctccagccacatcagtacctgtgat

SEQ ID NO: 26293 - DNA, 5081 bp, Cannabis sativa
aggctgagtttaaaaaagtttctctaaaggtgattgatatttgagaagacgagagggcatcctattaatgagaaaaacaaaagacatataagcttcatttcaatatttgagagcaaagaaggcttgagcaagaagggtgaggccactttcaattatgtgtctgtgtttgcgttcagcaacaccatttttcttatgagtatgaaggcatgaaactttatgaaaaatggctgaatcattgagaaaacttgtgaaggcttgatactcatctccccaatcagattagatgagtttgattttcttatttagttgcagtttaacttgtgttttgaaggtgatgaaagtaaacaaggctttatattttgttctcaacaggtatatcaatgtatgcctagagaaagcatctatgaaactgttgcgattttatgtcctaaataaaattcaagttcattgtaatcttatttaccttcaataaagatcaaaaatcatatcttgactcagtcataagctttgctcacatattttacacatgattatatgtttaatatataagttctatttaatcatgaacatatagttattcacaattacagagatgtcatcacattggaaagtaattgtgattatatgcttcaaattatttagtctcatgatttattagtgcactgaatttacactaacgtgataattagtgatggggtttacttacacttggataagtggaatgtcttcttcaggacattagtaaagtaaactagcatcaaatgtattggctatacatcagactagactaatattcacagtagaaagatatcgtaaacttaccgtaatatattttctaggtaaatatctaaaagttgatcttagagcagtgatcttaatcttgagatgattaggttgtagctcaattgtgtttcacatattctttgatttgttcgttaaaatttttcccgatggtttagctaatgtacttacatcttgagaacatgatagtgtaattgagtgggagcactagtcatagatatagcttctagaagtacctagaagtgaaatgatgatttctttagagcttggctaaatgagtttaaatgattgaggcctcacttcggtagttatattagttttccaaaatatcatttacaaatagctaagtattttaaggataaaatacattgaagggtaaaacgataatttattttctattcaatgtagatcatctatagaagatcattgattatttagattgaaataatcgataactaatagcgtgtttattcttagagaatagagtgttctatgtaatcaatagtgcaattctaaatctatagcggagtcgggagaaattaataagctagagaatttacttgataaattctataactaattattaagagcttaattatatagactcatggtcctcacactacctgagatcttattgccttgaagactcaattagttggtgttagttaatcaattaggattctaaataattctatgttttatttatgaattttaccatgtaagggaaattttaagaagaaaaaggaaatctagagtttaggtattaattaagagacttgggagaatctaactaataattatgttaaattgtaattttatttgataattaaatataattattaaatagaaaaaattaacattaaagggcttagaatagaaaaatagtatgtttgtaaagagataagcctagaattaaaatgtcatttataaaacccatgggctttacctataagttcggccaaggattagtaaaataaggtgactattttatcttttttaattctatttagttctaaccctaaccctaagaaattactataaataaacttctatatagttctcagtcaataacaccatctacacattagatataacccttcacttggttataagaaattttgaattcctatgttcttttctctctagtgtacacgcctatatgcattagtatatacagtgtatacaacttagagtgatgatagaattctagccagataagtgaggttttgagagttataatattatagtatatatgtaacgctctatgtttaggagacgccacgtgtgtgcatttataaactaatttatgataataaactaacaatttatgtaaaatatgatttaataaaatttttctaactaatctaaattataaaatcatggcataattcatttacaattggggatccctatttgaaatattacaagacatgtcattacaatattatcataaaaatacatgtaaaagttcataaaatttgaaatacaattcctggcaacaactcatcaccacttgccagataagctcatatgtacatttgttggagaagattcctgactcatggttgtctaaatatttttacctattacctacaccatataacactcgtgagtcataaggactcaacaaaatatcacaaattattattcatatattatcaattatactcaaaaaatcaggatcagatgttcacacattactcacaagattaaatctaaatcactactaatatgagttgcaaataaacgttagtataaagatattcacatgtacaaaattagtgacctaataacacaagtcatatccattactttataaagtgatcataatcaatattcgtacattactcgcatgcataagtccaagtcaatacaaacattcattcaaatttaacatcagtataaacatttaataatataccaatctagtttaataataccaaccatatttgttacttcataaagtaaccattttctaatggtgcctaataagataaccttgatgctctaatccggcatccacatgtctcatcgcctaataaggcaacattgatacgctattctaacatctatatatctcattacctaataagacaaggttgatgtcctaacccgtcatccttatatctgtcattgtctaataagataatcgacaaatagaaaacctaacaataattttcgtgtatagtcatgacttttgatacctaatcctttggtactcaaatattattgtctaataagacacctttttatcattatctaataagacaacatttttatcattatctaataagaaaatctttttatcattatttaataagacaacctttacatcattgtctaataagacaactcttttcatcacataatggtaataattacattttaatctcgatattaatcgattcacaacgataataattatatcctaacataacatgctatgtagtacaaatattcttttttacctttgatccagattcatgcatgtcggccaacttgagtggagaaaaattcctgatgatctcggccctatgtcgcaacaacggtaaatcaataagtgtctatcctaaaacactgcttaatattcacctaaaacaatctaggattttctaccaaacctcgtgatataaacaccttaaaataaaacttatactttggctctaaagtatatactatactgtagatctcattacaagcttcgaaacagtatagataacgtctaaaatggacacctgagtgaaaagttatggccaaaatataaatttcgttcctcttgaaaaaaaccaaaaacggttaactgtttttttctgctccaaaaacgattaattgttttttgcagggacaaaaaaactcgagtttcaacttctaaaaactccaccaaaagctaaccaattgattccaaacttcacaaaacacttacataacatccatataaaaaatctctacgtgacaggattcagaaccatgctcttaaataaaaattaccattaaagctcaagctttgagcttaacacctcaaatgtgattatcacctcaaagctacaacaaagctatcaaataaacatcaaaatcaatcccatagcaccttagaaacaaaactaaacgctcacacactccataatagccaaaaaatacagtcaaactttaaaacctaaactttcaaagaataaaatagactatacacttacctcaagttctaacctctactagcttcaattctagctattaatagagttggaagagattggttctagagtgagaaattaaaaaagagttgatagtggtagtggttcggttgtacgagagaaggagagtttacgggttagcgttatgtgtttttgttttaaaacttatcatatatatattcagataataataataaattatatataatttcttagccactaaatttttttaaccttagggtattttggcttctgatcgggtttccaaggtcgtcaaacctaaaaatatttttattccaaaaataactcacattatattcacatattctaaataaatctttgtaattaataaattacgtttatttattcacttatggcaaaattcataatttatgctgaaacaaattagtaggattataatctcactgattaatccataatatataataaactctaattattcacaattatattttcgaaatatcacaatataaaaatagttttcctattgttttcttctctaaattttgtgtgcatagtattattaagctttgcccgcacaaatcaagggagtactcagaatagtgtagaagactgtgtagtctttcacattacaaaaaagatccatgttctgctctcgattatactctgtgacagaaagaaaacaagagtgagagaacataatagaaggaggtatttaattccactacaatcactgtaaagttttcttaaacttttatgtgtttaatttgaattgtttaaggttccatgtttaggacgttagattagtaataatcaacatacttgtttagtaaaaataagatcctggttaaatatgatttccaacagaagcttatatagtatctatagccattaggtgaagttatagggactggaccccataaatcaaaatgaagcaattgtaatggtttagtgtaaacagtttgagaaattgaaaatggaagtttttgatgctttccaagaaaacctgtagtacaaagatcaaaagatgaaatatttttattgttgatttgatgttacatgatgagaggaaaacttgaacaactcaagatgaaggatgtccaagcctca

SEQ ID NO: 26294 - DNA, 1685 bp, Cannabis sativa
ggaataatacttatgtttgtgttctgaaaagttgaaatcagaataaaatgagggtaatttggtcgtattgaccaaattttaaattttttacatttttgtaggatatcttaagtttttagcgaaatactgttaggtcttgatattagtaacttaaatataattgattatgattatagatgttgagttgtcaaattcttagttgtggggatgaaatgtttctaagtgagttgttagggtaattcatcaacttacaatgagtgcctctcaatgtcacttaacctaaattcagtaaggttattttacaaattttacatttttacatcgaaaatgagttgagaaatctattatatttattactaacctgataggtttccttgcatgctgtctagtacaacagataaacaaagtaaaggagccatttctgtgacataactcacaacttctttctcattactaaaagtgtaaccgaaaacatctcgacacataaaaagtgttgtggttactatgctcgtctctactatggctataaacattgcagcaaaggttgcaatacgagctccttgtgggttcccggctcctagttcatttgcaactcttgtactgtaatgtattaataataaatagtgtagttaactatacaatataatcattgtatcaaatgcacaaaacgatattaaatgaatacaattatgtaattgataaaaaaaaaagtgaattgaaattatatgtacatataaataaggtcggttctgaatttagtcgatcataataaaagataaaaatcaggggctttaattataaacaaatgtagtatttttaaaagggaaaaaaaaattcccttttatcctcaaaaaaaaaagggaaaaacttttttttttttgtctctaggctaggtgggcgttaggcataggcctagtctacctatacctagacaggcctatatataatagaaagtgtatagatgtaccttgctgcagcaccaactccaaaaggaattgcatataatgttgagatggtttgtaagctgtaacataggattattagtaattatttatattaatagagcttgaatactaattatacccaaaaaaaaaaaaaactcaccatatagaaagaactgaagtttcaagctgtggatttggtagaattccagacattagaataagcaactcaaatgaccaccattctagactataaacacaaacaatttaagtaattagtgaaatgttacattgcattttctcaataaaaacaaaaatttatttgtattttagttaccatgacataactgcagaagggatagccaaccgaaagaactccctgatcccatgaaaaatctctatagaaatcgaagttcgagttttctcacatgaaggagaaaacttaatgtagaaaccgaatataatagcgtttaaccaatacgaaatactaatacccaatgctcctccaagatttcccaatccaaatttgaatactaaaacccaagataaaggtatgtggaaacaaagtatggcaaaagaggttatgagcattggagttatcatgctttgtgtttgaaaatatcttataagtggttgaagaattgcatatgcaaatagagctggaataagccatattataaattttccagcttcatgagaaatttgagggtcttgaccaatgaaaacaagtatttttcccatgaa

SEQ ID NO: 26295 - DNA, 2335 bp, Cannabis sativa
taactgaatgataatatttaaaaatattatttataaattttatattttttgtaggggcccaaattttaaattataagagggcctctaaaatgtttaagacgaccctgatatttaacaccatagcacacaaatacggtgcttgtaagacatctgtcccaggttgggtggtccccagacatacgaaggctttcgcttcccgagctagaattctgctagtgggcctaaagtcatgtattttatgtatttaccccaatagtgggcctagttttgcacgaaaatcctagcgggtcacgggtgtacttggatccagatcctaacctataaatacccctttataccttcatgcaaggggggattcacataacttcttttaggttttcttctttgagaagtttgaaaagcctaattgacaaaatcagaagacaaataatatagcaagaagttagggttcttgaacttataagatcccattataatacctcaatgacatttgacataatacattgactcgtggagtagggttaattaacacctgaactacgtaaaaatctccatatccattttatatttacttatattatttttaagctcttatttaaattgatttttaaaaatctcaataaacaatatgataataaatttaatgtaaaatttctataatttacaattaatgataaatattttaaaaaataaataatttagacaataatttacttgatttggtaaataaatataataattttataattaattgtgtaactttaaatgttcacattaacataattattaaaattatatgcataaatgaatcatgtatgtaattaccaaattaaatatttttacttttaatttataaccaaataacgtaagaataccaaatatatgttaaatcaaattggaaaaaattaattaaatataatttatatactaaattagtaaaaaatgaatttaaattccaaaataaattaaaacaattataattttcataatttttacatttttttatgaaaactgccattttccccttcatttgcaaaattagctgttgtataagtcatcttcctcagctaaccgggtcttcttgacgcggattcctgtacgtgggtctacaggacccgattccccacccagtcggaaaatcatgtttttgacgccaaaaattatattttcaagcccaaaattgatcgagacacatcaattaagtgttcatgaatattttaagctgaaacaagcatgttcgaatttattttgcctttcaataatatatttatccatgattcatggtgtagatccaaagcaattcgaaaaatatacattaaaatatgaatcacgtttttatgtcaataaaaattggaaaaattaactttaatttgaaaataagttctcgagtataaacatgtttgtcagattttttcaaaagcaaaagatcacgaaaccaatttaaatttacataaagaattaccaaatgtaaataaacgatttctcaaatagtaattcataaaatataaatatgaattacattaaaaaaaaaaactattaccaaacactaagacagtcgaaaagaattttaattttttatttatatatataaatatagatccatttagtaatgaggtaaaagaaagtaaaatggataagagaaataaaagaaatatgcccaagcccaaacaaatacataatgaactatgtatacatacgtacgtatagataaaaagttgttcgaacatataagattatatatacaattaatcaaggtagaggtgtagatatgctattgatactaactattaaaaatttatataaatgatataaaacatatatgattgtgtataaaataccgaattaaatttaatgtatacatggtataactaaaatacctcaaatcattgattttttgaccttcatttctacaagagttttggatctaccaaagaaaaagaaactagttagttcaggcaagtaattacataatcggagcttctaagctctcttactctctctagataaaatttgttatttttacaaaatgagtaaggatctcgagaatcagttacttatatttataagtgagatacttcattaatatttgtattacattaattgttagaatattctgataattattttaaaaaattaaatcaaaaaataaattaattagtgaatagaaaactgaccatagagtatttatatacacgtaaaaattaattaaatgactacatttaatataaaaatattctaactcacacgtattaaattgtgggtcatgtatgattgtgataaatattattatttatggaatattataaattcaagaaaagagtcacattcacgactg

SEQ ID NO: 26296 - DNA, 1654 bp, Cannabis sativa
aagagaagaaaagtcagaaaaaaaaaaagaaacaaaaagattttttttatatatatttaatgatttttttttaattttaattaattttttttgtctttcaaaaaaaatatattttatttttttaatttttttaaataatttatttatgtgggccaataatactgtgtcacgtggacaatccaccatggcagttaacagctaaatttagacggaagtgttaaattgctaacagaacctgagtattgggagttttaaccgcccaaatttagattttgggggttaagtgaaaccaaaatgaaagttttgggagttttaccgccatttaccttataattatatattttatttttattaattatatttaaataattattaagagaaatatattagtgtaatatttcaatatcagttttcataaattttaatttaatataatttttaaaaaatactaactaattattttgtatgtgaatcagtatgttattaagcaatgtgccacatagtaataatagtataaaaaattatttataaaaaaagtaatacaaaaattatttataaaaataaaataaaacacaaagataaaaaagaatttactacctaattattaagtattacataagtataacattgaacatcttaaagtgccaataacaaatataaaaaaaatatttaccaataaatagtatataaaaaaccaaaacaaaaagtaaaaaaaaatggtatatgtatataaaaattcctaaacgacaaagataagttatttgcatttattttattataatgtctctttatatattaatgttatagatattaaatgaaaagtatttattacactcctttaagactaactctaataaaattgcttagagtgtttgaaactgttatttactttatttttaaaatatttaactaaaattttacttttacagcacattaatcttagagatttttactacctcaaaaaaaaaaatcttagagatttttacactaggtgtcaaatttggctatttttttacattttcaatgcttatcaattttttaaacatttttacaaaaccatttttacctttttaagcttcaaaaagtattaaaattatcctttcaaaaaaaaaaggtattaaaattacaaaaatactacattgatgatgtcagcacaccatttggtttctctcattttgtctcacgcgtcttctctatctccaaatctccataaccatttttctctttcttttcttcccacaattaatctgttgaagccaaactctcaagccctaacccttacctttccaccattgtcgttcaaataatgtttgtaagatcatcttcatcttcttcctcctcttcttattcttcgtcttcttcttcttttgctaaacttacaagaataaaagtttagatttgatagtttttattagagtttgttgtttatattagttattgatttttctattttactcatagattttatgaattttttttgttattctaaatgttgagtttttgtatatatacatataaaagtacacctgctaggtgtttggtgaaatgcccatgagaattcaatctttttcactagcttaaaggaaagggtcatattcaaatgtgattttatttaaaatttaagttaagtattttcgtgctattgttttgatat

SEQ ID NO: 26297 - DNA, 1801 bp, Cannabis sativa
atggaatggctggtaatcaagtgggaccattgcatgggggaaattagatgcaataatctctagccctttaaggagatttagatgtgaagagcgccctttgaattaagaaccctaaggaatttgttccaaaaccttaagagggtatgacgaaaggtctggtcaccactccccttattaccaattatggtagaggtggtagtggctctttggttaagcaaaaaaagaaacctacatcgacattggtgggctcaagatgaaacaagaggtttcgggggacctagggccgaggtggttttggaagacgttatacttatcctaagtgttttcactctaagaaacatcgtccaggagaatgtaatcataaggcatgctttcaatgtggtctggtggctcactacaaaaaggattgtcctcatgagaatgaagaagagcaaaagcaagaggcaaaaccggtacttgtaacggcgtttgctatcagtcaagctgatgttgcagctagtccttctgtggtagcaggtcagcttcttgtcaataatttcaattatactatactacttgattctaggactatattatggcattatgagtaattaatcaattaggttagtcttgtacttttattaagagagggtttggaaccctgctatttagtagggcaattggttgtccctaaggggtgatataggtttatgctagttagtatggaaaacagagagttgagtgctgacctagtagagctggaattaataaagtttgatatcgtacttggggtggattcttggtccaagtactcagccagcattgactgcaagtggaaaatggttttaaccgatgggcaaagatccaattgtttgtgttggatctgttgaggggtctagcatcccagatattccagttttaagagctaaggacttactacatagtggatgtgtaagatatttatcagttgtgattgacttcagcagacctgagacatttgggtctaaagtagtcagagtggtaagcgaattccttggtgtagtttccaaggaattggtgggattgatgtcacaacaagagatagactttacaattgatttggcacccagggaagaactcgtaccgaaagcacagtatagaatggctccagcagaacttagggagctaaaaaaataataataatacaatttcaggggatgctcgatttagagtttatccgacccagtgtattgctttaaggagctccggttttatttgtgaaaaggaaggatggttccctctgaatatgcaatgactatcaggaattaagtaagctgacgaataaattttttttattcaagcagcctcaagagaagactctatttttaaatattgacttgtgatttggttatcatcagttgtgaattcaagagaagaccatgagcaacttttctaaatggtattacatcaactcagggattgtaagctattttagggcacattattggaaaagaggatatcatagttgatcaggggaagatcaaattagttaaaggttggctgaggctaagaacagtttctaaagtgtgaagttttctcaagttagtagggtattaccagcgctttttcgaaggcttctctaacatctcaatgtccttaacaaaattaattaaaaaaaagaacgaatgatctatatagtttgataagtgagaggtgagttttcaaaagtttgagcagtggaaaataccagcaccagcatttgccttgtcattggattaagaaaagttcatcgtttattataatacattcagacagggtctggattctattctcgtgcaagctg

SEQ ID NO: 26298 - DNA, 3223 bp, Cannabis sativa
acaaaaaatggtgccttatgtaattattcctaaattttaattaggtttattgttggatattgcaaattacaaagcccatacataataagatatttattgggctcatttaataaattatttatttggtccaatttagaatattagctcaaataaattatcttaatttgtaatcccacatgttgaattattaaatataatttaacaagatctaaccagcaggagcttctgtgtgaccaccaagtgcacgaactagtcagaaattatagggctctgatatttcatcacccagtttccaccatctctagcaagaattttttttccctttagatattttttttgaatgggcattcagagactctttgctcgctgcttttatttattaaatatttaaattgtaaatatcttttaataattttaacatttttttaattaagtgaatttatttttatatacttatttaacatatggtccaataataggttgccacgtgtctcctagttggaacaaaacaaacttagatggtatttaacaactaaaatggcacgacctcaaaaattttatttattaaatatttaaattgtagatatcttttaagaatttaacatttttttaattaagtgaatttatttttatatacttatttgacatgtggtccaataatagattgccacgtgtctcctaaatggaacgaaacaaacttagatgatatttaacaaccaaaatagtacgacttcaacaaaatcgtaatggaagggactattgtgagccacttcttttttattggagtcatatatgtaataatttcaaatattaaggtcgttattaaactaatctttatagcaaataaaatggtaatatttataataaatgaaagggctaagaattgcacccctaactttgagttaccaggtcaagaggtccatcactacattaaatgtgtgttatggctacctaacttaaatatatttgtaaaatttgtgcaactattaatacacttttaacctttgtttttaattataagataccttgataaaattccttgatatttcttcttcgttcgatctcttttctctttctcctctcagcctcccattgaagccccactttcccaacaagtaacatgacatttagaattgatgaacaatagttctaaatttctaatattacatactttttttttaatttttattagtatctgtataaatataaacaatgtccttcattgttaggacaattaattagagtagatagttgagcaatagttataactaataattaactatttagttagttagttgtccaagtatgcttagatgtattagttaagtttgttaaatatgattctgttattcaatttagtgtgtataaatatgttgtagcattcattctcgatcaataactaaatacattctttaattcagtatttctctccctctctttctgtgtgtttccagtttctcttcaacaatgtcaaatagatttaacatggcatcagagcattttatgccgtttatagcaaatgttttcgctggaactatgaacaattgacgaacataattggagctcaataaaacaagaacaagtacggtgtagaatcatcaaatgtctacttcaatgacaatttttccatcaagctcaaagaccaaaattatcttctgtggaaacaaaaattcttagctacagtcagaggaaattgattgataaacttcatctctagagctgcaccaccaccaaaatatctctctctgatgtcgatcaagctttgaacacgctcaatcctgcctttatcgattgagatgttcaagatcagctcttgttgtcatggtttctctcattgatatcaaagagcttacccactcaagtgatggtatgtgaaactatatgcaagatttggagaaccttggaacactacttcaccttacaagtcctagcaaagatcttggagtttggaattaagctttaaaatcttaagaaaggatctccgccactcaacaattatctactcaatggcaagcaacatgtggatcttcttgcatcagctgaagagttactaagtgttggttttgtggtactaaatcaggcacacgacaaaagaatttataacaattatcatcataccacattaggatctccatatgtacatacattaaatttgaaataaaagattaaaggatatatttacctcttgaagtgaatcagaatatcctcgaatcttttcgtaagttgtatccctaagatggtgatgacaaacttacactttgatcttctagatttaccaccataaacaaggattagtgtgggctaattaggataaaattgtattgttatcccaatttttgttttattactaaaaggctatttatttttagttaacgaaaatttacgttaacagtttggtgctttcattgaaagccttagtgataaaactcagaaacatccctccttacaaatagaaatctatccatattcaatggctgataccaatcaaaaagatggaaattgccctgaagaaacaactcgtcgccctggaaaagaaccaatgggatctcaaaaaccccacaccactgaaacatcacgttcaaggagaggaacgatggtggtggtgatcacattcctggaagaagtaatgaagatgctaataattctgccaaatacgtgcttaggagcgaggatgcttatgacccaactagatatgtgcaattggtggagttagagaatagacaactttgacaacgcttagccgagtctaaccgatggaatgctgagttggaaagagaggctacagcggctagggcagcacatggaaaaaatccttagaattaaccagatcctgcagtgagaagaccacgaggacgatctcaaggctctagaaccaggagacaagaaacgaaccaacggaatccccaaaacggccacgaagaacaacctaagggtataagggatgttccaggataatcaaacaaacaattaagagcaacaacgagatgttcctcaaggttcccaatgatttacaaaccaagggaacgaacaaaatgatgcatcaaaagcgtcttgcaagaatgaggatgcgagacagcctcaaccagggaaccagggaatccttcgttgtaactagagaaattgtggaaatcaaccatggtcaagtggactacctctaagacaccctcaacgtccttctcaatttgagagagaggatgtttacacatacttgaatagaggacgt

SEQ ID NO: 26299 - DNA, 1651 bp, Cannabis sativa
ataaaaacacaatatttttggaaaaaaaaaattcgtgtgataatatttttgtaaaaattaacccaaattccagtatttcttataagtttccctattaaaatgacacaaatatattggattgaccctataaatatttatatagcccaataacaaaataatttataaaaatatctcttgcactaaccattcaatcgcacaaaccaccttcttcaacaacaatagctttcagcaaccaaaccagtaggtcaactgaaaggaaactaaaccagacggagaatcaccataaactctgacgacttcacctgagaaaaagaccgtaagaaatccaaacacatacaattttggatttatgtaagatcggacagaaaaactagttcgaaactaaaatttaaccctgaattacgattaaatcgaagaaaactaatcctcctaatatcaatttttagattcataaaatttagatctctttgaaatagatttagagttcatgatcaatatccaaatcaagtataaactaacactagctaatgtatttctcattgcactaacgttgtttttcaaatttttaatggtagatttattcataccaaattacgaataacaaagaaaatttgaatttatctagagccacgtacatagaaatattgttctagtttttacgtttctctgttgttgcattgcggttgcattaacaatttacaaatgctttgaaactagacatatcaataattacaaactgataacaatacaatagtttttatgatatttgcgggtgtttcatattgacaattcaacacaaaactctttaaaaaagtaataacatggttatttttattaatatattcatttggttgttgtaaagttagtttgcagaattctaacagttgtttctccacataatattattaaggtacaattgattgttgatcagtgacaaaaaatactgaaaaatattttcgtgatgatgcacattcaatgtttttatttatagtcgcatttaagttgtatattagttgaataatagttgtgctactataatattattatacattaaaaaaatagggctcaaaattggcaatacatgactcgtactagagaaaactcaattgtggtaaattttgtttgtattacataagggcattgttttaagatttaatattagttgtctcacggtaaatataactgttacattacagtttcataacagttatctcatagttgacttacaatgcttaaatttttaaactgtcaagaaaaagacacgattccgtttctcatatttggcaatggatagtttgatcgaggaacaaattatgtaaattacgaagctactggccaatacatttcaatagagtgtaaatatgaagaactagtacacatgctgaaataggtgttggaatgcaactaaaacaagtactcaactgtaattgaaataccaagtgaaagaaggacacaaatcgttaaggataaatgacgatccaagcttattcttctaaatacaattaaaattaacagaaccttacttcagaagttatccattgtgtatgaacatagtcagcaacacaacaacaatcaacatcacatttcttattactaaaatagcacaatttttaaggtccaagataaatgttaccatgggaactcaaactct

SEQ ID NO: 26300 - DNA, 1730 bp, Cannabis sativa
taagccttgctgaacaagaagatagatgtagcagctccttgatagattattggtcgataactttttggaagttgaatcttccatcaaaagattcgtatttttgtttggaagcctttcacatggagttaccagttgctgcagaacttcatcggagacatatagattccgctcctctttgttctctctgcaattcccatgataaaacaattaattaccatgccttatttttctgcaaaaaaagcaaaagaagtggggcgtctctcgaacttaccaattggttttaaactggttggttcaaacacatgatgatttcctgctacatctctcaaccaatctttcaacttcacacttgagcattttattattctttgctagtgcatctagtacggaaagaatgctgaatttcatggaaaagttacaaaaaaagctgatgtagttttactgtttgtaaaatcatatctatatgaattctaagctgcccgtgcaacaactcaaaggtccgaaccacatcaaccgcagccacagtacatagtgcctgcaagtactccttctagttcaacttcaaagcctaaatggttggctccaccttcggggagattcaaacttaacacagacgttgttattgacaaatctaaaggtgttattggtgttggtgcaattttaagagactttgctggttctattattgcagctttatctaagccttttaggggttgttttaaatctgaagaaatggaagcattaattaggctttattttaagtctacaatggctcttattactcaatttgtcagcagatcacacattgaaactgattcattcatgatagttcaacgattgtaatctttccatttatttacttctacttttcatgctattttgaatgatgttaactttctagtgtcttattttctacgagcacagattactcatgttttaagatctgctaatacttatgctcatacttggctaaatttgttcttatggtggatactaattgtttttggttggagaaatttctatcttcactaatctaatgattgttatgtaatttatttaaaattaatataatagtctttttcttaaaaaaaaaagttgagaaaataattatagtaaaagattacaatattatttattaaaattattagtttgaaatttactttaattgtgataaaagcaaataggtaaaataatactcattttgccaggctaaaataacaccgaatcaaaaagggtaaactaatactaaggataaacgtgagagaaaaccactcattactcaagtatatagttttgttataaaaatataaaatttcattcattctctccctttggatataacaatttaagtcactcaatcacaactacaaacaaattacaataaatcatgagcatcaattgaaggatataattatgtacatacacattattattagaactgtacgtacaacttatatataaatacatgtatacatatttaagatactacccggtctgattaattgaaataaccaaacaacgttgatatgataataatgattttggtctctctagataataatgataataatttatatcttctatctaataattaatacatatatatatccttgttcattaattaataataatataaaagagaaggaaacaaatttttagctaggctataatgtgatatatattatatagataaagtgtatatatactaaacataaatatgtgcattaatt

SEQ ID NO: 26301 - DNA, 1748 bp, Cannabis sativa
aaaaatacattttattcagtaaaaaaataagaaaactaaaaaatatcaaataatcaactaaacgacaactgaaataaccagaaaacaacctcataacaactataatacagctacaaataaactataaaacaacaaaaaacagtttattatttttactaaagagatatttttgtaaataaaaaattcaaagcgtaaaataaaattttccatgttgatgtatttttgtaatttttttatctaatttttggtctaatatgtaaaattttcttattgtacttaggtgttaacccagaaactgaccacggtgacatggacatgaatgtttgacacgcggcaagaaagaaacatccttgagttgagaaatcctgagccatagcagtcaacttgggagaggttcctagccctgcgcccaagttgactttgagaactctggagtggttgtttggatcccaccaagttgtttccaactcactatatttcactattttgtaccatgaagacatgaagcatccaagtccaatgctcgggagctgaaaaatggacaaaacaacacctcaaaagtcaacacaggcgcctagggtttcacccagtgcccaagttgacaacccaactaaggtttcagtttctgcgactgtcttagtccagatgggtcaaactttgtactgggacatgaattagacatgtcacgaacatatttcaggcatcagaatcatattagagcactttcatatttgaccactcggagcactaggtgtcttaagcacctagtgccccaattaacattttgtaaacctaggacacatccaagcataaaaaatgaggagacatgtacttttagagaagaaacagagcaattaagaggtcagaatgaggacccaacccccaggttgacacttggtgctgagcctagcgcccaggttgacattttatcaacttgggccatttccaaagagttttgccaagaagtcttccaggcatattcttcgtttttgtcaaatattaagatacaagtgtttccaggaatcaacaagagtcttctggtggcctgaaactgaacccagcgcctaggttgacacctggtgctaggcctagcacccagattgacacctagtgctgggcctagcgctcaggttgatattttgtcaacctgggctgtttccaatcatatttttgaaaaagtgttccgatttttttttttttttttgtaattagaaataacaaagataaaagtaaactcagggaaaaaatgagaatcttgagggcctaaaagttgagcctagcgcctaagttaacaaccaaactggtgcactggtttcgaccattgaaatgaaaattctacttcgagcattctctctggcatggtcaaaaacagggtaggagatctcgccctcaatttcaagaaccctaaaggacatactggaagctccaaaaagagcactgagcgcccaagttgacgtatgacctatgccactgggttttgcttatccgattccaattatgtctcaagcgttcatctagtttttcagagtaaacgagaggtatgaactcggacaagctaaattcacaacttcatattttcacttttccagcggagtgacttagttgtgaatcaggtagtttcaagtctcttgattccgtgaaatagtaacatctttgagaactggtgaatggcttcaccaaaacacagaactagctaagtgatgtcaaaatatcacttaggccttaaaaaatacaccctcaacatgttt

SEQ ID NO: 26302 - DNA, 3904 bp, Cannabis sativa
  modified_base (3480)..(3484): a, c, t, g, unknown or other
  modified_base (3778)..(3788): a, c, t, g, unknown or other
acagagcaaaatagaatgggagtttagtaggttttgccaccaaaattttggtttttgtggttaagtgttacaaaacgtaaagtttaggtggtttaggcggttaagtgttataatccctatcaataaatagaagtgtctctagtctctcaaataatctttatggctcatactttagattcagaatcaagcttggagtgagagagtccaagataaaagtgagtgtgtgtgtgtggagcgatgtaatgggagtatcattcatgaagtgatttccctcatgagtgtgagatatttctttgtaactgtttattgtattgagttgtaatctttggacatatccgattgtatactactgactattcaatcaatagagattattaattcattcgttctcaaattaagtttattcttgtctaatttcatctaagttgtagtttttgattttgttattagctctaatttgaattgtgttttcttaaatattgttactggtataacaataaagttttgagggtatatattcaccatagttagtaacaaacttttaaaaagaaataaaaattacacacatgataaggtaaaaaatatatgaataataattagaacttatctcataaatttttttggatctttgaataactaagtgagtaaagtaaatacacacctaaaagataaatatatgaaattcaactaacacactactcaatgataatattatattaaaatatgagtttctatttcaaaatataaaattaatgaaacaaaaatttaaggatatcacactatatactatatttctaactttttttttttatatatttttacaattttacttgtcccggtagttgttatatgggttgatatgtggatttggattgcggcttaagttgctctattagttgttatgtgggttgctatgtgaatttacgtaaaaatacaaaaaaaaaaaaaattactttgaaatgtaaaaataaaaagacccaaaaatttatctttgatatcatatccctcaagttgagggtgtcacagagttacctcacaccacttttaagatgaacataaaaaacgacttaaaccaatctatatcgtaccaaaaaaatacaccagacacataaacaaactaacatatcttgtacaacagaagtcacaatccactataaaggggaaatatttgaataggtatatgaaatatagggattattatagtaattaaggtattagttttttttttgtcattctagggtatataacttttgtgtttatatgtaggaatatttatgttttttttttttttaatcttttagagcttataacatatttttttatatgaagatctacattgtaggtattctattcttcttttaaaaaaaatcaattaatttatcctacaaaaaattaaaattttaaataatataaataagtattcttaaaatttttataacagtgcagaagcaatgaattaaaatagaaagaaagaggaatcaaaatctatttttattgattgaatttaatagtacatgaatgaagctacttatagtagttgtagttagttatattgacaaactaactctaccaaccactagtgaaagctcactaatcaagctaactaacacctaactatattttcctatccaattagtgacttgatactcctcctcaagatgggctacatatatccttcaagaattgaattggttagaaaacaatgatttattaggatgtctactagttgatccttagttgaaacatgtactgttttgatgattttatgttgcaccttctcccttactaagtgaaagtctatttcgatgtgtttggttctctcgtgaaaactagggtttccagctatgtattaagctgacttgttgtcacagtagagtagtgcagggtcttgatgttcaatctttagtttctttaaaatagacaagaaacaaaccacttcacatgttgtattggccagctatatatttagcctttgctgaagatctagaaatagtatgttgtttctaactcttccatgaaatgattgaagaactaatgaagatacaaagccatgtagttgaccttcttgtatctagacaagctgcttaattagagttagtgtaggcatgtatcttgacctctgtagcagctgcaaagaacaatccttatcctggattattttaacatattgaagcaccctctcagcaacatttagataccataggtgttgacaagaattggcttagtttgttaatagagtaggaatggtaaggtctagtaactgttaagtactacaatttcccaaccatacttctgtataaagtagggttagccaatttctctttttcatcttgtccaagtttcagattaccattcattggtgtactcataggttttctgcctaggaatctaaggtcttcaagtagctgcaatgcgtaaggtctttgagagataaaaattcccttgtctgatctagcaacttctaagccaagaaaatacttgagctttcctaggtcattcaacttgaatctgtcattcaatctctttttcaaggcttcaagttcttccaagttattgctaggtattattacatcatccacatacactaatagaaagatcctccatcaaaaagtttgatgaaaagggaaagatttgtagcagaatgatggaatcctttattggttagaacactagagaacttagcaaaccactctgttttgaagcttgcttcagttcatatagtgattctttattacttgcaaactggatttggtggcaactcccccttaggtctatatccttgaggtagagacatatacacttgttcatttagatcatcatgtacaaaggcattatttacatctagctgatgtaagtgacaaccttttattgtagcaagagccaaaataagttttataatgaccaacttagtaacatgtgcaaaggttttgtgtaatccactccctcctgatggttgtaacatttagcaacctgccttgccttaactctttcaacactaccatcagcattgaatttaatcttgtacaccaatttggagccaataacatgttgatctttaggtagagtaaccacaatccaagtgtgattcttctctagagcatttatttcattgtccatttcattgtcccattcaggtatgccatgagcttgaataaaaaactcaagttcaaaataggtgaaaatggcaaaaactattactctgaatgtaggagacaacctgtcataatcaacaacttgagagaaatggtgagatgtaacaatagtcccatgagattaaaaaaaaaagtaggattagttgccaagtacaaagataatcattaatgtaggaaggttaaatgatttatcttcctgttctattatgtgaatgggaaagaacgggaataaaattagtagaattaggtgttggagatacggatttatgaggttattgggaatattttaccaggatatagatttaataacaagtatgttgaattaacnnnnnaaatatgaatatctctaaaacaatcaaattaaacacataagggtataagaaaaccttacattggttgcagcagaataaaatgactccttccgctcagatctttaacccttgttcctttttctcgtagagtattatcaagatctgagcctgaatctctttctctcctttgggtttggttaccactgtcttactcactatgattgagtatttgacttgctatgtgtgggcatggcactctttcactaagggtttcgaatattgtgaagaagaatgaaggaggtgaaatctctatannnnnnnnnnnctcatctactagttgtctgacatggaaaactaggtttgatttggttgaaggcatcaagtgaatcagtgagagcatcatgttccttatatagcgtttcaactaggacttagggctga

SEQ ID NO: 26303 - DNA, 5292 bp, Cannabis sativa
  modified_base (39)..(61): a, c, t, g, unknown or other
  modified_base (128)..(136): a, c, t, g, unknown or other
aaatgcaaaaattatgaaaatcactaaatgacataaaannnnnnnnnnnnnnnnnnnnnnncagtataaataattatttaaatgtccatgaataattctccatgattaaacataattaactgctaatnnnnnnnnnaaactaagcggtctttacataatctaacatggtttattctttaatttttttcttgctaatcaattggctacattctaaatgggtgttctcaacaactttttggatgtcattagctctagatctaatgaagtttgcgagttagctaaggaagtgtagggaaaagggaagaagggataggtccctaggagtggatctcaaaaaccagcacctttgacctcaagcgaggaggctactctgaaggctccatccccagaagacttatccgcttttgtcattgacctatcaaaacctatcctagatgtcctacctttacgacaagtgcctatggggcatgttgaaggagacaactcggattgtgatgggccaattattgttcttaggaagcaacttagaagttcagatgatggcgcaaacagaaaggtaaaggtagaggccaaagaaaattacaacatttggctactataaggagacgggttactaaatttcagtcttagaagggatctaacatctctgaaggtgaaaggtcagttaagaggagaactcgaacaaccaaggagaatcaagatccacctccaccaccctaacacccaaaagctttcctaccactaccaccaagttgtgtagagagaagacgactttgcgtccattaccttttcatatttcaatcttccagtcaagcctacattaatgttgaaggaagttagagcacacatggagtttattgaacaattttacttgaagaggtgtggaggcgagtatgaaaaaatgaagaagttggccaataagatttctattaggcacaacgctgagtttgctaattatgataagtggaatgagccttttcccgacattataaacagagcataaatgacaaagagacttcgtcctagggttgggacttatgtgactccattcctgtctagtattttggaccagagtgctaccactagttgtaaacttgggactaataggtttgtaatgatggcaagtggggaccccgtttacatggtggatatatgcggacccaagccaacattataagttaacttttacttaaattgttaaggcaaaggatatgcctatttcattggtctaattcatccataacctttttcattacaggttagccttatggtagagaggagttgttctttggtcaataagctggcctatcaacttgaactattgaagtcaaaacgctctaatgccgaacaaaggaaggaagaagccaccaaagctctagtaaatgccaatgccaagatggagtccatcatcaaacaatgggtaaataattctttggacaaggttttagctcgtgagaaaaaggtgaccaaggctaagaatgaccatggggataggtacaaagagcaatatactaaagctctctctcaaatcagtaacttggaggcaaatctgaagcaatctgagttggattttaaagagtcagaaagaaagttcacccctctatctaaagaatatgacaagaagagtcaaatcgtggatgacaagattgttgaagccactttggagataaagacgacacttcattctaacttatagccaaaagcaaaggaagctaagaagaaggctatcaaaaaggctgaggaaaccgcagctgaattgagctctaccaaaaatcccctaacttaggcttgtgaagaatccaagaaaaggacttcagagttggagggtcaaatttagaaaatggactagaacaagcaggaccaagaggtcacgacattagaagcgtcaaagcaggcttttgtgtattctctatacaccatttggaaacttaacaactacatgatggattttctacatgattaagaccaagaacagttgatgtcgcaggttcttcaactagatgaagtagaagaagccaagaaggcagtaagggcaacaaaagtggtcgatcctagaacttcccctaggaggatgagagcttggaagagccagctctttcgaccattgatgctcattttgtggttgattctacaatctcagaggtctccattgatgtccaacctggtcatgctaagccaacgaaggacccagccatgccttgaccaagtttatccaacttttacttattttaacacttaacatttgggggataaggatccccctttttgcatatgcaaggataattttctatggctttgctgcggggcttttaagtacgtagtcatatttcagacattttcatactttcttatccctttagatatttgtgcttttatatatcaagcttgctaagttttaatcttatttccagcctcttgaggttttggttcgaaaggcctgatcctttgggctttcaattaaatgcttagaattgattttttccttttcagtaagttatttgtattccttggaatatgtttcctatgggctgaacctcagtattttaacaacttattttttgaaaaaattttgtcagtattttttactttaggattttgaaacttaaatatttaattaacttgtgctaattaattactccataatcaaacctttttttggtaatgttacttacttctacgactttttaaaacttaaatacttaattaacctaaattaatttatttatttaagaaacataaacatcttagttaagttaacttgagttaactacaaagcctggacttttatgctaagttaacctaagttaactatgaaagctgaacttctaagctaaattagcctaagttaattacgaagcctgaacttctaagttaaattaacttgagttaattatgaagcctgaacttctatattaaactaaccttagttaattataaagtgtactaaattaattacaagtatattaatgtagtggcttactttcggttccctagagctccagcatcttgcaatacttcctactcttatacatgttgttaatttagttatattttatggaagaggtataacattataatgatataatgtatgctacagcccaattgattaagagtttagacttttgatcacttattacaagataaaactttgagaaactaaacatgaaatgaaaaattccttctttattcaaatgattcctaccctgaggcatacatggaaattgaacataaaaataaaacgaaaaaaagagtaaaaaggaagctggccacccccagtctactgatagtattggcgtaggtggtcagcgttccatgctcttggaatttttgttccatctagccttctaaagtgataggttccatcacttattttatcttaaacttcatacaaagcttcccgattcggtcctaacacccccactcctggctcttgagaggctggaaatacccttctcaaaactaggtcttgaatttcaaatcttctaattttgactttggaaaagaagtttcttgcgatttggttttggtatatttggagttgaacctgtgactattctcgaagttcttcaattaaatccagagattcttcatgtatttatagttattattttattacacttattaaataaataaattggtatatgaaaaaatacgggttttcaatttgtattaaaggaagactctaaactcttagtctggtccgttaacattttcttatgtttttggaatatgtttccctttggaaaaggaagttctattattcatcctccacttctcattgattctaactattcgtattggaaggttagaatgagagcattcgtcaagccctatgatgtgaaagaatggagattaattctttagggttggtctcctctatttgtggcagattctaaaagtaataaaaagttaaaacctgaacttaaatggtctaatgaagatgataagttatctacttacaataataaagctttacatgcgatatttcatagactatgtgaaggttttattaaacttatatcttcttatgaatctgctaaagaggcttcgcaaattcctcaaactcaatttgaaaaaacaacattatgttaggcgatctaaattcataatgcttcaaaccaagtttgataatcttagaatgtatgataatgaatgtttatctgaattttatgaaagattatttgatattgataaagaattgtttaccttgggagcacaacatgatgaattgaggatagtaagaaaaattgttagagtccttcctaacagatttgatgctaagttgttggttatggaagaagcaaaagattttagcaagatgaaagtggaatagttgatggggtccttgtgtacctttgaactagatcaaaaaatcaagcaaaatgataaatccaagtctccaattgatagaggtaaaggtattgcttttaatgttgctgaaaaagaaagtttagacaatgaagaggatgatgagatggatgttttgactagaaacttttagaaatacatcgaaaagataagtgataaaaaaaaatttcgaaacctttaatgactaaaaatcaaaagagaattcagtgcagggaatgtgaaggatttgaacacattcaatctgaatgtccaaactctttgaaaaggattaagaaaagtttcactgtcacatggagtgatgatgaaattgatagtgatgaagataattttgacaatgttgcaccaacttcagtttcttctaagtttgtttgtgactcataggtgaatgaaagattgatgtctttcaataaccccattaaggaagaatctgattctgatgaatctaaaatttgtgaggagtccctaactgagtcttacatggttatgtataaaaagttgatacaggttacttctaaaaatagatcagtgtcaaaaattaataaacaagtgtctcataaaattaaatgtgttgaattgaaaattgaagaatatgagaatgatttttgtttaaaagatgaataaattattctattaaagaaggaacttcaaaatttaaagaaaaatattcagatgcttaaccatggatcttctatttttgaggaagttaagaatgtaggtgaaagaggcattgctagtctaagatcaaatgatactaaaagttcaaaaaaaataaaatttgtataatcttgtgcttttttgaatttggctcgcgctacaaattcaaaatttgttggtgcaaaaatatcttctgcaccaacaaaatctctaggcaacaaaatctctagaaagctcaaaaaggataagttttcaagtaagaaggtttat

SEQ ID NO: 26304 - DNA, 3461 bp, Cannabis sativa
gtaactatttcaataattttaaggcgatgtgtttctaccatgattattgatgagaattatggtgtttttgatcatattacaaacatgcatttcgagtagtagtgttattgggtgtggtatttcgacggttctctatcgtgtagagagctccaatacagtgttattttgactgagctgttttatcttaaggacgacaaggttgataatctgcttgcacaattctgggcaatgccgcgaacttcttaaagagaataacctaattcgtgactacacccagattttacgaggtaaatttgtttcttttatttttttttgcatcaactatttcaacaattttaagatgatgtgcttctgccatgaccaccgatgagaattctggtgttgttgatattaataaaacttttcattttgagggaaatctttttaaaagatggaaatagagacattttcttgtcctaattttcaatattgttcccacgatctctcgttttaacgttcctatgatcaacaacgtctttcttcctgttactatttttcgtgcatttcctatataatgcatcaaaaccaactacagaaatacatcttcttctcacataaaaaattataaacaaattatgcgattatattaaaaacatgtatttcgaacaatagtattattgggtgtgatattttgacggttctctttcatgcagtagagctccactgcaatgttatttcgacttggctgttttatcctatggatgtcgagactgatagtctacttgcacaattttggtcagtgccgcgaacgtcttaaagagagcgacctaatctgcaactcaacccaaattttattcgataaatttgttccttttattttttttacaacaactatttcaacaattttaagatgatgcatttctgctatgactaccgatgagaattttggtgttgttgattatattacaaacatgtattctgagcagtagtgttattgggtgtggtactttgacgattctttattgtgtaacagagttccgatacagtgttattttgattgagttattttatatcggggtcgacgagactgatagttagcttgcacaattatgagcagtgtcgtgaacattttaaagagagcgacctaatccgcgactcaacctagattttattcggtaaatttgttccttttatttttttttgcaacaactattttaacaattttaagacgatgtgtttttgccatgactaccgatgataattttggtgttgttgatattaataaaactttttatactgtggtaatcttttttaaagatggagacataaaatgttaaacttgacgatgttatttttcctcactacgaaaaatattgcttatattttgactactgataaacttgttgtttctgatactgttaaggatgatgaaagatagaagcaaactactgatttagcaagttgggtcgagaataattttttgtgcaaaaattttattcaatagtttatttgatgacttgtatgaatactacaattgataaggaaatttgggacgcgtttcaaaagaaatacgacattgaggaggctggaactaagaagtacgcagtcagtcgctacctcaaattccagatgactgacgataagttagtggaggctcagtctcatgaacttcaaaaaattgctcatgaaataatttctgaaggtatgtctttaaatgaacaattccaaattactgttattattgacaaattgcctcctgattagaaagattttaaaattactcttaggcacaaaacaaaagaactttttttaaaaattctaatcactcgctttcgcattgaggaggaggctcgcaaacaagaccagaaagaagaagtgattgttgtttcaaacaacaacgctaagaaatctagtgcgattttgaaactcactgggaaaaattttaagaattagaatcgcaagcatgctccaaactgcaataattattctcgaaataataatcaaaatttgattccaaggaaccaaaataaacaacaacaaccccttaataataagaatgacccgacaatgtttttgtgctttctttgtaacaaactgggtcatatgtcatgcaagtgtcggaacatgtctagttttgcttcgcaagctaacctgattgaagagctaccttataaaactttgattttagagatcaacctaattggtggatcaggatggtggtgggtagacactagcgcttcttaccgtgtctgctatgatcgtgctatgtttaagacgtacactcctgcaaccgaggataagaaagtgatgttagacgaatctcacactacaattgctgtttgtactggtgttgtggaattaaagtttgcctttggaaaaaccacatgattctcaaagaagtcatgcatactccaaagatgagaaaaaaattttggtctcgtgctatctcctcaacaaggtgaggttcacacatattataggggcaaatttgtttactttaactaaaaatgagatttttgtggggaaatggtgtgctactgaaaggatgtttaaattaaatgttgaagttaataaagtgaatatttttgtttacttattgtgctctctcaatacttggcatgccagactttgttatgttaacaaacacataattaaaaatatgagtagtttaggcttaatacctaaaatgattttgaaaagtgtgactctggctaagatcacaaaaacacctcataaatttttaactagagaaaattagcctctaaaattaatttattatgatatttgtgaattaaatggtgttttaacaagaaactaaaaatgtttatctttgtgcatttaatgaaaaataaaagtgaagctcttgatatgtttaagttatttgtggttgaaattgaaaatcaacttagtaggaagatcaagaagctacgtagtgatagacgcactgaatatgattccactgcttttgttgatttttataactcacatgaaattagacatgataagactgcaccgtatttacctaaaatgaatagaaaagttaaaagaaagaatagaaattttattgaatctattgttgtcattttacttaattatggtgctgcatcttattggtgggaaaaaattatcttaactatttgctatctgcttaatagggtacctaacccaaaaaacaaaatttctccttatgagatattgaaaatagacaactaaacatatcttattttagaacatgggattgtttagcttatgttcgtattcctgatcttaagagaattaagctaggaagtagagccaatgaatgtatatttttaaggtatgttggtaatagcaaagcctataggttctatgatctaaatgcgcatgttatagtggaatctaacggcactgattttttttaaagatagatttccatttaaattgagaaataataggggcacatgagctagcaacatttcagtgattaggagtgatgaacatac

SEQ ID NO: 26305 - DNA, 1760 bp, Cannabis sativa
aaaataaattccaacaattaatccacgtggcacacactaattagatttgggcactcaatgattaattataatactttctatttttttattaataattattataaaataagagaaacataacatataaacatcactaaaaaataaaatataccatttattcactatagagatcctttacaaaaaaaacattcaaacactgataatatacatctcttacagtatacaacctaaaactaactagaaacattaatcgcacaaaacttttaaaaataatcttggtgctcgagtgttcttggtgtgctttttatttcttaagtctaaacgacactttggattggagaccaacatagaacttgaccatttcctgccaaaaagaaaaaaaaaataataaaatggatattagaaatcttaataatgaaatgtatcagtgcatttaaaacagcaacatgttaaagttaaataatacctaccatgtttagtgtgtaacatcactactgagcatctcataaaatcagtttccataccttacagatatgacaagactttcttgagctcgtttctttttataagttagttgtggagggacaattagtgatctctagagaattacagttatacacaagattttaagagagaacaatactctaattatagtttcaagtgatctatactactataaacaaaaaataagaaatttcatgatcacttactacattaaaaagaatatgaaatgaggtattctgcttctttatccttctgcaaaataaccacccactaattattaaaaaaaattaaaattaatattaggagacctagtagctaagcttctttttttttcttagttaaatcacatataaatatcaatagataacaaaaatagtagaaaatgaaatcagcatataaaatgaaataacagagataagaaaaactaagtatgcatataacaataatccacttgaaagctaagatttttttttaaaagaaatggttgcctgctttagaagcttttctaaggatgaattccttggaatattagctagctttttggacttaaaactgaaaaaaattatatgcaaaaagaaaccaatatgattaatccaggtaagagtatttgatataaaattgacttcaaaagtgattacttgaaaaatataaaattgacatatactaaataattcacaagacacaacatgaagtggacaaacacgtacatggctgaccactcaaaatcaagcacatactaggcaaataacctttttatctgccccaaagtagattgaagtacaaaaattacaatagaacttaaaatacatcactgaggtatttcactgaacacttgatatacaactcgtcaaaacaccatgagtaatccaattctttcagtacatgccccaaaatttataataatctagaacaataacatttgaatctctttaaaattcacacaaggtaataatatcaagcttatcaatatatatatatatatataaattaactagatcaattttttaatcacaactgtgttcatttagctaaaacaatatatatatatcccctctaaaagtcacaatcagttagaatatcaatttcataaaagtcttattcacctttaggcaatgctctacttattagtacccatggcatagatctccatcacctttctgtcgacctctgtcccacgtcgaacccagccccaataattatcatccccattccccacaaacctacatagaaagatatataaatttttatatatatat

SEQ ID NO: 26306 - DNA, 1120 bp, Cannabis sativa
agcatcagatccatacgaccccctatcgattgataactttttgaggtcaatagtttggtactttcattgagagcgtgaatatcgtatctgatcaaatgccttggttaatacaagaagaaccccaatcgcacaattttcatctttaggtctcccttaatacccatagactgcagatctgaatgctcaggttccaaccacaattggaatcttgatgaacaccgtaaatgtgacaaatcttgtcaccaccaaaggcactacaagcctgaccactacagctggcaaaaatgatacaaacatcctggtggatctgaatcgcaagcccttgcgatcaagggaagacccaccattgatgccctaggaacaacaactggatctcgtctctggtattacgcaagagagataggactaggattttatgagcgtgcgattcgtgagccccatttggactttggagaggatcttgagtaagccagactcagagaagttgtaggccaagccgacctaactgaagaaccaaacactgttgattgcgatatatttgctaggtagagacgcgaattcctaagatggatggatgaccaggagtacatccttcgatctcaccaagtagagttggatcatcacaatagagaggctagtgaactgataaggtggttcaacttgagaatcgatggaagaggccaggatctcatcagagatatcagagatccacttcacggaagactcgttgacagatcagggagggcctaacgacatggtgacaaacttggttccttaggtaataggatagatcttctcctgccagaggaaccgcgacaacacccaaatcccgacaaccgttggcatggggtgccaactagggatctctagctcaatagcatcccctatcattcatcctttcgctcgccagccacttgcatgagaatccttggccagctagaggacaacacttcctccccaaggggagcgaggtggccagaggtcaattttcaaccgataaggaccgggagtaggtggaaacacctaaaaagctgatttgcaaagtgaaattgatcactttaaacacctaggtccaccaaactccaccaattggtgggatctacctcctattaatgcacaa

SEQ ID NO: 26307 - DNA, 4939 bp, Cannabis sativa
  modified_base (3904)..(3911): a, c, t, g, unknown or other
aacatttttatagtagtaaaagtttaattttaataatatatttagaagagatgacatacaaattactcaaaagtttgcatgcaattaatttttttttattatatatcaaatctctttctgggttaggacttgattgtactacaataggtaccaattgaaggaaccccaccaaataaaatactactgatgtcattgggtccttcaactttgtaccttatgtatcttcaatgtgaaccaatagcagcaacattaagtgttgtgatgatcgactcatttatcaaatgttacatccataacaatgttcattatatataaatataaaagaatttcatgtgtcatgttctattatgcttgtggagtccacaagcttgaaataaatgacacatgttactcatcaaaccatacaagttattgcaaaaaaaaaaaaaattcttcttattttaatcatgatggtatatttatctaagtggagaagatctaatggtcacttgtgatttgacttgttggaggattaattcctgattaaatgagatttatccaccggtattaattccattttctctttccttttttctttttttgggttaatgaaaatatagaaactaaaaaaaatgatgttacattacgaatgcatttactcaattaaaataaccctaattatatgctatgtcattcaacaatttataaaacaagacaaatcagaggcatctttttaatgatgtgtgatacacatttgctaaatgatgctacaaaatggatgagtattcgctgctgaatgaatatctctatccgtttactatataaaaattcaataataataatgacagtgtggactgctttatgaagaggtaagaacgtgaaagcgatctataatctggatttatttgtttcacctcctcatgtcttctaaatgattattaatgctctcataggcaggataatttttccaaatagttttggctctaaattttaatcaattaatacacaccgtttaatttgaagagaaaaaagagaagaagtagcagatgaaaactaaactcgacatagaacttcaagtttctaaatgtaaattacacggtttgtagcttttgataaaaggacgaactcaaaaggttgaaacaactagtgtaaggaggctacactaaaaaaaaataggcttcctctttcatttttaggctgaaagactcgggtgatgtcaagcatatgagaaccaaagtctatccatgcaaagttaaaaatattggtaagtcaatctaaattaaaaaattataaaagaactggccttttaacatcgatttttatgtaaaaagtaaagtaaaaagctttagtatctataactataagtaagaaaacaagaaagaaaatcagaaagaaaacagagagaaggataatgtagctatattcactgaattgtcatgaagtgtttacaagtgatgagctagctatatatagcaattgaaatcgattacaagaataacaaacagcagcaactatatctaactaacctctaactctgaagagcttgatactccccctcaaaatgtactataaatgtctcttagccaaatcttgtctttgaaattcttaaattggttgggaaagagaggtttggttaaaatttcagcaagttgatctttagttgatacatgaacagttttgataattctttcttgaatcttttctctaactaagtgacactctatctcaatatatttggtcctttcataaaaaacttgattattaacagctatatgttgagcagatttgttgtcacaatatagcaaggcaggcccttcatgctaaacctttaattcttttaaaatagatattagcctaacaatctcacaagtagtgtttgtcatggctctatattctgcctctaataaggatcttgaaatagtttgttgtttcttgcttttccaagatatgattgagcttcaaatgaatatacagaaccctgtggtagatcttctagtatctggacaagatgcccattccgaatatgtgtaagcatgcaaccttacctctgttttgaagcaaaaaataaaccatgtccaatattcttaacatattgaagcactctttgtgcagcatgcagatgagtaactcgaggtgttgctaagaattagctcaactgattaagtgaataagaaatatatctggcccagtgattattagatattgtagcttgccaacaattcttctgtacaatgtgggtctgtcaatttctcttttacatcttgtccaagcttgagatttgcgtccatggatgtattcattggtttacagcctagatatccaaggtcttcatgcgactgcagagcatagggtctctatgatacaaaaatcccttgttcagaacatgcaacttcaaggcctaaaaaatatttcagatttcccaaattatttagtttgaatctatcattcaatctgattttcaaggcctgaggttcatgcaaattgttgcttgctagaatgacatcatccacatacaccaatagaaaaatgaaaattccattgaagtgtttgatgaataaaaaatggcctattgtagagtgatgaaaacccttatcagttaaggcactagaaaacttagaaaaccattgccttgaggcttttttaggctataaagtgacttttgtaatttggatactgcatttgacggtaatcgccccttaggtctatacccttgaggtagagacatatagacatcttcatggagatctccatgtaaaaaagcatcatttacatccaattgacctcgcttttagtcaacgacaatgagtcaattataaagccattaagaatataatgaaaatagagcaaaagctactaaatgataatgaacaccatattttgaagagcttcagccccattagtgtggtaatagcttactccccttaggttgtattaactcgagaaccaagaatacaatgttttctctctctaagctcttgcaatgaaatctctaagtaattctcttagatctctctctgaagaaattctttagctcccttttatagtgaagctagatcactatttatagggccttaatgcatgagagaaggtttcccttttgcttacaatgtttataataggaaggaacattcattacataaataaaatacccaaaataggggattgagacagcctgtcgtatccatctaattcaatcccacgattgtagggattgtcttcgtgcttggactccacgatatcattctaaagtagtcaagtcatggtagaagttcggaaagccaaacttgcccctattgtggttgtctgtcctttaccatgcttgggtaagtagacgttgtacttgtagatgtgctacttgaagtctattcagaatattaatctccgcccaggtgcaaggaatgttggacatgtgtcactcttatgtgctgccatgtcatagtgtaaaaaatgggataatatttgcccccaagtctgcgcgggacctttatggtcacacgtggacctcactcggtatggatctttatctgaacgggtggcacgtgttcgaagagacggttggtgacttgatgtgactctgacaaaaggtctcttcaattttcgggtcattaatgctgatagacatgtacctcgagccacgccttagaattagcacgtttgacggttaccattttggtaattgaatgctcaatggatactttttagggggaaactgaggtattcaaattttgaaatgattactttgccatactacttagcttataaatagggctgaaatccctaattaaccacttttagccatttttgtttttgaagaatcagaacaagaaatattttcctctctaatccttcaaagaatccccaagaaacaccgatcagtgtcatccgagaaactctaaggcttcaaacagtgagtaagttcttcatnnnnnnnntcttttatgcttgaatatttgattttttgggtttccactgtaacaacttgatagttcttgaatttgttctaggaaaaccgtagaaaatttaggtttaggaatgtgaaatcctgactgtgcttaaccacattgcttgattataactgtgttttgatttgattccatgatattccgtttcactgaaccattcagggcttagtgaaaatcaacccttcattcaaaattttgaaattcttgattgtaaattacttttgttgatccttcgattagacaaggccggttaaaccaatctgtttgtgttcattttcctgaccaaatactcaccttgtgtcctaccttttgtaaattaaccctcgtaagtttttggtaagcgaacatcgtatcgttcaggatcttcttcaacttctgtacgagggtcatcctcgtcttagtgctagtctgtcctcatccggggacgatctttccaattcaagcttcgaagattgggaaataactagcgaacacacaccttctccagaacccgaagtgcaaccccatttttacccttgccagatcgaaggtgaaggctacggacgtttcatctggggctcatgaaagggtggaggcaatatttacagtccaactagacatatattgtccgaccagatacagttgacactttacccttaggtcgtccaaatcctgctgctacaggtacgcccatcgctgcattcattgtaactattgcccgacataccaatcaagctccgtctaggaataggatgattgcacacactaaaccaaaagtgggaaagtcttctctaactgacctacacgtagcttggcttaccacgataccaagtgcggagcaggcccgacctgttgttgaggaggaagacattgagggggacgctaaagtccatgaaatggaggatcagggcgaggtctgtcttgatactccatctgaagctaaggaggaaggtgttgctaggaggttaccctttggtggcttcaatgataatggacaacctgtgtgcgaggccagtgaa

SEQ ID NO: 26308 - DNA, 1270 bp, Cannabis sativa
ttagttcaactttgggttttttcttgcagattgtggaaaccgcattgactttgcaggaagctggatgttttgccgtggttttggaatgtgtgcctgcaccagtggcggctgcagttacttctgctcttaaaattcctaccatcggcattggagctgggcctttctgtagtggacaggttagttagcaacctccattgtgacttggtctgttgcttgacttttgtgtgttaacttgaagatgaagcttgtaagtcttcatatttagaacatgtgaaaacttctgaaatttcaagagcattgcttactgtgaagatcgttagaatttctagtaacataccagaaaagaatggtatagttatgttcttcctcgctatgacttatgtagaaagctttaacttgttattttgcattggttttcttttaaaagttgttatcaatgaataaaggttagaccttaaagcatacacatctctttattctctttctccacacgtaaaattttcatggctattaacttctattgcgctttgatatgttcatgtcctgcaatcactctatctttgtagtggtttcttgccaagaaatctgaggatgaacttcttggtcagatctattatattgtttaaaatggagtcaaattgttgatagatatttttgtctttcttttggaagaatgtctcaccaactatgttctgataaaatggatttatgttaagttttccatctactttgttgcagtcgtagtctcatacttgatgcaaaggaaaaaatcaatttcggtgataatatagttcatgagattgcagtatgttaccatgttcagaagaataaactgttcgattaataatttgcttcaccatcacacattacaggtgctagtttaccatgatctgcttggaatgctacagcacccgcatcatgccaaagtaaaatctcaaaccaagttcatttataactctctgtctttcacaaagcattttactgaagcatgaagcaactcactttttgcaggtcacccctaagttctgtaagcagtttgcgtgtgtaggagatgtcataaacaaagctctcttggagtacaagaaagaagtgactcagggttgcttccctggtcctgcgcacaccccatacaaaatcaattctgcttatgttggggatttctcaaatgagttgcaaaaattgggtttggacaaggcagcatcagcagcagctgaagctgctgaggatattaaatcacatagtgaaggcagcccaaaaagtgagtagaatc

SEQ ID NO: 26309 - DNA, 3303 bp, Cannabis sativa
gctagggatttcatctcaagaatcaagattgaatgtggatcaattctaaacaaaggagattatcatttcaagaatgagtttccattatggtggaacaatgtgtgagttcgagggtggttgggatttagaatcatacaaagtgaaaggaaaaatacaagaacggaatcataaagaagtggggattagggagtaaacaactaaagaaacaatctctagaagaagactcaaaatagaatggaagcaaattgagattgaagaagaaagaaacagtgaagtcagcaaatgggccagagaaggggatgcaaacttaaagctattccattagttgttgagtgctagggatttcctctcaagaatcgagactgaatgcggatcaattctaaacaaaggagattatcgatccctagagtgggtaatgacaggaattgagtggaaaaaattacccgagtttctctcctgtaatatgctctcttctctctttcttttgagcgggaaagtcatgcatgtccctagctttcatcgtcccaatggacatggaagaggcatgatggccctaatggctggggaaagatatatccttaaactccactggttttggatataaaaatcgttcaagatttgatggttgtaatagtcaccaacactactggagttttagaacacaacgtaaggtgttcatgctcaccttaacaaagcatggaggatccattagaatatacgaaatgactagattgaccgatttcgcatgctggccctactggctaggggaagatatctatctttaaaccccactggttttaattataaaaatcgtttttttttatggctgtaatagtcaccaacactactgtagttttagaacacatcataaggtgttcatgctcacgttatcaatagcatggagggtcgatcaaaatatgcaaaatgactagattgatcggctacgagatcaccataaccattgattcaacggcttggttatatgaaacaatggaagaatttcattaaaaaagggagcagcttgggaagagcttaaaaaaatctcaggataatttgtcagtttatgtagagtttctagaatagaaagggagtgttcgtacttcgtaaaggatgggagtgttaatgctgaaaaatatcaaaatgacagttggttattatacctgaagaaagagactcaaacggaagagctttttagtaactgtttgtttggaatagtggagtaaaaacttgggaaaagactagtcgaaaaagtagtatgatgagaagatcaggcaaaggaaagaggatgcaacaaacttaggcaaacgtggtgaaaaaataattgaaaccacaagaaaaaaaaaggaattgcagaaactatccaggtgtgaagaaacagagtcgagaaacttggaagatgggagtgcttacctgaaattaatttagcatttggacgaaagaatttttaccttgaaagaagaattaagcagaagttctatgaatatatgcaagaaaaaaagaactcataggagtggagaactgggaaagagattggaggtcagcgaaatgtttgatgatagaatactaaaacattaatattgtgttgaggaggaaaaggaaagactgttagatgacggttcctggatattacggttgattgtagaggctcctggattggtgttgaaagccttccctagaatttatggaatatgtaaactcttaaggaaaataggagctatgtgtggtggacaattagctattgaaggagactggctagatgaatattttgcatcatttaagaatttaaattggagggagatgatcaaggctttgtacctaaatatttattttagcttatgtaataagtgttctagattcagaagagtcttggaaactttatggggctgaatggagcccaaagattcattttggatccaagtttaacaggccctctaatgattagaagtcataataatactccacttaaggaaattatgggcttaagtgaattagttgtagggcttgaagttaagcccatggacaactagtcaacttatgaagtggtggattcaatttcaatagttaagacctttgtgggagaaattttaaaaaataagaccgaaggatcaggagaattttaagtaggcaatgattaatttctggaacgagattgagagggggagtaaatcaaacaacagtaataaagagctagatgtgaagaattaaaactagaggaaagtgggaaagtggacacaatattggaagtatatagccagaaaagtaaaaaagtcaaatctgatggaaaatatgattgaagaatcgaataagttagaagaaagtcaagaaaatgactttcccatcactagggagatctggtggaacatttgtagtttggattttaaatgataggagggagttgaaggatttaaaatgaacattctatcttgtaatgtgaggggtgaggcagtggagaaaaggagagcgattaaagtaaccatttgtaaaattatcccagatttaattgtggatacaagaataattaaggttatagagtcgttattaagagaattctctgtttcagttttgatcggggcagtaggaaagatgccatcgagacagtattagagtatatatggtctaagtaaacatagactttacaagagtatatgatctaagtaaatatagagacaaggaatgttttgggatgagtaacttggactaagtttgatatgaggctccttgatgagctagttagaaaattgaggataattgatcccaagttgaataatggattcgcaaggtcaaattttagacgaaaccccagcaagtgaaatgagttgtttccttactgcatacaagatgttcatgtgagaattgtgtcagatcacagccccattgttctcgattcgaattcgccatcgtggggaccttttgcgtttcagtttgacaagatgtggttgaaacacaagaatttcaagaatgagtttcccttgtggtgtagtgtgcgagttcggtgaatgggttttagatacatggagaaactacaacgaaggaaaaataaaagaacggagtcagaaagaagaggggggagtaaacaactaaaaagcaatcactagaaggacgggtgtctatgctagacagaatggaggaacgaggtgagtggaattcacagttaatggaagaaagaaggctcaaaatagaatggcagcaaattgtgattgaagaagaaagatttggctgaagtcaagctgcaaatgggtcaatgaaggggatgcaaactcaaagctattccatgagttcttgagtattaagaatttcttttca

SEQ ID NO: 26310 - DNA, 4331 bp, Cannabis sativa
agaattgccaagacttgaatatatggaccatcaagtgaggaggaagatatatgtaccttttgattaagctatatatatattaatcaaaatagctttcggttaagtaatgacattaatttttgtccaagtgattttgtgtttaaagttgcctatgattggagaaaatttgtatgttgaaaacaaaatagagtcccggcctgttatatttatatctaatatctaatagacaaaaaagctttcatactttcaaatgtcggggactgcccagtgcccatgatcatcacattcacatatacataaacttaattatacagaagaaaaataaaatagtaataaatatattttatatatactttgttattttaatacaaaattatagtttcccttattgaaccacataaggtggaaagatagtgggaaaataatgtcaataggctatggcatatatttaatagggtggtggtggtgatcagcaaattacaacaagactcttgcattgatcacttgatatgattgggaagattaaaaaacaatattaaaactacttaatactttgaggtcatcataacgagggctacaataacataccaaaatatggtaaataaaaatagcaactttgttcagctacttgagattaattaagattgccaaaatggacatcttaataatggtaaatgttattgtaattatgtaccatgtatatctataatactaaaatcgatcttgtaataaattttaaattggattttatatgtttgatgtcactaagaaataattattatttatttagttttgcttgacagattgtcactttcaaatagcttataatattatgttcgatgtgattttaaaaagaaaaaaaaaaacttataaatacaaattatattaaatgacgatatgacataaaaatgaaattacattttggaagtatttgtaggacggcactaataggcctctttttttttttttaccctttggaaaatcaaaaaatgaataataggcatttttttaagtttttgatttacgctacctagtcatgagagaacaaaatgtaatttaaagttttaaacgtaaaaggggaaatatgcatgtatttatttaagcaaaagtatagagcaatcaatggtggcaattctatttgttaataatttatgcatttgtccaacttatgtggtttttatgtttaaatataacaacttctataaagtcaattggttgacctttttcctcctagacaaacacaacattcatataaagatatagaaacataaagagttgaacaaaagaataatgattaggggaggctaaactaaattacttaaactatgtcatttagttgataagaatgtttaatttcaaaataaattacatttgagctatgacttcaccaaccctccactccacttcatttaattattggctaagaaaaactaataatattttactaataaacaaatcatgaaataattggcgataaaagaaaaactaatcatgattctgatttggtatcattacttgaaatacacgatttcatttgtgtaagctccacgtaaaagaaattaacactttaaagcatgggcttgcaggcccagttcgattagcaacgtttataatggctggggtcgacctttagaacccttttttgaagcccaataaaatatctaaaaactgaaatttatacatatagtttgcagttttaaatttagaagtattttttaatgaacttgcaattttaccattttcaaacgaggagtactaccgtcaacttccatacccgagaacacatgccggatttttttttcagttttttttcatggtggtatttgttataacatcatccatgtaaattttaaattttttttgaatagtttatagtgccgaaaatatgtttgaagctttctgaacactggtaaactgaaatatcagaaactctactttcgacattataaattatttatatttttttaaaaatttacaggaataatactaaaattataacaaatattgccataaaaagattcgaaaaaaaaaatcgcgcgagcatgtgatttagagcataaaaattgactaaaaagttataattaaaggtacttgtaattagaactttctttctaaagagattatattaacaaagttttagttttgaatttatttaagtcaaccaatatttttcaaacttaatacagtagaacctctatccaagaatacacttaggagcaagaaaataatattttaattgagcggttataactaaatagagttacacttaaaaaaaaaatcaaaatataaaaaaatatcaatgtaacaaaaataccaataaacaattcttaatactatattacattaaaataattttcgagtacatataatatttatagatgtactataatttgaaataaattattaattctacataaataaatttataaaatatttgtatatattattttaagatgtaattatttttatatattttattaatacgagacttaaaaaatgtataactaattacaatatagaggttattcttatttataactgaaaattattactaaaaattatttggaaacaactgttaataccttgttaaggacttatttagattttttttttctctttttacttctgttaattaacactatgttcggcctagtggtttttggaaattaagatggagattaataagggtggcagaaacaattaataaagataatatgagaatttaccatctaaataatcctttaaaacgaatccttctaaattggaggatgagagagaaggaaactaatacatagaaattgcataaacattcttaaaaaaaaaatcaaataatattattttaattttgtatacaacctttctatttttttcttctgaataccaaaaaccgtagagaggtcatatggtttattatattctccaagcatcatagtaatttatctctaagctagtaacatctagctagatatggtaaatctatagacactgcatttctaaactaggggctaactctaatactgaatgaatgtagaggttctatccaagtggatgataaatatttagaattatattatcacaaatttaaggtgatttattgttttattatgcaggctgaatcagtttgcaatgaaactcaagttcaacagaaaatgtggctgtttgacttgtttttccaatattccattctttttaatcagtgttgaatgttgatgcaaattgaaaatgccaccattaagcatcttaaggattggaaatctgtcaatattatgatagcaacaagtccaaaaaccttatggagaggttgatctatgactaagttagaattttaattaggctgcaatagtttgctacttaaccatgggatggaatttcaaaggtcattttatctagtctgctaaggggcacagagttatgggctgcggttattatatatagcttggattttgatataatttggaaacgattatgtctatttttaatttatggaattgtagtactaagctgtgttttagtgttcttatagtatcaaattggtcggcacaagttttggaagcttataactgaaaacagtgatgattaagatctgtattataaatggttgatattgctacaattacaatcttgcagttgaatctaaatataattatatatacagagaattatattttttttctcaaattattattttggtccatttactttcacatcattaaaatgactaagaattaaattaatttgaaatcaaatttacccttaatccgattgatgaatcaaaattaaaataagttgtttacttgacttgtgggattcaaaatcaaaataaacaatattctcattgatatgtttacattattttggaattataataaattattttaagttacaaaaatacaattaccaaaaatttatttagatttttattttaattttcttttaatgaaaataattaaaagagagtaaaaatgatatttcataattttcaaaaaaatgagtgacaatcacactacccttataagattgctaatctgattctttagtctcaaattaatgcgagactcacatattttattctctttccttaagaaaattaaacaagataataaattacaatttttattctattcattctcatatctgataagtaaacacttccttttctactaatatcaatctaaattaatattgtttattataaattcatatatgatatatttttttttaaaaaaagaaaatataatctaattttcaattaaatatatgtaatttagcacgtaatattcatatattttacagtcaattaattttaactttaactccaattaaaagattta

SEQ ID NO: 26311 - DNA, 3488 bp, Cannabis sativa
ttttttttttttttaatttgtttgttatttttttttttgaataattaatttgtttgttattaaaaagaaagaaagaacatgttaaaaaaaaaaaagaaagaaagaaagaaactactacacatgtgacaatcccttttcaaatcagcttttatttttttttttaaaaaaataataaaacaaaacacattctacaaatggtataaaggagaaagataaacaatttcttactgtacagagaatgcagtattaaaaatataattttaagtgtgtaagagtataaatgaatctttttttttttacaaaaaaaaaaaaagcagtatctaatgtaaatttccctttaagtaatgatctttcaagaaaatgagttttttattttttttttcttgatggaggaagaagagattagattggctctgcgattagtgcacatttgtacacttattcctagtcatttattagatgatttagtatatatttcttaaatatttgtatagatttgaagtgttttctctctatgtgtgtaggtttgtgcttaaaagacaaatttatgatagagtgatatctttgagccaattattgataatgttttcatcatattctctaatagcttatcaaatccaaaatgataaagatcgttcttgtctttttcaaaatacattaaataatctcattttggagtctggatgcttaagttattcatattttattgagcaaggtcagaatagtcacgttctaggtgaaatgtcgcatgagcttgcggtcaccagtataggccccgagataatagaagccccccgagacattttttctcgcatgaacggctttgacagagtaaaagcaagctatctccagaggagtagggcactcccagcctaagatgtggtacataaccttgaggctcgcaaggatcatgtaggaagtgggattctgctggaatggggcgactccgagatagttgcagtaatccttaaagtaatccctaaggggaagaatcgctctagcttgatatgctcaaggctccaagctccaatccctgaggagttactagtgctgggaccattgcactcctcgcgtattatcctttctggaggataacagttgaattccccaggtttcatagacctaataacacaccctttctattgcttaatgctgcaagacggaaggatgccaccaatataggccccaatagacctaatcttggactcaataagttctgcctcgaatgtaacattgggaacctgaggggtctttgatttgtggggcttaggaggaatgatttcaaactcaaggtcacctggttcaaatgcaatagtgacgttggtaaaaacattgatcttgcaagtggaatagaatataaacacaagggttcaggccaggcatcgtctcgcaaaaagcgatgcttgccctcagaaatttcttgcaagaaccgcctataaggattgacagtctcttcttggttcgacttaatcaaatgatctctaatcttgacatcctttatttccaatttggattgaagttcaaagtttctggttttatatgggcaagctatatgtttgggacatttcgatattgcagattctggagaataaatttttgaactagattgggacatctttacaaaagaaagacaatcctaatttctagatgaagtttatcaaaccagaggcttgaggaatatgataaacctaaactatggctaaaccctaaaaatcacccagaagatacaaaccctaattgctaaaccaaacgaagtaatgggatgtaagacaagccataactcaaataaaagcaaaatgagaacgagatacttactatacgaaatcaaaaagtcagaagctggagatttttacagatggagacgtgatggccggcgggataagttttttgaacaccgggattcgaaaagcaagtctgaataatttcgtaggaagaatgtcaaagataaggatggcatgcacgcgttcagagagctcgagtggaagtttcagaaagctcaagtttttggagaagattaaaatggtagaaaatttgattcttaccgttttataccttgtatttttcaaccatcagatcataatatggaagatctaatggatgagaatagaatggaagtggaaaagacagcccattaatgctattgatgtgtatcagaaccataaaactgtcaaaatcaaagacatgcattttttcaaaagaaattatgacaaatataccttctgtaatcattaaaaagcacttttttattaaaaatgaactttttaaggggcaattgttatacccaaaattcagctatcacttcagaggaggacacatctcaaactgggaagaatacgaatcaataaatgtattgataattacatttcaaaatggaataacttattaagtgcggaagtgacagagtatatttacaacttgctgactataaggtcttacagaagataacgatatacaaattgttgtctcgtgcgttaacgagaaaccatacgacattggatgtgcaaggcgaggcatcaacctcgttacgcatgaagagacgtaggcgagatataatgattgttaagacacttagcgtataatacacagtatacaaactaagtataacagtcgggaaaacccaaacaactaatagcgagacgtccattttgctataggaaggcacgctcgtggtaccttcactaattagcttcagacatctttcagtgagatttacagctccgtcgagtcagttctctcggatagaagctgacattcaaatgatgttggctgttgaagttcaccttgtcgccaagaactgcggttgttagatggagcattatgtcttctagcgtagaagcgacaagatttacattattaacctcaaaaagatgtgggaaaagctctagctcgctactatggttattattgctatgttcccaacgagatgtcccagaacgatacgatttgcaacgtatttaatacacgtttacattgatccaatacaagtggatcaatcgcagctgtgtgattttaagatattaactgcacttattttacatgggatgtacctttcaggggataattgttgtaaaacatcagtcaacactataattaaccgccctcctatgtaattataaatcggggcaggttgtactgaaaaagggacgaaaaaatcattaaggaaaaaggcttgagaattgtatcaaaaatctaataagatttactcgtggattatgcagaattttaactacaaaaccacgtaaaaacatttgtgttctattcttttctttaccaatttttattttctgtgtaagtttatcactacttaggctcaaatatagttaacgaaaatctgcattaacaatcttctaagaaaacaagactcataaggttttttaattttctcacttgatgggccgagaaaaagagattagattgtcgtttgtttcttggtgatcgctactaatatataacctcatagctagattattaattttaagtatttctaa

SEQ ID NO: 26312 - DNA, 2351 bp, Cannabis sativa
ctaaaatttagtgtaaatttatcacataaatactttttgtgttaaatatagcatcatttataacaatactctaaataactatatgcataaaaaaaaatattaaatttcccgttcggtttagagagcaccgtaccagagaattttcacttactatttgtaagcattaatatactgcaattactacatttgctgggctccataatttattgagtagcagttagataccatctgaatttatggccatattgatttttccaacgccgtagtttatattaaaaccatttttttttaattaatagcagcttaccatccccacatgaagattgaaatatgatatttaacattgggatttgggaaaaattaatgaaagaaaatcactaatgaattaagaatagctcttcttttggtctactcaactcatggctctcgttacaagttatgcacattgtctcaactccaatccaagtataataacattgtctcaacttcaatccaaatatcaatttttttttttttttttgcaaagaagtatcaaaactttttatttcttttattttatctttttaggagggctgacaatgactacttcaaaattaattctgaaatcttaattaatatataaatgtttgtattatatttgttgtggcttaataaaatttgctgtgacttaatagattatttttaaaaactctgtgaaaactaacgaaattattcataccttttgtcaaagtatatcttgcaaaattcctttttttttgagcgctgaaagcaatctctcatttttatcttacactttctagtcatctatagcatcattttatatattggactattttgaagagaaagtttcataagaacatattaactttcctttattagcatcaagctatttataatcaagaaattacctacactcaagtttttcttttcattaaaatttcttctcttactagattgatttaattatgtttaatcaagtgagattaagtgcaataaatgtacgttcaatttttttaattaatgtatttttttttattttttaatttttaaaataggatttaagatttttaatctttgagaattttttttagctattgcggttacgttgatctgctctttagatatgattatatatacgtattttatatgtacaataatagaataaaagaataaatttcattgttatatgtattttgtattgatctctaaggattatattaaaatatattttgacaaaatttgagtttgattagaaaattaattactttcaaaatatatgtttttaagaaaaaacttgtgcttcaatagaatacacagataaagtacaaagcaaacaagttacatggaaggtaaatgaccattccacaccaactcatcatctagtcctaatcctaatttagcaaccttatgagccaactgattagaatccatgtacacatgaacagttttaagactaggacgaaaagataacaagtttttgatactaagtaaaatatcatccagtagactatcattccaattacaagaattaagtttgtcaacaatagttttacaatcaatttttaaaacatccactggaaggtgaagtaattgaatccattgaatagcatgaagaattgcctttgcttcagctatgacagtaggaacacttccaacacaaggcttagatatctcagctttaaccctgtctaacccatccaaacacaacaatgccaaagctatgtttccatctatgatgaccaatggcagcattaatgaaaacctacaaagtaccctccagagaagcctccaaagaccagttttgcaaaggatctgatgcacttggatgggggttgtattttgtgcatccaaatattttaaaaaataactaacacaccaatcaaagatgtcagaagctggaataacattgtgatgatgaagataattgttcttttgcttccaaagagtccataaaaaacagaataaaatattaactgtaacaccctaactattttaggcatgttagcgtgatttttaacgtactgtgcagctcattgctaaccaacgaggttatcgtaaatcgtgattaattaaaacttttcttatttaattaaaaacataaaataatatacatataaaattttgggatcccgtttacaaaaaaatatttacaaaagtttaactatgcatatacaatagtcagtcgcctaacgactatacatcaaaagccctgatgtcccaaagatcgtaagctccaggcctaatcggcccgacatgtaccatctccatctgctcgctctcacggttattcagccttagccttgcccttaccaacacatggaaatagcaactgtgagtcaacaaactcagta

SEQ ID NO: 26313 - DNA, 3336 bp, Cannabis sativa
tttttttgtatttttacgtaattttacttggaaactattataataactaacgaaacaacttaaattgcagctaaaatctgtataacaatccgcatagaaactatcgggaaaacccaaaccgtaaatttaaaaaaaaattaaaaaataatatataaactaatttccataataataataataaaaagcttaatatagagaatttagttgcaattatctatatagaatgaaaagatatttaccaaaagggtgtttctatgttattttaaaggtgtaacgcttcaataaaagaaagtgtcttttatattaatttggatagagaaaatgtaactcggatatagtatacaaaaatattattactttaaaatggtgtgaaatttgtcggaggataaaaattatattttgtaaggatgggcagtttatatattgtattattattaagcattatcttatgtaaagtaatgtaatttattttaatatccattgaataaataattaatatcttagatcgacagacattctgttcatatttttgttctttctatataggctgaatagaagcttgtaatttttgtccccacatacaattattttgtgccaaataattttcatactcatatatatacttatattacttttttttttaatggaaaatgtgatattattaaccaacaaatcggtaagaacagattccataccgaaacgacgaccagaaaataccaagatgtatattacaggaatatttttgatgatcggaaccttaaactcaaaaaattactgtttataaaataataaaaatattaattaattaggggggtatgatatacaatggggttaatggcataattaatgctaattaggaaggatgttgttgttattattaaataactatataattaattagatataattagaggtaccacaacttttcaaaattatgctattttccattatatatcaattattcacttattttttttaatatatataaattataaatcagaaattcttagatgtttcaaagtactttatataatcttctaatcttttctttaatgagtgaggaaatgtgtatggcattataattagaaaaatatatcatattatgttaatttacataaattaatagactgatcaaaagccaaacacaacaccaatattatattccattattaacacatttggcactacaagatatcgaataaagaacatttattctccatacagaataataatatgatattaaattatatatataaaaacaaaacaaaaaagtacttctgacactacaagaagaaacctagccaaaaaaagaaacaactttaactcatggtatgagttattattattaaacactcaaacacaaatgatgaaaaagatgattattattcttgtatacatatgagatatattgtgatatatatatatatatctatatatatataagtagccacaccagtccctcatcaagcttcaccccttgaaatgatttttcagaacttcaagtgttgctctccggcaagtgatatatatatatcgattggaaccatacatatgcagagacgaattaatcaaaatgaaagaatatcaacacactttttcaaatccatatgttttcatcattccaaattccaatcatgaacctttgagctttgatttttttcctcatcactagtcaccatttttttttcatcccaaaagttattcctgcacaaaatccaaattacaatagttacattttattagttatatatatatatatatatagttatattatatattaatatgattttttgttttaatacattaataatatagagatagtagatagactcactttttaagctgatctgaagagttccaagttgatgtgattaactccattgtctatacatcccaaaaaaaaatataatttttttaatttatatatacacatttttaatttgaataaagtttctttttttttttgaaaggagtacttactgcttgctggggtttcggatacaaaaaagcaggctccaatgacaacatagcatagcaaaagaacaaggcccttcaagtagtgagaagttccatcctataatataaaaagtaatattaatatataacactaatattatatatacatgactgagaaaaaataaaaatataattaattaattaattacttgtagagtaaaagctgtgacaattatagctatggcaagagaactggtttcaaggagattaaagttgagatccatcttaattcccataatccaagaaacaacaacacacaatgggacctgaaagagagtaattcatacatatatatatatatttatatttaaaatgaaaataatttatttaattaataaactacaaatagtactataataattatgagatatatatgttcataccacaaatagggcaatttgagtagctgatcctaatgcaacacccaatgtaatatcctgcatttttttaatataataataataataattagtattaatatagataaacattgatattataataattaagtataaagtatagtactgaccaacttgtttttgaaagcaaagataacagcaccagcatgttcagctgcgtttccaacaattggtagcaaaattatgcttagaaagcttactgacagaccccaagtgtccgatgcatcctataattaatattaattaattaataattagtaaatgtgatgccataaatagaatattagtgatgaaaacgacgtagttttattattaattaattaattaattacctcaattgtttgtactacatactcggacaacaaagcaatgactagagtcattccagctagccaaacaaatccacttgcaaatccaatcactgcctcttcttccgatgaattctcaccctccctttcatcctgatcatcgtaactttcattaactattcgggaaatttgacaatctcaatagtttaattaggagaatttttaacggcgaaaaaaagtaaaaaaatcataatttgttatttgagggagaaaaaattataccctcacgctgtacttgtcacgtcaaataatctaatttaattatttgacatcatcatcatcatcatcacaaaaatgagatgtacagaaaagtaagtcctaataattttcttcatttttactgttgtggaccacaaaatgtactagctagctagcagttaagctataaattgactatatatttatattttgttaaaaattcatagtcataaaaattagtactggcggaaccaaatgggtacaaagttgaaaaataagagcttttaattaattttggctgtgatgaaagtgaaatttttagttttattatgtaa

SEQ ID NO: 26314 - DNA, 1067 bp, Cannabis sativa
tataccttataacccataaaaaaaataaaaaaaggaaaaataatcccataatatgttgtcttaacaaagttctaataatttttctaaaatataataaaaaaatgatgagaagaagatgactatataatgtggttcaattggagattccaaatgacaaggactaaataaatgcggtcaatactagctggcacggtttttcatttcctcattattctaatgcttttcccgaattttctgaatagaaatgtcatgctttctctagctgaacttgattatatattctaatacaatatttatccatcaatgattgtacttgaggcatcaactaaagaccaataaatcattccaaaaataaaatgtaaacagagaaagaagagaacaatgaataattaggtggatccctagagtggaacccaattctttagtgtgtgtgtgtggtgagatcacataagtgacaaatataatcagaaatcaaaacaggacaatgaaatagcaacaccaacaccattcaaatcaagaatggatccaaaataaaaatcacttgccttgtcgaaggtatttcttgaaacatggatcctaagcaaaagaaagcaattgtaagtctagtattttatttttccatccaaccccagagaaatatacaataattacaattgcgtacagagattttctgctagagggattcgtgaattgagatgagtagtgatcaattttacagattatacaaaacaaacaagacgagatggtaacaaagaacttatgagccaagcagcttcttccatctggcatatcctaaaacaagtaagaaaagtaatagagaacctgcagtaatacctccaacaaagagctcaaatatcccctccgtttcgtacaaagtacagggaatgttcataccgaacattcccgcgatcagagtttcgactgctatggcaaatgacgcaattgttaatgtcaactggagctgaatgagttcatttcgctggttgtctagttgaatgttgacgtagtcttctgtgtcatcaatgtactcacggacctgcaacccaatgaagaatttagtacaaaaa

SEQ ID NO: 26315 - DNA, 2069 bp, Cannabis sativa
tggcgaggaagaagacctggtcgtatttaggtctgttacttttgtcatcctaagttgaaacggtgcgtttcattaaatggttcggtttcataactgcgctagcaaaactttattccccctaaaaccaatccccatgtgggaatttatccccaaattttgttacttttttcagcatttatgcgctggtaaaactttaaattccctgttaaaactatttcatagagggaaatttctcaccaattttttttcaccttttgcaagtgcaaatacctgccaaaatgggatgcgccttttggcagttcccactaagtcttttgtcggtgcaataagctaaatgatagcttcggtactttatttattcacctcaaaaccaaagattacaattagctaaaaagaagaataaatttattacaaaaatttaactaatgatttacaattaagctacctgtttatctaacataacaattggttagttacttaatttggttaacacgcatatcatcttggaaatatatttgtatagtgtattgcaacaaataatcgatctataattaatagttctagaaggcttatcattctcgggaattaaagagagtaatagcattatacttatttatttatttattttttttgatttaaaattgatttttgatatttatcttctgtttattaacaagttgaaaattccaaccggaaaaactcaaccattaatttcaaggcttacctatttattgaccgtattcttctagtgtttaatttggctatgaagcatgcctatacgatctagatttatcacaatacacactataacataattataattataattaacaagacaaaaaaaaaattatatattagtacattaaaaaatgctactatatttttattttaatatacccatttgtttttaaaaaataactctagatcatataatacatcacgtaggaaagttattacaaggtaaacaaaacgtgacatatataaatatatatatatttatataaatcagccgttatagcttcctttaaccctttttcttttctcactacttattatactagttttgatcatctcaaacttggaactatttttgataatatcatggtaagagatcgaaattacggtcatgacgaataagaagactaaacgtgggttaattttattggtctaaataatcagtgaaaaattgattgattgcttaattaattatagctaggttggtggacgaaattttagttctagagattacgcggaattggtgtcgtaaacacgtaaacgcgttgctattccttatctggattattagattttgcatgatacttggccagttcagttgattatcatcccggaatcaattacggttacttcgaatatatatacatgtagtataacaatttttgtcaaataaggataaagataatagtaaaattagtctgatcaattaatcattctctttataatttttagttgtcacgtacgtatatatatagaaagttcatataaaagatatatcataacagctttgctgactgatgattcccaattcccaaacacacatgcaaatattacgataaagatatgtaaaaagttacaccaaaatattaatctaaacaatatcatgctatatatatgatcaaataagattttttgtgggaggaatttagataacactaaatttatcaagtacttacataaaatagtgagtactcaaataatataatataagctattgtagaaaagataaaaaatatggtggttcaacaagagtttcgagctcagcctaatttacagttgagaaaagatctttgactctgtcttttatttagatcagctgttataatatatagtttaattataatgagaccgttacaacttaaaataataatttaaataattgaagcagctataaaataaatataacgttttaatgacacttgaataatgcttgatcgttaattttgttgatcgatgtgttcgcgcttgctattgggcaccagtggtgcctagcaccttctagatgtgtcgccttgcaattggttagcgatactccataaaaattattatattaa

SEQ ID NO: 26316 - DNA, 2276 bp, Cannabis sativa
attaacctgtaaaaagtttgaaagcagttggaacactcctcctttgtgtaacccaaaaaacatcctctttctttgtcatatacaacccaggatccacaattattggtttcgctcgttggtacctgaaaaaataacattataaaatcaaacaaaacaaatttacccaaaaaaataattgaaaagaacagatctttttttccacatactctttccacccaatgttgctggtatgatcaatgaaattaagatcgcggggcaagtaagaaaacgtgtgtaacagatctgataaagccaaagaaaccaaattaatcaaccaatcaaaattcaaaaagtcaaaataaaaaaaacccaaattcaaaaaatcaatacccaccgtcctgagtaacgagcgggtaatcagaagcactaagattaataaaccaatcccaatcgccaccttccttcaacaaaatcgcagcagcatgaagagtattagcaaccatagtaggtccccgataggtcacgagattcgccttagtaatcatcctcacattcccaaatttcttaaaagtcggatggtcgttaacataattctgcagatccaatctctcctgaggcggagactcaaggtcaagatgcacaacataactattccgagggtggtatagggcttcaagtgtccgtttaagcattttcccatctccattagaaccagaaacgagataagcaaagcgcggcggtggaggaagattagataccggaacaggtttaagctttgattcaacgaatacagaactgtaagccgtaaacgatcgataaaagggaagcaaaggcgtaccgtccgatgaagttaaagtggtaaggaatagaaggaagagagagacaattgaacctatcgctaatggaaagatccattttcgttcaatgctttgtggttgcctcagatgcatgtaatagctcttcagcttcttcatcttctctctctttctctctctaaatctcttccactatagactgaactcttctttccttatcataagcttgtagaactctctctggtttgggttgtttgtttctcgagaaaatggaaaagaaagaaaatcaaaatgatttgatttaattacttatttatataaataataattataataattcgaaatcagtattttcattcttcacctgagattttgagaatttttgagttaggtgtagatggttattcatctggccttggcttataaatacttcaaatttatttttttatttttttattatggaaagttttatttttatttttattaatttgatgatgattttgtaagttttgaaaacctttttttgggaaatggaaagtatatttagtctcgccgtgacaataggggtaggaattgtaatgtaatgaataagttagctcaaccaaaatttagttttgtattaagcaaaattaatgaagctaccaattaaagagcaataaatatttgagtgtgcttatcatgcctaagaacaagaaaaaagaaaagttgacctaatacttgatattgaacattttctaatcaagaaaagaaatgctaaagagtattgttaggcggcattaaggtgtctagtatttctgtaaaatgatactttataattggttagcggtttttaataaattttattaaagtaaaatatgtagaactcgatattaaattacactaatagtaatattccactggtattaggtattataagtgtcctttagctaaaaggtagatgtatcatatcgagtattttattagatactagagatgacgctttgtaattaattagcaatgttttataaaaattattatattaaattatacataaaacatgatgtttaattacacgataagaatatgatactttagagaatattaggcagtacttttatcttttagtattatatcattattaatctaattaagtattaaattttccataatttaattttataactattatatataataataccactaaacattcacaaaaactagtgtcttatattaataacctttctaattttatcttgtatagatcaagagtcagccaaaaaaaaaaatagaatctttattaggattcatttgtatgggattatgagaagagaaaaataggatatgttcatcatatatattttctttttaaaaaaatacgatatgaaaattgcttttttaaaaaaaataaaataaaaaatcataaaaggtttttacttttttttttttttgtgaaatgtttaaaattgttacttgataattcaaatatgtgacatttaaaaa

SEQ ID NO: 26317 - DNA, 4537 bp, Cannabis sativa
  modified_base (1545)..(1546): a, c, t, g, unknown or other
aataaaatataatatattttaatattaaacaatatatataaacaaaaataagctattaaatattaataataataattaaaaaaaaaagatgcagtttctacagtgctactgcatatatgcagtgcactgcagcaaaaactgcatatatgatgtaatgatgctgctacgttggagaagattacccactgcaaccttaaatttgaaggctctttggagttgctcttaaggtagtttttacacataactgaaaaaatgtttttttgaatataaataaaaatatttgagatctttgtaaaaaaaaaaattagaaacaaaattactaaaaaaaattgagaagaacaaaatgttattttctatcatctcccttttaaattattttatttcactaatgatcctttaaaaatttataatttttattaaagtatttatttccagtaacattaaacaaatattttttgttgagaaaaatttcttgcaatatatttaagaggagtattaattacaacctcttattacaatcttttagtcaacctctacgttcaaaattacatgcggatatatttttttgaaattttttttcatagaggtattcgttatagttacagtatcatctttataaatttttaaaaaattcagaataatttgtagtaccaaaattagagttcttgatattctagtttaccacacgtgttcaaaaaacttcaaatgtattttcaacactgtaaactaatcgaaatttttcaaaaaaattatactcatataatataatatgttagagagtgctacaaacactatttttggcttttaatatttattttattaaattaaatgagacttaagaattaattgatccatacctattagagggtgctaggtgccttttagcatttattttttattttaaaaaaaaatgacaaaaataccaaatatagtgtaaattttaaaaattcttttagtttcaaacgactgtcgttttctgtgttcctgggtcattttcgcggaaatatctcagttattgcattgcaggaccttatatgaagacaacgacattaatcatgatgcctacccaatgcccatttgtcgtaattggattcaattcaataactgtgtctgtaagatctgtgtggggctaagatttgagtggttgagttgtgtataacaataaagaatattctcaactttggttgaggtagttaatatagacaacacaacaactttataatttgatcaatcatatcataattcataacacaatcttatgcataaaacatcctccccataataactaaaacaatattcatacagtaattgttcaatcaaactcaaagcttgtagtttaagtaactttttggtcacttggaaatggcttgagttccaggaggaatgtctactgttttatcctgataattcttcccttgttgttgagcaaggattccattccatcctacaacagaaaaaaaaaatagattcttttgttagagaaattgaacactgattacaagaattgaagtgcattatatagtgatatacatatatatatatatnnatatatgtgtgtgtgtgtgtttaccaagagcagggtcaagtcctctgattttgagctctctgtattcttgacaaagagaacagcaggggcaaaagacatgagagataacatctgtatatggagcttcaactagatcatattttgtccttagctttgttctatattttgatcccattatccattgagaacacaaggcaggcatcatcaataagtatatgaagcttcccaaatggcaagctatacagtagcaaattattgaacagatcagttaaaacctcatttgtaaaaagaaaaaacattgagaaagaggaagagaatttacccatttctccttcatctagtacttctgcaatctgtccaaatgtcacacaaggtaaaaaagatgtcataacagctgccataataaaaccagaaattctataatcagatttgtttctttggcaaagattgatgacattgacataacaaaattcccatattaaaattgtatgtaagcaacatttaagttttagtctcattagttaagttcttttgtttaaaacttgatggacaagaaaataaatttaccatttgtctgattttcatagcaatcaaacagtcctgtggtccatggttttccaagaggctggttctggtttggatgaaaatttggagccactgagccaatgggttcagccgtttgctgaacttccttcctctcaatctcttcgatttgacccatttgatcacttgcactattcatgtgtagcttattcttttatacagaaaatctgtaatgtcaaaactcattaaccaaaaaagtgttgacttctcaaatattttatagtcaacgtcatgaagtaagaaatgtacataaaaaatgaggacaagccactaaaatatcattgtttcacctcactgtatctttgacattttgaagaacagctctaaattcacatggatttattcctcaacttgtaaattgtagtgtaagcaagcatgtactaagtttatcttatgagaaaaataagtagatttcttgggcaatgggttacgatcaacttgttgcataaacaatcactcaacttactaagcataaaaaaataaaaattatgttctttacaagttgaagttggagtttagctttcttgagcaatcgaaattcaatactgtagaaagaatacataaaacattcaaatcttgtttttaacatgtgcgatcactagttacagtacgaaagttgttctaaaaagatactctttattgggatacaaaaccacatattatgatacaaaatgtaataaaaccatttaaaagatggatttgttggatctgtatataatgtttaataaaaactttgccattcccaccaaagtcttggccaagaagcagctgatgaataggagcacattattgatattgatttcgtaatcctctccaccaagacacaagagcattttttggtttttttggaggtgtaaggacgtgaagcatggtttgcttctcttttggagtcaatggaacacttctgacaaggtttagagccatgatatgaacgctattcttctctctgtaccactggtaagtccataacccgacaccagcaccaaacatcagaacctatggcaaaaccaaatgtaaattaaattaacctaaatttcagaataaaatggaggttttaagtttacaaaagagtaagccccttgaacagaccggtgatagaaaaacgacaatagtcttgaagtcaaatccttcgatgttgggttcatatagtacggtatcaccaaaatcattttccagctttttaaatatctccttgtctgaacttcctgaccgaatctcatcacggattatctgttaaaagcattgaaaatcactaataaggagaatggatgatcttaattgcaaatgactagaacaaaaagaacaggaagctttcacggattcccattagagaagtaaaagcaacagggttgcagtggcatgttaagcatgttacccattgccaattacaaaactttatctactgctattgttaaaaggtttcatccactgtcatttattaaaacccaagttcatataagactaaattgaactgacagcctacttctagtctacacttgactaaaattttataggagttgctaccaaagccacttaagtaaatctaaagaggggcaaaaataccctttagaaatggaacttacctttctaagaagaatagcaatatctgcttgagaatcttcaatagactggctaccacattcggtacagcggacattgtgactgatgttccttgctcgagcttcaatcacctgagtcttcttgactacatccccttctttctccatttatacaaacaccccttttcagattctacaaaatattcacatttaacaacaacaacaaaataccgtttaaaaacttggagacagttaagttcactgaagcattttatcaaacatctacagcgcaaacagaaactcccacaaaaacaaaaaccaaaatacataacaaagaaatgcaggtgaataaacagaacgaaaacccatcaatgcggctagaagcctataaattaaaattcattgaaaaaaaaccgtgcggttcagaaagattagaatttcaggttttgtgtaaaagaacccagtcgagtgcccaaaaaaaaaaaacaaaaaaacttcaattacttatcagagaataaagaaatgaaattcttgtcctcattcattaggtctattaacctaaagataaatgataattatgaaaacttactacgagagtggccgagaatgttgctattgctgttgctgctatgaacctgagaaagagaggctagaccagagggagtcaagctcagctcacgccgagaaaattaccataagggtataattgtaactttgagttcactaaagaaatgttcatgcagtcatgcgattgtcgttttattcatatgttgtcgtttacgcatgaaattgtcgtttttcataaattatcgtcgttttcaaaaattaa

SEQ ID NO: 26318 - DNA, 2605 bp, Cannabis sativa
ccaatgcttcgtgattggtatgttcaaaaaccagattgggcaaaacatggaggtttacgttgataatatgttggcaaaatcaatcaaaagtgaggaccatactaaggatctcgcagaatgctttgccatacttaaaaagtatgatatgaagttgaatcccaagaaatgttcctttggggtttcctcaaaaaattttttgggttttattgtgaatgcaaggggaatagaagctaaccttgataaaataaaagcgctactcgagatgccttcaccaataaagccgaaacaagttcaaactttaatgggaagaatggtagcgctcaatagattcatattgaagtcaactgataaatgcctcccattttttaatatcttgcgaggcaataaaaagtttgaatggaatgaagagtgcgaagaagcattcaaaggaaaaaagaaatacctttccattccactagtgttggccaaactaattactggggagacattgttcctttttttggatgtctcaaaaaatgccataagtgtgacactagtgtgagaagaaggcacaaactagcaacctgtttactatgtgagtaaaaggttattgggggcaaaatcgagatacccacctttagaaaaacttgcactctacctggtacatgcatctcgtaaattacgaccctactttcaagcacatcctatcaaggtcctaacaaatcaaccattacgacaagtattgtcaaaacttgatgcatcaagaagattaaatggccgaatgagttaggacaattcaagataacttatcatccgagaacttcaatcaaaggacaggaattaactcgcgagaagacttcagaataggaaatgaaatagaaacttggaaactgttcatcgatggagctttaaacaagaatgccttgggggtaggagtaatagtggtgtgaccataaagctttaaatttcattatgcacttaggtttcagtttgaaactttgaataacgagacagatgatgaagccttgttaacaggattaagaatagccgagatgttgaaagtcaagaaccttgagtgctttagtgattcatagctaatagtaaatcaagtcttgggagagtactaagcaaagggccttaaaatggccaaatatttagtgaaagttcggaagaatgttcaattatttcaaaatagaacaaattccaagagaacaaaactctaatattgatgccttagcaaagctggcatctcaatttgaccttgataaattgaacatgttaaaattgatcgtcacttcattagtgaaaagattgaaaataagataatcaccttgaagcatattcccttgagacaacaagcagttgatatcataaccaaatctctccatcatactaattttggggaactaagttcaaaattaggaatgtttagtatatatctagcttgaaattagttgtaaatttacatttaatgcatttttttcatttactctagcattactagatattcacattgtattatacatatatcctttgtatatactaaaatacatcattagaaataaaaactattttctctcatttgcttcactcattactaccccataatataataataaatcctaattattcataattaggtttctgggatatttcaaccatcccctccttatagaaatttagtcctcaaaatttacctaaacaattcaggatactgctctcgcatttacgactctaactctcaagttgtttcttccaccttgttgtttctctacagcacttttaactagtagaattatcttattccaaactactttctctttcccatctaaaacctggacaggctacccatataataaatttttctgaagttcaaaatcgttataacttagaatatggatcagatctgatacatgctttctcaagatggagatatgaaacacattatgcactatggacaatgcaggatttaaagctagttgataggctatcgggcctagttactccagtataaaacggtctaatgaatctagggtttaacttccctttctacatatccctctcataggcaatacccggagaaaaatagaatctcccatttggaacttgatattcctacgctttgaattaccgtaggttttttgtgtactcaatgaggcgagcatacaactcgaattcattctatagcattataagttccttggatcttttcagttaatcgtattcttttctcacctgcttcattccagtgaataggtgtcccgtatttatctcatactacacttattaaagtgtctaaccaatagtacatttaattattatttttaaacaaacactatgtcagggggagagattattctaagataatctaacctttatcaaatatatcctcagcatgttttctaatattctattaattctcttaaattacccatccttcaagaatgaaaccttgtactattttcactttaatctccacggttctcaataaccttcttaaactattaatatcatagccaaagttatcgattttgggatttcacaacattaaactattccttcgtataaactccatatcctcatttactatataaattttctgcactaatagacagcatattaactc

SEQ ID NO: 26319 - DNA, 7684 bp, Cannabis sativa
tggtattaggatcttttcttgtaaaccaaactccagttatttgaatgattttggatactttgattgggttctgacgatattaggttttcattcaaagattattttgtttttttatcattggaaagagtgctgcaccttttatgaagattatcttgatttcatcatccccttttggatgagccagttttatcagttgactcttcttgttttgattcttcttaacctttttcaataatttgtgatcaaactgatttcaattttgtttattagatgacaacaacacttacacaattgtacaataccataatctgttgctcattgctcaatgctgaaggcactccaccccatatgagaatttattcaactgaaagataacatacagaaagaacaattattcttacaaatgatgtgactgagggcaggatatgaaaaaaaaaaaaaaagacaatacagtattaaaaaattgctgagaaagtagatgatcccagatgtatatcgtttttttgaaataaatttgttctatgcttctactgcctgttgagccttgggtgatttctcctttcttctagctccctttttaggcaattcaaccccattttctcattctgtaagattttcaatccttgcaaacggttggcccattacctaacccttctttagtccaccccacttagtctcccaagttgttagttcaaaagaggagctgcatcttaggaaagtgttatctgtgtttctggcatgggacacgtggatcccagatcagtacccaaggctcatcaatgggatcttcagcaaaggtaaagtgggccgagcccacttggacatgtccttacagaaatgtatcttagtttcgccctcgcaaagccctctgccttcagctaactgtactcggaagcatgtgcgatacaacgagaccagaaggacgagatagtgcgttcccggaagacccttcaggtttccctttttattcttgcacacaaacaaggaaattccagctgccaaattacaacggagtattgtatcaagataaatggaaaaacttcctataacaaatattatatgcaattaattcacagattgattgcccacaatcagtgcacaatgtgttgaccaaatcaattaaaatctgatcaacctagtcaatagatcgttttctttatgggctggacttcatgagacaacctaagagtattatttattgtaaaatccctaatagaaggaaaagagaaacctaatgtaattttcaaattactataaatacccttcgaatcctatggattaggggttgaactctcttgaaaactttgatcaggcaaacttgagaacatacattctttgtattcttgaaagcatttacaagctaaagaactactaaataatacacaaactgtttgtctctttttactctttctcttttgattatttactcttcagttcttatcaatatattttgtttccaaaattctcggtaaacaaaaaaaaaaatacacaaacttatctatctagagagagagagacccagattgcagcatcaaactgattctttgaaacccgagctgtgcatatattctctagcataaactcgagaagataggtgataatgcaattgctataatcctcatggtttccaatattatcacaaggccttgctccaaaagtcaaaagtataaatatattgaaacattggtcattttgagatgagaaataactttcatatagagacttataaattgtcttgtgcatgcacatgggcacaccgacatatcatgataagttcattcaattttactaattttcctacaacatccttgaatgaaagttttttctcatccttagtcgctctgatactatattataacgccttgaaccataagggtgccacatgtgtacttttattaattattttataataataaactaatttaagaaaagtgtagtttaattaagatttttagtaaaatttatttaaattaaaacttaactttttattcaaaatactactagatttgggaatccccttgtttataaactcttacaacatattacaaaacaactattacaaagtagggttacattttttttttcaaaacacatccagagaaggaccctgtccattgagagccaaaacatggcggctggtatgtacattgccgggagacctctgattcatggctggtctagttttcccttgcccttacctgcaccacaaagcacccgtgattcacaaagactcagcaagaaaagtagataaaacatagttaacacataaaacataatcttacagcaatgcatcatatagactaagcagtcattcaagcgtaatgtagtaaaaataattaattatttttcttataagacaaactgaccttgatgcttaataaagcatccttactgctcgttaccaatgagcttcatatgccactatcgttacttatataagtaatcaataagtaagaaacctatcaacgatttctaaaagtgagtaataactcattccaaatgacggtaattaccgtatctttacctcgattataatcaggtcataaacaacaataatcgtatcctatttgacatgctaagtagtgaattggcttttcttacctcaatctaaaatcatgtgtgcgggccgacctgagaggaataacgctcgacaatcctgggtcctatgccacgacaataaaattcggtaaacaacttaaccaaatctcaaaattagccgtaaactcaaaactagaaaaccccaatcaatacgagtttagaacaacctaacattgataatacaccctaatctaagttctagagaaacaccccgaacatgaaattgattatagaaaactagggtttcccctgctagtcaaccgattgactggttccatagtgccctgtagaactggttaatcgattcttgctgtagaaatggaaaactctaatttttgcatcaaaacccaaccaaatctcctccaaacctaatgaaactttccaaaacataccaataacattaaaaaaaaaaaaaacatattcaagcattcaaaattcaataatacctcaaaataacaaattcactatagttgagtgaaaattgggttcttgatctcaattcatccaattctagacctaacagccatagcatcatccaattcactctaaaaaaaactttaattaaacttaaaaacatactatgaatccaaaagaaccccatagacccaaaaccacacaaaaattccaacaaaacttaacctaaaaccctagaaattaaaggaaaaggataaacatcttacctccaagcttgcacaactcctagggttagctaattcagctagaaaatggttgatttggtgaagaaatttcctttggttcagttggtttctaggactcaaagggaaggagagagagagagagagagagtaatattatgtaatatttgatttttctaaagttcaacaacctaattatctaactaaaagtaaaataaaactaatgattaatcttcaatactcagcctagtataccataggtcatcaaataagacaaaagaaatcaatctttgataaaatgctattttaccctccattactacttaaactataacataacctaggggcattttggtcatttactagccaccccgactaaaccgacatctcaaaattctaaactagttcggtacaatataaacataacattctattattgttgtgatatttctgaccaatccatcgagtttccactgtcgccgaatccaaatatatttcatttcaaaaatagtgtataaaatacccacatactccgataaaatctccgtaattaataaattacgtttaattattagatttaataaaatatgtccaatttaacataataataatttttgggatattacaaggccagtaatacaatcaggaccactaggccaccaaacatagtgaccccctaaaaaaagcaaactgagcaagggcacgcgccacactattcactagtttaggaacatgaacaaatgaaataacaacaaacttttgcaataatcgataatgtctctaataatgcatcctaaatacgaatggtcaataacacacttgttgatagcaacagtaattgtaagacagttaaattccacgatcaattggtcatagcccaactgaaggcacaaatgcaaacttctatggatcacaagagcttcagccacaactggctggaaaaggccatcaaagcacgatgtcataaaaaccttaaccaacccaaaataatttctcaaaacaaactcaatacatgtcttagtattcttagtggacaatccaacatcacaatttaccttcaagacattcccacacagtttcacccttttggcacgaggaggtaagaccgctccttcacccacactagactccgttgattgagaaagaaactgcacttgactattatcccctttaaacttgtgaagctaatcaatgctccaatccaacaccatataattgttaaaatagtctaatataatacccccttatttcttctaaaccaaattcttcaaacacacgtaacaaaattttcaagcacaattgatgacagtttttcaaaaaggaaagaaaattcataaaaatccataccaaggtaattagggacatcaaaaaaattaagcacctagtctttaagatacttaaaatgatcacaataccatagactattaaacacagtttttctggcaaacaaaaagaaaaatttgttaataatacctcgataacttaaatttgacaacacatgtaactaattatagacaaccttctaaataaaatattgaacttttgacagaatcttgaggccccaaatattattccaaagtccagagttaccacaagactagaagcttgaccaagaccagccaaacaaaccctattccagtacccactacggacactatacaaccgagacgtgtcatgatgccacaccaattggtcaaataagggcttattatactacgggatagacatgataaaatcagttttcatttttagaaaaagatgaaacaatctactaattattccaatttctattgtcatccagtaaacaatcaaccttcgcatcaaagagaacacaagagtgttgaaactttttacaaagttaataattttttttaaaaatgagagagtgtcctagtgtgagtgaaatagaatgagtctcacatgagatgatttcttatttacaagggtatataaggtgcaactttggcacttgggatagggccccaagatgtacctagttttatgcgaatgtgtgaggacacatacttgacccaccacacacatgtgtatgctgccgaccgaccgaccaatctgaaccgagctggctggctggctggtgtggtgtgacactttatttcttacagaaaatttatttaataaaataattattttttatttttattatttaatttgttttagaaatgtgtttaattaaaactaattacttagtcgtataagttcatgggacacgttcaacaattactccccatggttcaaaaaatattattcatccgttatattttttttgttcaattagtctatataatgtgattgaattaatgggagaaatacttctttttcataccaaaaaaacaaactcagttttcactaccaaaaattctttctgcaaaatctattttgagggtgtattcgacggttcgctacagtgcagtggtattttgatacagtgtacgacaattgaattattttatcctggcaaagactgttaatttctagttgcttgcacattcttaggcaatgttgcgaatgtcttaaagagaacgaccaattttgcaactcacctaaaaatttcatttggtaatatcgctcttgttttatttttagtagcagtttactcaacagtttaaagacgttcattatgctatgactactaccgatgatttttctggttctactagtgacattaacaagcctttttgttttgaggatttgcattttaaacgttggagaccgaatatgttgttttttctaactatgaaaaaagatgtgtttgtgttgactgttttgaaactagttgtttttgagactccacacgagaagaatgatgaagttgagaagtacaaattgcaagtaaggaaagggactcctgggtagagaatgtttttctatgtaagaattttattttgaatggtttgtctgatgatttgtatgattattataattctgacaaatctgttaaggaaatatggaaagcatcacatatacaatatgataccgaggaggtaggaacaaaaaaatacactgtgagtcgctacttggaagctttaaatgacggatgataaatcagtcgaagcccagtctcacaggcttcaagaaatagctcacaaaattttgtctaaaggtatgactattgatgaacaatttcaaattgttgttatgattgataaattaccctttcatggaaagattttaaaaataatctcaggcacaaaacttttcgttggaaagtctgatcactcgtctttaaattgaggaggaagctcgaaaataaaaccaaaaggaagaggtgcttattgttgaaaacaacaacaacactaataaaagatccactactattctaaaacacaatgggaaaattgtaagaatcagaatcgcaaagtgaatccgaactgcaacagtcaacctcacactatttagaattgaaaccatcaaaggaactaatataataggtagcaagtaccccctaatagaaatgattcatgtttgttcatgtgttacaactgtaacaggccagatcatatggtgtgaaagtgtaagaacaagcctagttctgcagcacaggctaacttaattggaaaagatgccatttataactatggttttagagatcaacctcattggtggatttgaagggtggtgggtagatactaacgcttctcgtcgtgtctgctataataatactatgtttaaaacatatgttactactactgaggattagaaaagtgttgttgggtgactcccacaccactatagttttcagtactagaaatatgaaattgaacttcacctctagaagaactgtgattctaaaagctatgatgtacactccagagatgaggaagaatctagtctcgggctaccttcttaacaaggcgggatttacacagactatatagttgatttgtttactttaatcaaaaataagatatttttagggcagggatatgcaactaagggaatgtttaagatgaatgttcaagttaataaagtcaatgcttgtgcttatatgttgtgttcttttaatacttggcatgctagactttgtcacgtaaatatacgcattatcaagagcatgagtagtttaggcctaattcctatattatccttaaatgactttgaaaaatgaaaattttgtagccaagccaagattaataaaacaccacatcaatctgtgatagaaaaggaaattgagcctatagatttaatccattctgatatttgtgaacttgatggaactttgactagaaatggaaaacgctactttattacttttattgatgattattctcatttcacctttgtgtatttaataaaaaataaaagtgaagctcttgatatgtttaagctatttgtagctgaaattaaaaatcagcttagtagaatgatcaaaaacttacgtagcgatagatgcactgaatatgattctacta

SEQ ID NO: 26320 - DNA, 2349 bp, Cannabis sativa
taggaaacttccttacatttacatacccactagagacgtaaacaagtggaaaacgtgtgacaccttactttttgtttttttctagaatattaatttaggatttaatttgtgcaaattagaacagaaaaataattataataaaataaataaaaggctaccatttcttctagatgaactaagctatcatatcatgttatacaaaattttctaataaactaataatgaggctatttaaatagtgggaagggatgacttacaaagccccaattgggtttgattggttgacttgtgtttatcagtagctccttcagctaaacccaattcaagtttgtctcaataaaatttcatgtaagaggaagaataataagaagaaacaagaatttaatgggtctttcaaagccttctttgctctttgttttggtcctttttgctgttcttgcttcagagaaatcagtggctgttcaagctaggtttctttcctctgctcaacaaagtaagtaatttcacaaacagcccagttttagtttctcttttcttaatagcttttacatatatatgtatatatattaaagtataattttgatgaaatttgtgaacttttttttttcaggatacgcaaatgtttttgctactttgggactggtttgcaagtgttgtgatggcccaaagggagaatgcacaagtagttggaccaactcttgccctaaaatcaaatgccttccttggaagcaaaattatcaatgaaaaaatttatctttttgttttgatgatgttcagatgttgtacatatacatatattatatatttgtaccattatatataagtacttatatacttagtgggcaaatttaagtttattattacataggtattggtagctcttttagtgtatatggatataattacaagtttcaagagtaagagctataagttaatggagaagtgtttggtgaaattaagtaatatataagggtgttaatatctagcatgaatttttgtttgtaaaagtattgagtaaatttttatgaacctgctttattatatatatacatacataaaaaataataagaacagaactaattgaattaaattatatgttaatacttcacaacaatatattgaaaactcttccataaatttatatatagattttaacagtgtttaagatttatattctagaagcaagcatttaatagattatatattatagaatatataaaatataaatataaaataaatgaatatattaattaaagaagtataactaataaatatctaaaaaaaatttattcatatggagatgatataatcttgtaatatcgtacaagagaattaatattatcaatataaataaaataagtcggtaatatatattaaaataaatgatcttttaatatagaattacagtttactatacactatactctagtgaatgtggttctaatttagatcatatatgtagatagatatgtagtaaaaattatgtgtataatttgattatccatgactagattgatatgtaataacatctttcattaacatgtcctttaccataaaagagttattcatatcacaagtagatgagtctaaatatgtatacatgaactcctatttgtgttcattgagttctttgattcactcgttaaaatttctcaaagaagataattcttacaatttctgttttgggagcttaatatcatgagtggatgggaacatgttatgcaataatagaatcttagatttctaaaaggattaaatattagttcccttatagtgttaattatgggagtgataatagttggatccaaatctataattagattatagattaactgttcacattgaattaatggtacataaagaaccaagagataattagaaaggtaaaacggtaattttgacaaactctaattatgaactaataattggagggtgaactacttatattgattatatcaatggactacaagttatcagaattctctgaatataattctatagtgtcaaaaattgcaagtccatatttatagtggagtaacaatagaattcataaatcgaattattctaattgatgatttcaataataatcaagtgttcattggagcttcgaaatataggttcatggtcgccaagacactctatacaacattgtacagggaaaagtttaatttgatgaaaaaatttgagaaataattcttaatgaaaaaaatagtaattttatggatattattattttgaataattatatcaattgtaaattgtataattagtattaattatttagttttatttgatgaaagtatattaattagttaaatataatattattcttaaataatattaaagaga

SEQ ID NO: 26321 - DNA, 5997 bp, Cannabis sativa
aaaatatatatatttaattaataaatttccttatttatttatttattttttcagattaagtaattttccttatattgatatcacaaaattattaaaaaaataatataaaaataattaattatatattattattaaatgtaagagtgacacataatgaaaaaatgtctgtatgtacatatgtttttcatgactctacctaagtattttcctatatatatataaatagagtaatttgtggtgtaaaatatttaaatttaattgtcaattataagcacatacttagatttaatttttggtagtaatagttataattatggaatttttgtaggtacttgaatattaagtgttaagtaagttttcacgtagtaattcttaattggttcaggtcattaattttttattcattttttaaatattagtttaattataccaataaaaaaatgacacgtggttaatgacttaacattaaacggcgagtatctacgaagtttcaaaaacataacttaagtattattaccatttaaatattttttttttataatcagggattaaattaaatatttatgcaataaattactttatataaatatattaaaattttaatagcatgcatgctatttttttttttttgaattataatgaaactttcttaattcaaatcttccaaaattaaagaaacaattacaataggtaaagaaacactactaaaaatacgatcagtctcaataagagaagatcgcgtcaaagcatgcacaactttattagtagatcgtttgataaaaataaaagaaacattactaacatcggcaatcaaagacttacaataaaaaataatataacaattaatttgcagtataaatacccaagtttaacttccagttgcaagtaaatacctaagtttaatttttggcggtaataatatctaagttataattttggaacttatgtaagtacctgattaagtaaattgccacgtaataatccctgattggtccaagtcattaaacttaggtatttatttgcaactgaaaattaagtatttatgccacaaattactcattttttttaattattttgtaaatctgaaatgactctacgacaatgcaactccacaatcacactcatccatcgattagttttgatctagcacaaagtttttttcataccaatagcttcgacctcatgaagttgaaagacaccatatcttattcaaagtcttagtttgaataacaataccaacagctgaacgagccaccaacccaaagcgcttctcgttagaaaaaagtattttatcaacattaatcttgattaaagtaaatttaggacgggtccaatgcctcattagcaagcacgctatttttagtaccattataactcaattatttttcatataacaatagcgattgtagctagagtagtcatttcaataatttcacgaaaatagaatttatgcggataagaaaaaagtatgcaaataatttgtcgtttgaatctattcttgttttcgatgtacattataactctttttcccgtatcaaaaacatacatattcttaccctctattgaatgtgcacacacaaacttaactagcaaaaaaattcaatttagcattagttttgtgggcaattgaacaattataattaactgtgagaaattcataatattccttttaaacaaaaaagaaaaagaaaagaaaagaaaagagaaaactgaaaaagacacttttcaatgcaaaagagaacaaagcccatacccgtactctgttggcttctgctttgtgtttgaaaactgtctgacccgctgtgctgcgattctttaaacaatggaagctcctcctcctcctcctcctcctcctccccatggctctgcaactcctgctttgcccaaacacactgacctctcctccgaacaactgagctttctacaccaacattttcaaactcctaaagatcttcctcacaaagctcctcttctcctttcggagcttgaccgcaactgcttcgatttggaccgagacctcattgccctacaaaccatactcgccaagtcttgcgtttcctggatttctcactcttttgaagccaaaagtgatgcccgccgtctcaatcatgatcttcagaacctcagtctcctcacttcacaacgtttgtataaatttctttctatattcgggtttgtatatctctcttctcttgtagaattttgagccccttattttggggtccttttcacagatgggattggttccaagagatttcatagagttttggcgaaagaactcccccaactcactcagaaagtgcttcgaattgaggcaatccgcagttatgttggtaatcataggatttctttctccttcttccgttctcatatcctataatttggtatgcatttcttttttctttttctggtgtgggtgaagggttgtctttaatctgttgagttgatgagatcagttttaatggtaaatttctatttaggagactttaactatcaattttccttttggattgttattcattcatttagatgtcttaaaatataaacacattcttagttgttgatttaagcttccatctttttgtaggatcttatggattttcgtatatcacttgaacataagaaaatatatttttgtcaaaaaaaaaaaaaaagtaaagaaagaagaagaaacaaatgctgacaatttgatatatattagtaggactgcctttgcaagagttttgtttaactttgtagatactttgtagtcctcaatgtttttctttgcggccttaacttttcgttatttgtattttataaatgtttgtaaatgcattacatgtgggcatgagattttcatttcaaggaatgtgacccaaaataaaaaggaaaagaaagttgtgtttttctttctgtataaatatctttataacttcaacatagtatcatattttagaaaaatgtccctaatgcttttgtaagcaacttcaactccaaaactttaatcatctcatgttatctcgagatcatttttgttatatcatttctccacaatctttaccaatgctcttcattcctttttgtagtcatatatacttgtttcttgtgatggaacttgccttacattgtttgaatgcttatttgtctgtaattttcttgaagtgtatgctttttattttgtgattacgatttgaaaaacctgtaaattatgaatccactggcggagttgtgccaccgtgatctttgtagaaaggaatttccaagtgaccctactgaactaccgtcttaatgtttcagagactactctaaagttagaagctctggttggagatctagaggatgctgttttctgttttatgaattcccagagtagcattatgttctcagcaaagctttcaaaatcctcattgtctaatgtaatgcgtttgtctctctttcttgtgatatttgagtcattgtcggaatggtaaattcactagcaggaggatagtgttacataatgacctagatattcggaatgcaggagtttggaacaaagcatgaaaagttgcttcaagccataaaagccatgaacgatattgaagacaagctggttgatcttgtgttacttcaaccacactggcatcatcttttaaaatctgttgatgctagggttgaaaaaaatttgactattcttcgaccgcaagtatctgcagatcatcggtctcttctcatttctcttggatggcccccaaaactttcactatctaaagtcgaaggcggacacatttcagaccttccaaacccattagttatcatggaaggtgaaaaaagaaagacttactcaaatagcttcataagtctttgtgctttacaacattttcaaatccggagggaaaaacggcagagtaatcgtttggaacaagaaaaatgtaacattcgactttgggccattgatgaactggtatctccaattgcatcacgaatggagcaccacttttcaaagtgggttgatcagcccgaatttatgtttgctcttgcatacaaaataacaatagatttcattgagggaatagatgaagtgttacaacctctgatagatagagcaagattagtaagctgtagtgctaaagaagcttgggtttctgcaatggtccaaatactttctaggtttttggaaacaagacttttctcttctcttgctgaccagtataatgataaacatatgaaagttgaggttataccgtcatggcttcatcttatagatctacttctcaccttcaataaacaaatacaatctcttgttagtttggaaatctgtcactttttgacagagtcagatagatttcaagggctttcaagaggtatttctttgctgacaatgttttgtgataggcctgaatggctgaagatatgggcaaaaattgaaatgaaaaatgcctacaagaaacttaaagcagaattgcaggatcataaaagttggaatgttgatagcaaactccaagctggatttctccccgatacagaacgcgggcattgtatactctctactagagaagatcacaaagctccatttattgcagaatctgccctaaagattgcctgggagatgattgaccggtgccaaaccatgccggctgttttaccacgtatacaatttattaggtcaactgcagtaaggtttctctggtacttccttaaagttttgcttttaaggtacaaaggaactgaaattgattctgaaaatctcaatgatgatgccttgggtagaagatgtatattaatcaatgctgttagatacattgagtttagactgcaacaatggagtgactctgttgattttctggagatgaaagttgctgaaaatgattgcaagaatccgcgaaatgttggaaatattgatcataattgcttttttgaggaagaaattaagagcttgtgtgagcttgaaacaaattggttgatggacattattgctgttattcttcgtcaatttgaaactctttcatgggattatgtcaaacaagccaaacatcttcagcaggaagtatcagttgcctcagatttagccgtttcggttgattttgtcgatgcattggatgctttgaaaagtcatctccatgctttggaaatgactcttaaccccaaagattttttagatttgtggagaagtcttgctgaggggctggatcattttatatttttcagtaatatctttgctgagattcagttctatgccaatagggtgaaccagtttgagacagatattcaggctttgttttcagtttttaaatcttattgtgttcggccggaagcattttttcccaatattagaaaaggtctaaagcttttaaaagtaaataaggaaagaggtaaatgaatgaataagaagggctggagacctttccttcatttttggcttatctttctccatctatgtttatttatttttttttttggagaaataccacctaggtttaaatgttgtaaagttgtttcatttatattgctaaataaaaagtgcattgctatggggcactaagcatcgacatgtagttttataattagttagtagttctctataatttttattaaactaaaataagtggggttcgatattaaattacaccaataacaataggtaaaagtgtcctttagcatttcttaaataaaaaggctgtatcatttatatttttatgtatagggaattggtgctaaaatcatttaaatagttataattaaatccttgtcaaatatttgagcaacaaaagattcttctgtttatgttttgttttatattaattgctaaagaacactataaatgatcatatgtaatcttaaattgagttttaacaaattttaatttattaaataacacgaaaagttgctaattactttggggctgtttgttactgtgggttgagtaggtttgaatttagtattaatgtgtttagtaggggtgtacatcggtcggtttggtcgagttatagtgtatttttaccaatctaatataaatgtcgggttgtaaatatctaa

SEQ ID NO: 26322 - DNA, 3359 bp, Cannabis sativa
atcaacgacatcaaccatctcaattatgtcattctcatcggttgactcatcggcaattggtacttccggttccccatggaaaatccacttttgataactctttagaaaacccttgtaaaaaatatgtgctttcacaatatctaaagaatgtcgtctcgtatttaaacattcaacacaaggacatagaattctcccatcacaatctttatgtttagacgcaaatgcaataaaaactcggacacctttccagtaagcaagatcacatcgatttctcaatgatatccaagttttatcaatcgtcatctaaaaaaaataaacgataattattaaatttgtttgtgtactctaatacatatttaataaattacactccattacaatgtcctaaaactattttgtaatgttttgtaaaatattattttacttatccaattaataataagtttccttaataaaacatagctatacaattactaatacttagttatcataattaataaaaattataaaactaagtaaaattaattgtttctggttttggttatatttttataagagattcccactctctctagactctcggtctcactacctccaattcatcccaccactttgttaacagttgtttttttcacaatgttgccaaaacatcactcgacttatcttatcaaaatctaactattttagttcagggcttgattggtaaaccatatacgagttgtattgtattaaataacaaataatattatgtttaaataaaatattgtattgttttaattattacaatcataaattttaatacaatgtgagtcgtattatttaatatataacaaatgacccgtattaaattgtatatttataatgcttacaaagggtctagggtcaaccccaatcccggacatcggacccataccctaacaatatggaaccagacccggactcgtacccagacacaggtccggagcccagactggaacactgaccccggaccagaaccccgacccccaaccctgaataccgaacccggccccagacccgaagccagaccaacacccgaaccttggaaccgaacacgaacaccaaacccagacctccgatccggactcggaccagacacggacccaaacctagatccccaacctggacctgcaccccagacccgaacactggacccggaccttgatcctaacccggacctagacccgaactgcaaaccggactcgaaccgagaccctagacctcgggttcgggtttgggactcgggttcgagtccgagattcaagtttggggttcagattagagttcggcatctggggcatgttccgagttcgatgtctggatctgaatccaggtccaggtttgggtccaaagcatgttccgagtctgaggtctagtccggagtcgagtctaggccatagtcgggattcgggttgagtttattgtaaaaaattgataattttacacaaattattagtacaagtcaatatcaaagtattgtattaactaccaatactaatgcaatgtgaacctcactaagtagtgtttgtttaagtttttatatcatcattaattagatacattttcatagcttttttttaagacttcatctgaaacaaaatagtcgacagtggaatgcagcttagctccttctcaaacaaaataatcaataaaggacatcacataatatttcatatgatcaaactatagacgaaaacaacataaagtaataattgacatataatcacagcaatcagtgtgtagatatcaaatgaattattctaattaacaaatgaaggtctgcagttagtggcgattagttcaaatatttcaacactattcaacagtaaattttattcacagttttgaacaaattttattcaacagtaaaatgtgcaaggagtatcacttcagacttgttgctttaaacaaattttgttcgtttctttgatttttttttttttttctgagtaattttgaagcagtactaacactggttttatcgtatgatatctaccaaccataactgattcaattgcttaggctttagaagccaagactacctgaagccatgtctacagcaaaagaataatgacacacatagatttaattttgggttgcatacgcctgaggttctatctttctaggttcaacaatgtacacttggattgaacacagttcaaacaaatataaaaacatacatatatatacatattaaaatacaaacaaattttcaaaagaaattaaaaaaaaaaaaaatacacacaaatatgtatgcataccttgaggttgaacctagagagagatcggagttcggcggctccgagagagatgagagaaaactaattagggtttttccttttagtttcaaaatgtgaggaaataatattttaggggttgaggatggtgatttcagggttgtgagtgaagaaatagaggagaaaagtggcgtttttgagctgtgggaggcggagacaaccggtcggaggcggagaggtccagagagtttgtgtcattgtctgtgttatttcgtgtgaaagagaaaatgatgaagacgatagtttatatacgcatttattagtgacgacattgtcgttactaatactctaaaacttgtgtcgcccctaaaaatttccttcttaaaactaacattaacgtttgttgaattgaatctaaaattacccctccaatggaggacctcccaccctctctggtcaccgatatcctgagtcgactcaacgattctgcagacctggttcgctgccgactcgtctcgaagactctaaacgagatgtcgtatgaggtacgatccctcaaccacctctgtaccttgtctagctacctcaaatctcggtcccgcgatgccacatctccccaggtcatgaccttcaagattgccttcaaggacctggttcgtagactcagtaaactcgagtccgtctccatcgccgtggagaagtccctcggcagaagatcgtacgacgaggttgaagacgacgatgacgatctttacctgactgaaccaagcttcatcaacgattggcttccggagattggcggacgcctgaaatcgatttccataacggatttttggagtcaatctagctggcgaaggtccgaggctttgacactgatttctttgttctgtgagttcctttaagcctttcctttgcagaaacttcattaggttcttagcaagttttcatggccaagctaggaaatttaggaataaaatcctgtttggttccaatttagtttctttgctttgaaaacttgtattagaaaccattttagtagtttataaacacaattttcttatatcatatacatagtacatagtgtttggtatcgagtttcttaga

SEQ ID NO: 26323 - DNA, 3767 bp, Cannabis sativa
atgatctcgttattaccaccaatggtactatgacctatgctaaaatggttgacaaggctcttcgagctgaaggagcggtaaagtttttgcaagaaactcgagaggctcctagtcctggtgggaccactactctccctatccctggtcttggcaaggagagcggtgatttcattattgaaccattgaagagaattttcccaactacagggagctcgggtgaaagtaagaaattttgcaggaattagggtaaagggggacgtcagacttactcctaccctgagtgcccgtgctgcaagaagcaccaccctgaggcatgtaactggtgggcttgttttcagtgtcgatcagttgggaaccttaagaaggattgtccctagctgaagaaggaagaacctaagccagaagctaagcctgcaccagtgcgagtatttgctattactcaggcggatgttactgccattccttcaatggtcacaggttagctctttatcaacgactttacttatactgttttatttgactctagagctacatgctcatatgtagcgacgagggtacttaatcaacttggtaggcgtagtgatgtttttgacatgaggttcggaaccctgttgcctaatggggaattaattatctcgagaaaatagatttgatctgtgctaattagaattgagggtatggaactaagtgccgatttagtggagtttcttttggccgaatttgatatcatactcggaatggactttctgtcgaaatattccgccagtattgattataaacgaaaaatggtaacttttcaaccggagaatgaggaaccatttgtttttgtttgatcggttcaaggttcccgtgtcccaagaattttagcattaaaggctagggatttactacgcagtgggtgtgtaggatttctagttgttgtaattgattcctgtaaacctgtggtactcggacccaaagaggtcagtgtagttaaagaattcttggacgtatttcctgaggaatactagagctaccacctcaacaggagatagatttcactattgatctagtacctagggctgagcctgtttcaaaggcaccctatcgtatggctccaacagaattgaaagagctgaagatacaactccagtggatgctggatctagggttttcccgacctagcgtatggccctggggagcttcggctttatttgtaaagaagaaagatgggactcttcggatgtgtactgactatcgggagctgaataaattaaccattaaaaacaagtaacctttgcctagaattgatgatctgtttgaccaacttccgggtaaaacagttttctccaagattaatttgagatctggctatcatcaactgagaatccaggaagaagacattccgaagatagttttccgaaatatgtatggccattatgagttcctagttatgttggtcgggttaacgaacgctccaatagcctttatggatctcatgaataggttattgaaggatttccttgataactttgttattatgtttatccatgatatccttgtatactctcggtcagaagcaacaaatgaacaacatcttcgtatggttctgtagctgctcaaagatcataaactctatgcaaaattcaaaaagtgtgagttttggctgtcatagatgtcttttctggggcatattatcaggaaagatggaattatggtagacccagggaaaattgaaacagtgaagaactggcctaggccaaaaaaaattacagaagtacggagttctctcagcttagcgtgttattatcggcgtttcgtggaaggattctctaagattgcaatgccattgtctaaactaactagaaagaatcagtgatttttgtggtcagataagtgtgagaataatttccaagagttgaaacaacgattaattacagctccagtcttagccttgccaactaattaagagaagtttgtggtgtattgtgacgcatccagacagggtttgggctgtgttttgatgcaggggaataatgtcataacatatgcctcatgacaactaaaagattatgagcagcgttatccaactcatgacttagaacttgcagttgtatttgctttgaaaatttggcgacactacctatatggtgaaaagtgttaaatttacactgaccacaaaagtctcaagtacttttttgttcagaaatatctaaatatgagacaaaggtggtggttggagttagttaaagactatgattgtgagattttgtatcacctcagagaaaggcgcaaaaatgtcgtagcgcagatgccttgagtcagaaagggcctgaccaaaccttcaatgcggtaatgatttctccttagttagcctcacatatgtctcaggcaaacattgaatttgtaattggagaagtgcataagctgacacttcagtcagacttgttacagaggatcaaaatggctcaactagaagatcctgaactggttaaaactcgagaagatgtcttatcagacaaagctaaggacttctcaattttgagcaatggaatgttattatttaagacttgggtgcgtattctgagtaatgttgagcttaagaaggagattttggatgaagcacacactacctcttactcattacatccgggtaccaccaagatgtatcaagatctgaagccctattattggtggtacataatgaaaagggatgtagtggaatatgtgtccaaatgcttaacttgccagcaaatcaaagcagaacaccaacgatcggcaggactacttcagccattaacacttccaaattggaaatgggaagacattacaatggattttgtggttgattgcccagaaccataggaatgtacgactcggtgtgcataatggatcgttttacaaaatcaacccatttcttgcatgtgaaagtaacatatacggtggatcaatatgttgattcgtatgtgaaagagattatttgccttcatggagttctgaagtatattgtttcagatagggatcctaaatttacgtcaaagttctgggtaagcttacacaaggctatgggtactagcctgaaatttagtacaacctttcatcctcagacggacgggtagtctgaacgaactattcaaatacttgaggatttgttacgagcttgtgtcatgaactttggaggtttgtggagtaagtatttgcctatgattgaattatcctataataattgttaccaaagtaccataggaatggctccttatgagttgctctatggtagaaaatgtcgttccccaatttattgggacaaaactggagaacagaaatatctgggccctcaattagttcaaaggataaatgaagcagtagataagatcaaagttcgaatgcttacttctcagagcaggtaaaaacgttatgcagatcccaagcactgggatattacatttgagataagagatcatattttccttggtgtatcaccaatttagggaatcagtcgctttgggaagaaaggcaagctaagtcctaggtttatatgacctttcgaaatacttgaaaagattggacaggtagcataccggctagccttgcctccagcattatcagctgtgcacaacgtatttcatgtctcaatgttgagaaagtatgtatctgatccaatgtatattttgagttatgaggcattggagttgcaatttgatctatcatatgataaacagccagtgcaaatcctggatagaaaggagaaagtccttcggaacaaaaccatagcattggttaaagtactc

SEQ ID NO: 26324 - DNA, 4214 bp, Cannabis sativa
tacctgaactgcttgctgcctgaatcttctctgggctaaaaacagatctgagattgcagagtttcctccagtaccagctggtatctgtaggaagattgtaatcttagatatccactcctttcaagtacactgtattgacccacttaacccataaaacatcatgtttttgcatgactgcgcaaacaaatttggctaagcttgcacgattccataaagcaccattcctgaatcctaacccaccaaagctttttgggagacaaaccttgtcccaagaatcaatatgaatcttgcttcttttgccattgtgaccccataagaaaaatctgcaaagcttttccacttccttaactatgctttgaggaagaatgaatatgttcatccagtagttcctgagccccaagagaaccgtttgaatcaattgcattctaccagcataagagaggtgttttgcagcccagttatgcaaatgttttttgatcttgtccagaataacaccacaatcctccattttccacttagtaggcctcaaaggcactcctaagtactttaggggaaacgttccttcttcaagccctataacctgagcaatctcttttctctcatctgcttgcactccaccaaaaaagatttgggatttggccagattcacatttagccctatttggttacaaaagtcatcgagagcattcttgagatgattgactgctgcctgagtacctttgctaaacaataagagatcatctgcaaaactcaaattgacaagatccagctttttacaaagagggtgatacctgaaagtctccatttcagtttctttatgaagcctccttgttagaaactccataaccaaaacaaataacaacggagacatgggatccccttgtctcaagcccttcttcccttcaaagcttccttgcaatctcccattcagcattagattataggaagtacccctgatgcacaccataatccatttgacaaaacgagaaggaaagcacaggaagttcagccaattttcaagaaagttccaattgaccgtgtcatacgccttacttaggtcaattttaatagcacacctagccgaggtgtttttcctcccatagttctttattaagtcctgaaagatgaggatattatgagcaattgacctgttctgaatgaaagctccttgattttggttgatcacaaagggaagggccttagctagtcttaagcaaatgagtttcgagatacatttgtataccgtggaacaacaggcaattggccgatagtctattgcgttagaaggattatccgtctttggaatcagggatatagctgtttcattgaactcctttgggatatttcctgattcaaagaagctcagaatggccaagcagaattcttcccctatctcaggccacattgacttgaagaattcagagttaaacccatctggccctggactttttgaactaggaatgctgaataaagctttcttaatctccttcctggtaaaaggctttaacatagacacttgcatatcaagagagagcttgttccccttcaagttagaaaaatcgacattcttagtagctaaatgatcactccccatatagctcctaaaatgattaacaaagtgtttgacaacttcagagtaatcttcaatgagctcacctctctcatttatgaaatgaacaattctattctgctctctccttttcttgatgctgtcataaaaataagttgtattgtcatctcccttctttcaccaagtagctttactcctttgaatcaaaaaactatgcagcattttctccttatggctaaaatccctttttctcttcctcacttttccttatatcccccgagtttgcttgagcttctaacttggcttccaacaacttagccctggcttcagcatgttggacttcaatgtctcctgaatttttgttgaacattctaagccgatgcttcaaccttaagcacttaatcagcagccccctccgccccttgctacgaatcggtttagtccaacgctccataaccacatgcttgtaatctttatgatgaacccagaagttaaaaaacttaaagggcttaatcccaatgttgccagccttagcagaagagacaacacaagtgcagtgatccgacaccgtttcccaactcatgttagcactagaatcggtaaacatgtccaaccattcttcattttttagcacatgatctgttctggaataaatcctatcattaacctcatggttattagaccaggtaaaaaaagaacctgatctttgaagtgtatcagcaagccccaaagctaaccagttggttgcctcttcaacttcatttttggtaaccgggttacgtccctttctatccccaaactcaaaaacagcattaaagtctcccattatgagccaaggttttaccgggaattgaagaccagccaaaccattccaaagacacttcctttcttctataaaattagagccatacacaaaagttacacaaaactctttattaagactgagcatcttcactagacagtgaacatattggttagattcctccaaaatgtccactttaacaaacttattcctccaaatgacaagaatcctgccttcaatcacattactagtatagtaatcccaacaattgaacacagctttcatagcttgagctactttatcccccttcatttttgtttctaacacagcacctacaccaattttcctcattctacaaacatccacaacagcctcttgcttcttattactattgaggccccttatattccagctaagaatgttattgcaatccataaacagtagattcaatgacctctgtcctttgttcacctccctgctgcctttgtaagacctcaaatgtattcaactgttgagccggagctaaatatttctcccccacattcctattatgagcaccccttcttggcgttatccaattcccttttgtgtcactagtttgccccttttgtcttccatccttctccccctcttctctttgtttctccttagcaactattgttgttccagcactacacttctctcctggtttgtcagtttcagcaacattcactgtcttcttctctattccaccttcaagttcttcccctttgttaacttatgtgttgttcactttatcacaatccttctgatttgattttttataagctttccgacattctgctgttgagtgaccatagccttgacaacccttacatcttgtgggcagccattcatactcgattctttgttctatgagttgcccatactcattcaagaagtgagtaaccttaggagggtgatctgtaatctccatttcgaccaacaccctcgcaaatttgatcatagtcctctcctttgtgatcttatcaaccattaacgggttcccaattgtgcttacaataacacttaaacattttcccccagtactgcaaacccagatcgttgagcctaatccaaagagggacagacttaaccaatctaagcgctgtgagatcaggggactatggtctaattatgataggttttctatcaaattgtatcacaccctcctcaagaacgcaatccctagttgtagtatcattaaatttgactatggtataaccaccattcattcttacaatctgagcaattcctaatgtcccccattttctcctaatgaaaccctcaaacacctttagaggaggattagctcctaagatcatacaaacaacagttgcgttccaacttgcagcttcttcctgaacttcatcaatatcaacctgtgctattttcatcccatccttcgatatcggttcagtaaatgacaatttagcatcaatgtttagggatttacctgcatcaaaccgcttccattgctgctgagattttgagacaaaatcgtcttgttcaacttcatctgcccagatcgatttctcccgtgctgctacatcgaaatcgcacttccccgaatcctcttcctggttcaccagctgtatatttccctcctgtagggcttgagcaattagctccaggccttcagaatcctgctcctctacatgaatttcttcttggattgaaggaagatcctccagattcagctcaatcaccggctttcgaataacccttttctttctcgccatggagagagaaaaaacgcaatcgcacgcctaattcaatttattttcataacatctaattataattttataaatattaaattaa

SEQ ID NO: 26325 - DNA, 3328 bp, Cannabis sativa
  modified_base (3278)..(3292): a, c, t, g, unknown or other
ttattagctcgacaaaacaacaaattatcatcagcaaagaggagatgtgaaacagatggagaatgccttgttaaccgtaaaccttctaaattgccaacagcttcttcatattgcaagagtcgagataaaccttctgaacaaataaggaataagtaaagagatagtggatctccttgtctcaaccctcgggatggttgaacatggcctacaatttccccatttagtgagaatgagaaagagctagtacaaatgcaattcttgattagtgtcacccattttgaagcaaagcccattcttaacattactgcttcaaggtatttccactctacccgatcaaacgctttgctcatgtccaattttagagcagaaaatcttagtctcccttgattcttatgtctgagacaatggataagctcaaaagcaacaagaatgttatcagtgatgagtctgttggataagaaagctgattgtgtttcagagatgacatagggtagcactttttgaaatcggaggacaatgactttggagataagtttgtaaataacattacacaaactaataggcctataagcactcatggatgttgggttagaaaccttaggaatcaaagtgattattgacttattaagttgagtcatatcattaccatcattaaaaactccaagaataatttgtgtaacagagatgccaacaatgtcccaataattttggtagaacatggctgacataccatcactcccagggcttttatcggggctcattgacttgagggcagcaacaacttcttctggagtgaaaggtgcagtaagtgacatgttcattgtaggaggtattgtttcaggtattgcatttagtacagtctggagggattcaggttggacaccatctgttgcaaataaggaagaataaaacgaacatatcacttgggtcaagtcgtctttgctgtttacagtaatgccttgatcattgatgagtgatttaatagtgtttttggcctgccgtgaagatgcatgagcgtggaaaaatttagtattttgatctccacattgtaaccaatccactcgcgatctttgatgccaatattcttcctcttgtgcaagcaactcatccaagatagcttcagtatttttaagctgagaaaccgtagcattggttttgtctgttgcattatttagtgcagcaacagattgttgcagctgagagataaccttcttcatcttcccaaatttcctagtgtgccattgttgtaaagcatccatgcaagaggagagattgttcaggaaatcattaacattgccagaacagtcaggtgaccagttggatcgaataatgacagctgcctcttcctccttcagccacattttctcaaatctgaagcgtgtttttcttgctggttttgcatgagtagagttcaaaagcaacacatccacagcaattgctctgtgatccgaagcaaactaatccaaatgggatgttactaaaggttggaaagatgagttccaactatcattagtaaaacaccaatccaatcgctcatgaatggtatccactttgtgtctccctttaatccaagtaaaagggtctccagtaaagggcaattcattgagattacacatatccaaaatagttctgaaatcttccatttgtgattcacaacgcctattacctccctttttattgtggttataaagaatttcattaaaatccccaatgaccacccacggaagcgaaggagcaacatctttcaatcttttgagaagagtccaagtgtgtactggatgagcaacattaggggcaccatagaaagcagtaaagtgagaactaggaccattatggaaagccaaataacaataaaaaacatttgcattgaaactattcaaggttacatcaacatcatccttccataacaacatcaaaccaccacctaaaccaactctagggacttctagaccattactaaaatgtaaaagactatgaaagctagaaatagaattacaaggtaatttagtttccataataaaaagtatagtggggatttgctctttaacaagcaaacgaagttttcggacagcactcgggttccccaaaccacgagcattccaactcacgatttttatggttgctcgcgggactgcagaacagtctccgctgcattgtcgtagtcaccaaccgaatccatgaaatcattggaaacaaagtggcaatcattttcttcaactgacaaggttgagttgtggtcattaggaatatttcctctgcatctcttaagagtttgcctcagtgaaaggccttcactctgccttttgaattgcacatttgggtttaaattttcctttccagtagtaacagtggctggtgcaataatagagttaaaatgattggtgccagggatagccaaagtttgattagaaagggaagtaatggctggaggtgggggagggtatgtggcataagtattggagaccaatggagaagaggaaatgggcatataaatggaggtgagatctgtgtagttggtaggagaatcgggaggaagtgaagcagcaggccctttcgatttggtatttcccacatgatgagaatgagacatagcagaagcattagtagcagaagattgaaaaataaccgatgatggctgggatatcaatgattgtgatattaaatgactaggcatagtgttatgtggaacgttggttgaaggattttctatgtcattgatatgagaggattcaccagcaaataaccttcgaggctgtggtggaccacgcaaatgcaattgaggaattgctgaagatagacttttctttgcaagtcgagttaataatggccaaacgtcacccttggcaaaatcagttcgataccgatcgtaggaagaggtaggcaaggcagatcctttgatgaagggctggtattcaagggcaggctcttcaccattatcaagtttttcaagaaaaactgaacatttgttgtaaggatgtccaataatcccacattccatacaatatttaggcagcctctcatagcggaagtcgacccaaaacttgtccttaacatgacttaaagagatcattctccctctcttcagcgacttagacatccatgagaacccggatacgcagaaaaggaccccatccttcgtttaaagaatcctcaaaaacatcttcatattgaccaataatgttgccaagagcaattgctaaagacttggtcttgcttaggaaaggtagacgataaacttgcacccaaaagggagtaaatttaatgtaacaccctaactnnnnnnnnnnnnnnncgtgatttttaaacgtactgtgcacctcgttgctaa

SEQ ID NO: 26326 - DNA, 6373 bp, Cannabis sativa
atagtcttaagcttgcccacttctaccggtatgctaccattgagtgagttttgtgatatgtctagctcaagaagtgatggaaaaccaaaaacttctttgggaatagttccactaagactattttgtgaaagctcaagaaactgtagatttagggaatctgcaatgtttggagtaatgcttccatctaagttgttgtctgataaactaagttctgagatttgagtgaggtttccaaaggatgaagggatctttcctgataaagtgttccctttcaaatccaaaatttgcaaggaccttaacgaccctatagaagttggaatgacaccttccaaaagattagattccatggctaagaggattaagttgaccaagttttttaatgttggaggaatagttccagatatttgattcccaccaaggtaaagataagttatttgagttgacaaattagctaaagattttggtaaaggacctctgaagttgttatatgccaaagacaagattttcatttgactgcagtttcttaaagatgcaataaaatcaaagctattgggtaagttctttcctaggtgattttgctctaaattgagtatcctaagatgcggtagattgatccccaaactagctggaacttttcccactaaatgattttcagaaacatcaagtatctcaagcttagaagcatttgaaaatgattcagggattgtcccagaaaacttattaccaccaatatgaaattctttgagattggaaagttgaaggcctatgtagggaggaatagtaccttccaatagattacctgctattgataaactgatcaaagatgatatgttgtaaagtgagggaggaattgtaccagacaggttattagactctattgaaaagagtttcaaccttttcaatttgccaaattcttttgggacagtacctatcagagtattgtcccctatagaaaatagttcaagtgatgaaatatttgctagggatggtggaatttctccgacgagtttgttcgagtagagactaagaaaaaagagcttggttaaagagccaagttctgagggaatgagccttgtaaatctattttgactgagtgatatcactcttaggttcgagcaataactaaggttcaatgcagacaagtcaccttctaacatgtttatggcgagactcaaatttcgcaatctagataaatggcaaacttggtgtgggatttcaccagagaaactattgtttattagattgatggacctcaaaaatgtgagatttttaatgtaaggtgatatggtacctctcaagttatagcctcgtaatgtcaagtttgttattctttgatgtctgtgaccgcatgtgactccattccagctgcagaagtgattggaagcattccaagatctcaacactccaaaagggtcattggagactgattctttgaacttgagcagagcaaatctatcagtttcgtttcctaatgcattgctcatcacgacatcaaatgacacaatcaaatacaagaacgaaaaagcaagccaaagagcacaaccagtgatggtgatcttgagtttcatggctaatgaatggtactaggatatgctgcctatgcaggagttatatatataagaaaatggaggttggttattaaaccttaacaaagtcttcacaccaattactacgttggagcatatttgattgaattaagagttgtggacagagcacaggaaataattgaactaatacatttagtgggttggaaatttctttgataatacatacacctaaccaatggagtgaagacccaccacgcaaatgaagtttcaaattgattagaaaaattatagtagaaaaaaatatatggagtataattgagttgtaacacattattatctatcacaatattcaatcccctcattcacgtttaatattagagttaatcataaccaagcaagtgttttgagaaacaatttgatgattgtggcaataacaaaatatcaccctgctactattataattattctttttttttcactttatttatttatttattgttttaaatcagctacaaatcttattattattaattataattatcgttgttattattattattattattatgaaatataatgccttaatgtaatatttatggtaattttacatctcagccctctaatttgaggactaaaatgtaatactaaattttaaaataaaataaaataatggttagaatgcaaaaaaaaaaaaaaattgtagcccaaattagtgtagattcaaaatccaatactattaatggtgtagaatttggtgtataccactttagtgtgtcattggagtagaatggtgtaaattaagatttcacacaaatttgatgaaatggtgcaccattggagatgttctaagaccatctccaatggttttgctaatttggtgtagaatctgtaataatttagtgtggaatcttttactttttgtataaaaatttcaatgattcacaccaaatatccagtcaagtaaatatattttacgatctcatatttatattacttacataacatcttcaatggttatgctaatttagtgtagaatctgtactaatttagtgtgaaatcttttactttttatgcaaaaactccaataattcataacaaatatccaatcaagtagttatattttacgatctcatatttatattattacattaataacttgaatagttcatttatgatataattatatcatgactattagtaagaattaaaatgttaaaataatttagtaaaataaaatagttattaaatcaattaaaataaaaaaaaaatatatatatataggacatttttaaaagagttttttgcgattaaactctctcaactatcactctacttacacttaactctctaagctcaaattttgactacttaattgtttgcaaatttaaggtgtcatccactttctacagttaactgctaacatagacagcttatgtgtatattcttatacacatgacacgtttatattggttcacctaatattattattttagaaatatagaaaaaaatatttgaaattttataatatttttattttttaaatattttattttttatttttataattttctttaattttaaatgaattttgaaaataatttttaaataataatattttgtatactaataaatgtgtcacgtgtacaagagtatgcacataagcaatttatggtgacagttaatcggatgacaccttaaatttactattggttcagtagtttggagggttttactgccaaaatttgagcttgaaaagttaaatgcaagtgaaattatagttgagagggtttagccggtaaaaacttttcaaaatgagcaaataaaaattatgcaaaaaagagctcatcaacaatacgaagtttctcaagaatatcaagattctcacaataatttaagttgatataaccaatattttgatattcttcaaggttaagatcctcaagtgatcaatttgattattaaattattattttacttaatgtttattttatttaatattaagttattattattttgtaatttcaattaattgttaattttgtgataaatttaatttaaagagattgttttttaaaataaaataagggttagaatgcctaaaaaaaatactaaattggtgtaaattcaaaatctaacaccattaatttaatagtataaaattaagtgcataatttagtgtattattggaatgaaatagtatgaatatttcatactataacttgataaaatagtgcattattggagatactctaaagattagttgattaataaagtaattttttcttaataaataaataattgatccaatgcactcaatttacattatcatagattcaattggatctaatatgttatgaaatgtgcacttacttggatcgaattagataaatattcctactatatatttatattttgaaattaataattttaactcttgtaaaataatttccgatacattttagagggttggttaatttatttattttttaagttggccaaatttttgttaatattgatgagttacagcaacagctcaaatatagttctactttttttttttggataaaaaatattgttctactaggagccagaataaactacaaactgttttgattagaatacgacaatcagagtttaaataggacacaatagaggctaatgatattgatgagtgaacgtacaaaaagtttattaacttattattaagcaaccaaacttgtggacatatggaaacgtacgtggtattgttaatgctacgtgtcatgcatataactgacgtgtaaataacacctcaaatatttaaattcattgtggattctttccaagatcttaaactaagcaatttgatagataattatacatagtcttattagttgaactgagatataaaaaagacaaatttcttttgatagatactcttgctcaacatcctgttcatgggatatatcgcttccttaaattatttttgtatgtacaaaatgcttttaaaactaatagaagtagcaatgccgacttaagaatctttctactaaatattccatttcaccaacatgtacaaattaataatcttcaaagttgatatataaccttctcattcatgtataattataaactggcaaagatgaagagcctcactccactgatttctttgctttttctatcaataatctttttctcggacgcaaattgtaataatcatgttaaagaaaatttctttctttgtatgtcaacccaattcaaatcctttacccaaagtttcaaaatcatgtacacaaaagactctcctctataccaaccactcttagaatcttctcaacagaacccaagatggtcaaactccacagcccttaagcctcttctaattatcactcctttccacgagtctgaaatccaagcagctgttgtgtgcagccaaaaaaatgatttgcaagtcagaattcgtagtggtggtcatgactatgaaggactgtcctatctatccaaaacccctttcataatcattgatcttattaacctaagatccattgatgtgaatcttgaagatgaaacagcttgggttcagtcaggggcaactttgggggagctttactatgctattgccaaggaaagtgaaatccatggattcccagctgggatatgtccaagtgtaggtcttggggggcaccttagtggaggtggtttaggtacattggtgagaaaatttgggttggcagctgataatgtcttggatgcttatttagttgactcaaatgggaaacttctagatagaaaaagtatgggagaggacttattttgggccattagaggaggtgggggagggagttttgggattgttctttcttggaaaatcaagttggttaaaataccacctatagtgactggctttacagttaccaaaactctctcacagggtgccacttggcttgtctataggtggcagtccattgttgaccaattgcctgatgatcttttcatcagaatcattatccaaaatgtggggaatggggatcagaaaacaatccaaacttctttcaactcactgtttcttggaagaatggatgaactgattcctttgatgaatgagaggtttcctgagttgggtttaaaggcccaagattgtattgagatggactggatccaatcagtcatgtactttgctgggtaccaaaaagatcaaccaatagagcttttacttgataggaagactctttacaaaagctctttcaagggaaaatctgactttgtgaaacaacctatacctgaatctggattgaaagggatttgggaaaggcttttggaagaagatcagtttgtatgcatgataatggacccttttgggggaaagatgaatgagattcctgattcagaaactccattccctcacaggaagggaaatatgtacaatatacagtacttagtgaaatggaatgaggatggaactaacgtgtcaaacaaacatgtaagatggattagaatgctctataggtatatgcggccatacgtttcaaactctcctagggctgcctatattaactatagagaccttgatttggggacaaatagattgggaaagacaagctttgaagaagcaagtgtttggggtacaaagtacttcaagggtaacttcaagagactagttcaagtgaagaacaaggtcgatcctgacaacttcttcagaaatgaacagagtattccacctctactagatttaatatgatgtgatatacctgcaaaaaagttaagtaggaaaaagaaaatggtttttatgtatggatttcatggaaactagttagttttatatcttttgctaagaaagaaagaagtat

SEQ ID NO: 26327 - DNA, 3592 bp, Cannabis sativa
atcttaaatggttttaaacggactagctagtgtgacgtctcgggaaatcggggcattacaacacccttagaattggttttctggttgggaacccagtttaccagttgtagaaattttggcaccctagattttcatattttagcgatactgatggtattgccatgttatccatcgatagagaaacttttagttttgattttaagtctttgaaaagtactttagcatatcatttatgagttttgcgtatgttgtgacttaggggcttgtaaattgttgagcagcagtttccactcaggattaccgacatacttgcatacggaataatcaaggtaaaattaaaattagttagtatatataatagtaatagttgtagttgcatatatgtatacatgtttagtgtgcctgttacttgtcgtcacaataatatatatgggtatcggtaaggtgtacatacagttgtgctgagataccaatatatattaggcaaataaatagccattagattagcatattagggtatcagtgaggtgtacatagagttgcatagagatgccaatagatatatgctaagctatcatatagtatgaactaaccgctaccacatcagtacgactagagtactgagtataggttggatacgtagttagtcatactttgttgagaacgttcctgacccagttatcagacttaggtgtatgggcacttggttatggtctagatatatatatttaagtttatgattatacttttcttaccgagtctgccgactcacagttgttacatgtttgtacaagtaagagctataattgaactagtgtgagtctaaagctaaggatgaagattgtacatatcaagacggttagatctagagtatttagggtcttcgagacggtttaggctcatttttgatagtctttagaggataacttttgaagtataaataattaatcttttgtcacttttaaaatgggacaatgaattgtgtaaattattaaagttaagttatttaagaaagatttaattattcacgttttacaataaaccccttgtttagtaaaggcgtgcacagtacataaaaaatacaataacacgcctagtctagtagggtgttacacattcccaccctgtttggtgatgttagtgatatttagtttattataatggtaatgataatagaattatgttaatattacaatatttggttttacttaaaagtgatgtaattaaattacaatttagtgagagttaattgttgcaaaatcccctgaactttcacttcactagcaattaacctccaaaacttattttttggtgaaaaaattctcaaaactcgtgttctgttagcactttgctatttctatccatttttagtgttaaatgtcatgctggatcatccacgtatacacagtatacttatggtacagttttattggcttaagtaattaaatattcaaaaaaaaaattaatgaaaaaaacaaattttactttttttcctttcattttcatttatgctttttatctttcttcttcttcatcattctttatcatcatgcctatcaccgaaaccatccacaaaaaaccacccatcacaatcgaaaccactagcaccatccacaaaaaaacaacccactacaactaaaaccatcaccactcgtccctatctcagatcttaatccaagatcttacaaaaacaaataaaaacacaaatattatttagaaaaaaaaatatcttagatccaaaaaaaaagagagaaaatgtcaaatttaaaactttaaaacctcaaatctagaggctttgggaactcaaaaacttcatggtgaggtcatttccttccgacagtggcctaaacagagctgggccgagcggccttcatagtcactcgcgacagagaaaggtcggaggtgtattattcatggtcagagatgtgtccttcgtggcttaagatgttcgtggccagagatgcgtcatttgtggttgatttttggctcaccaacatcaacgtacaactgggttgacttgggcagaggcaattttctcttctcgtttagtctctctcccaatctacccatatggttttttaaatttattttttgtgtttgaatttgagattgagattgattatgaatttttgttgttatttttgatctaaaatgtgtggaatatttgagatgtaagtttgttgttttaaatatgaatttctttgtgcttggattttgatttgaaatcacgacatatggtgatggtggtggtggtttcgattgtggtgggtggtggtttttgtggatggtggtggtggtggtaggtttgatgaagaaaaagaaacagaaacaaacaaaaaatcacaaataaaaaggatagataaaaaagattttttaaataatttttttaatgctaaataattatttttatattttatttatttttaattattttattacttgtaccaataaaattgtgccacgtgcatactgtgtaaacgttgctgatccagcatgttacttaacaccaaaagatggatggaaatggtaaagtgctaacaaaacatgagttttaagggttttgctgttaaaaaatgagttttaggggttaattgctattaaagtgaaagttttgagagttttaccgctattaacttattcgatgatgattacattatacttatataatctccattaaatttaaaaagagtaataaggataacatcaaagagtactaaataaagtaaagatgaaatgactgaaatgccctatgtttatacaaatttgaaaaatagtaaataacagtataagtacccaaagttttaagtttgtaagttgcataaacctaatgtttatttttagcagtataaatactcaatatttgtaaaactgtaatttttctttaattttgttagtacagactctattattgtcttaaacaggacatatataaggtccaaattctagatcattagatctagaccgaaacatatagtgttcgttacttctaaatatttttttgataaattcaaaatggagtttgtacagacaaaactggacgaaaattacaattttacaaacgttgggtacttacgaaaccgaccttgaaaaaatatgccttgtatatatatatatatattatgtatgtaactttaaataaaatttaaataatatttactaatataaatacattctaaacaaataagtcatcacataaacttatacatttcaatatatcacttaaatattatacgtcttgtatttctagatgtaaattaaaagtattaattaaatttgtacaatcaagttttacaactatatcatgtataatggataacatagttaatctgtttaatctttcttgagacatggttgaacggagataagatttgatgaaggtcaatttagaaaaactcttttttgcatgggcagcagtgacaaaaatagttagagaaatcctataagcaatccaagtatttggataattgccatccacttcttttatatagttcaacacatcgatagctcatttggtaaactttaacgcaacatatataactcctgtcataggtcatcattgtcaagatctgaaatctcactatgcttcattaag

SEQ ID NO: 26328 - DNA, 1939 bp, Cannabis sativa
ccacaaatctattactaactttttgttgaagatactttataaacgtaagtcaattataaatatttttatatttatgtacctacaataaaaaaaaaagaccttttcaaaaaaaaagaaaaagaaaattgagtcttaaaaattgaggcttacgcaatggcccaaactatctaatgcttagatcggccctggcctctccacccataatcgagcttgattatcttttgttcacgaattaagcataatcaccatttcaattttctacatccttaaacgaagaactgcacgtaaagcttaacatgaaatttttagatctcattctgagatttttagaacatcttgaatcgtcaaattgttaataatattaaagaagctatgggtaaaatactgatctaagcactcgaaagtgaaaatctaggatgtagcacccaggcgccacttaaactctacccaagaactcaggaccgtgcgacgtccgtacaatttacgaaaaaaaaagtaaattttaagtttaaattaggtttatttttagagttctatatataagacttttagattttactttcagcaatgttttgaatgagagaagtcaataaaagaggagaatttatccatatatagtttttcttcttaaagtcttttgattttcaattataattatacttatgattatgttttagattatgaagtagtccttttttaggttgagagttatttcaaaagccaatacatgatttcttgaatgctttgattaatattattattttattccttcatattgaattgtttatattttcaatgcttagttttatgaatagtattttgatcttgtttattaagttttacattatcatcattcttagaatttatatatacctaatagtctagaattttaagtttaagtgataaattacttttaatgatattgtgacaggtattgttaattaatgatgatgaagaatataaccgaagttaaatgaagtatatgctaatttaattttttacttagatatattaacttgtctccatagagattttaatattttcctaggttaaatagattgcatgctttatggatctattacttagtgaaaatatttaattattgagcgttttgtcgtaattaattgtaatggggtagttgggataagtaattatctgtgggactagtagttcaaactaagaataaaatataatatttatcattgttcatgattgattgttggagggggagaataattcttaactatttttaaaattgtaattgttattcatttttgttttcttttcatgctatttaattgcaatttgaaatctctctttaatttatgtttgacagtgaaaaataaattaatcataatccttatagaatcgactcgtagttacttttatattgaaataattataagtattggaattaaattaattattaaattttatacgacttacgacacgcataacataaactttttaatatattacatatggatcaccatgaataagatattttgggaaaatgaagctattgtacaacaagatgtacataatagattttactataacagtttaaagagggtgtagatgataaacattgaattgggccctttgtacaaaaaaatatattatgagattgtttgaaactgtctatgttgacaaaaaaattgtaataatttttagattaataccattatttaccaaaaaaaaaaatatatgaatatgtacatcattggtgttccaaaaaggaagctgaggcggccagggcagaagctggagctattcggctggagttgggcgaagccaacaagaagctgttcgctgccgagaagaagatcgccgtgctgaaaaagaatctcgaagctgttgatcgctttgaggagaccatcgagatcttatctgctgaagtaaatagtcttcaggatgagaggacttctctgcggcatgt

SEQ ID NO: 26329 - DNA, 3548 bp, Cannabis sativa
aacaataatcgtgaaactcaaaggaaggaagaaattgaagccgcctagaatgagagtgattgtgaaaccgaaggacaatatgaaatgggaaagaagaaattcaaatcgaagccacccaaaaagataatcgaccaaaaatagcagattttgcaaatcagattgacagtcccccagtccccactcaggttattcttacttcttctcctttcctaataagcagaggggaagaagaagacgacgacgaagaatttgaaggttttttgaatcgaaaggggctaaatagtagtgaatataattgaattggagttctgttcgaagtattggatttaatttcgattttatgatgttgatgagagaaaggtaaaaggagaagaaggatgagcaagccgtcgataaggcctcggccagctagacttgtcaactttgctattggtaagcttgtttgccgattttttcttgattattgagtaccgactcagctatggtgatcaaatatattggctttgcttctagctgttgcaatgaaagtcatgatttatagaaattttatactgatgataaccatcttgatgtggttgcgcaacaaaatatcagtttggggaaaaaagacaatgcagaggatgccattacaaagagaggccacaaaagaaacttgatgtggttggtcgagaaaccatacatccagatcttcaataggaatagtattcaggatgtcatcattagaattctcagattttgttcttgtggagtagtatatatgtaaagattgtctatgatcaacataatacttgaattgtttggtacaagtaagagtgttgatgagatgacaccatgatttgtccacacatttacaaggcagaaaattcttaacaggcaacctcgacaatatatctacccacaactcttctggtaagctgggtttgctaaaattgatgaagccaatgattcaaatccaatcggacaacatcaaatcttctggtgcaccaccctattgattttcaataatgatgttgggttttggaggaagaagaaacaaggaaaagggggcttaatggcaatcaagggacatgaacaaagcctatgatcgactcgaatggaattttctcaagaaagttctcgaattgtttggtttctgccctcaatttgtcaagatgattatgacttgcatctcaacggtctcttatgctattttgcttaatggtagacctttaaagaaattcatgccaagtaaaggtattcgccaagggaacccaatgtccccgtatcttttccttttgtgcaatgagatccttttgagacttatctttcgtgaacaaagtttggggaacatccatggtagtcggctggcccgaaatgctcctgaggtttctcatcttatgttcgctgatgacaccattttctttcttcggctaacactgttgaagccatgaatctaaataaatgtatcaccatctttgagggctggtctggagaaaaatgtagcaagcaaaaatctgggatcttattttctagtaattgtaccagggccctcaaaggagctgtggaaggacacttggagttcgggtgtatatccgatttgtagaaacacttgggtaaccctttcactttcaccagaagtaagaggaaagatttcaattttcttaagtcaagattttgtgagtgtcttgaaggatggaggctgagaactctatccaaagtagggaggatggttttcattaattctgttgcccttgccatgccttcctactcgatgtctactttcaaatttcccctctcctcttgtagagatttggatgctgttattagaaggttttggtggcttggatctcttgacaataggagattccttgctaccaaatcctgtgatgccatttgccaatcgaaacagagaggtggtttgggttttagaagacttgaagatgttaaccttgcctttctctccaaactggcttggttgatggctaccaaagtggatagaccctagttttatgcactcaaaggaaaatacttcccgcgcgactccttctagagtgtgatggagaaaacttctgactattttatttgtaagggtatattgaaggctcggaacatcttgctagtggtgcatgcacggttattgcttcgggggaggagacagatgttttgtggcaaccttggatcccctggctagattacaaaagttttcgtgagctgatggaatctataagacacaaagctcctagtcttaaaaatgttgctgatctcatgtatcgaaggacgaaaatgtggaacacggactaccaaaacttcctctttggtcctgaaattggtggaaagattggggaaatccaaattgctaaagatttggatcaggacactcttatttggaaacattcaacctcgggcagattctctgtcaaaggtgcctattgggaagctcaggaaaacagatttggtgaatccaggaagatttggagtttgatatgggatcattctattcacccacgtctgagtatgatgctctggcgtgtttgtgctaactcccttccttctggtgacaaattcggctctagctccgaaactttttaccctctgtgtaagtctgatactgaaacaccttggcacttattcgttaaatgcccttttgcctctgccatatggtttggtggtcccctgcctttgcgtgtcaatgcccttccttgcgtggatatggtggctttcatctcagacttatgcaacaattctagtcttgacatgagaacatccattttaatttgtgccgctaccacttttgagaccatctagaactttagaaatcaagtaatacactctccctctgagattcaaccccgtttcaatcaggctctcttcagtgtatttaatagattccatgaaatgattccaaaagaatcttcttgctttcggatggccacgccctcatttgagcctcctccgtctctgtccgttccgactgacaatgtgataattgttgatggttcctttggatgtgccttggtggtccaaaccagaggaagttctgattggttttggtgctcgtcgttcggtacctgtttaaatgccctggccgttgagttagaggtgatttggtctgctctgaattgggcatccgatcatcacttgaatgaagtctccatcgtttcagactctaagatcctagttcaagcattgaacctgaagaagtgtcctgactggcatctgtttgctactttttcttctgttttatgtctattatcttcctttgctgtttgtaatttcttttttgtaaaatgatgtttcatctccaatgtggacaagcttgctaatgagtctcttcactctcacagcagcttttcgaactgtaaaggggagggatttccccctgtaaatcccgatatcctttggagtaaatctatcccgaaccgaagttctttcaaaaaaaaaaaaaggtagattccctttgcactattattcattctacaaagatgaaaaaaaaatacaacaagagtttattagagaaaaatacaagaaatttttgtttttaaaattgaaaaagtgaaaatattttttaa

SEQ ID NO: 26330 - DNA, 2433 bp, Cannabis sativa
aaatcatattagaaccataaatcaatatcaaacaatctccatctagaccctaattaactgtttagctactcatgttcattgtagcaaattcacatattaatcttagaaaagagaagaagagaatgttgaaaatcctctaaaaaatgcctctagtattggcttcgatctccaaaattcgtacttagttgactgctttgatttccttctctattgcttctaattaaaagtttatgaattttttcagctctgaaaacgtactaaaaatactaataataatgtgattatataagctaacaaggttacctaaaagatactaaaaagatttcaaatttaaacttaaacaagataaaactcgcaaatctttttttcttgctatctttttatctctcttttttttttttagaaatttcctgctgcgatgactgatagtattttggtcataactctctcgatatttatcgagatttgacaattcaagatgctgtaaaaagataaaagagagatctagaactttaatgtttgactttttttcaaaatctgatcagatcgtagtcgaatttagacttgaagtttcaactttatttttttgcacaattttctctattttatctatcatctttttgtgagatttttttttttatctttttttccatcttattccttcgatattttctgatctttttctattttaaatttgtaaaaataaaagataaaaagcgtaaaattactccaaacaagagtagaactaaattaaaaacacactaaaaattaacctaaaaataatactaaaaataacctaacaaattcctccaaactaaacatttactcgactactcgtcctcgagtaaaacactaaaccgaaaaataaatgttaaacaagtcaatctccataacatgagtaatgttcaagtagactcaataatatgatcattaaaaatttcacttatgcataacaatcaagaatttcagtttaattacaccattgacacacttcaattcgatttcattcagctcatgaaaccatagaatgcaattaactaacaattgaacttctttatgcatgccaattacaactatcaatccactagtccaaaattccatatgcttgcaatacttactattctacactataatataaatcaatgcacaaccaagaattaaaaggtctttttaggcttgtagtgttaggcttaggtaagggtagttgaaatggtcatttagtcttgcctatactataaccttctccaatcatgtcacccaagaatttttcaggcgcaatcccaatactcttttttttttttttttctaattacaagagattttttttcttttttttttcaacaatattgcaacaacttattacttttttttttttcaagttgctccctatcaatttttttttttcatattctctcaattttcacacttattcccacacacatataacaaacttctcatccaaattcctccaaaataaagatcctcgtatggtacaattagggttaaatttttggatattcaaggtttatcttttctaggctcaatatgtgtagaaacaaagaataagttaaggctcaaaaaaagggtaactaggataaaattagaaggatgacttgaaagacacaatcgatccaaagaatgcctatatcactttcctaatcatgcataatttattatttcgcgtcaaatagcaagcaagcaagttctagaatttttttcaaacaactttccacattgcacaattagcatacataaaccaattcaattactagaaaattacctaattgattccatgttcttttaaaacacaaaattagtcaagagtgtaataccaccaagcacacaaattttttgaaaaataaataaaattttcaaataatgctatctacctactttcaaattgactcatattaagcaattaactcaaaataaagaaacaatgaaactaaaaaaaaattagaaacaaactaaaaataaaaataaaaattaatacaaatttaagttcaccccaaactaaattgacacattgtccccaatgtgacattaaagaaaaaggaaagggaacttacttgagcgctacatgagtatggcggtggtggtggtaattgtaaaattcaactaggatacaatccacctcgtgcatccataagggcccttgtaccaaatgaaaaaaattgtcctccaatgttacaaattttaaagctatccctagaatgagagtcaccttgccaattcccgcacatcagtcttttcatatgtcgtcaaaaagtttgaaatcgttctttggacttccctttcttcttgttggtagttacttcacgattatcttttaacacttccactcgacaatacgtatgaatttcagttgcggcaaagacattgaaagtgtaacaccctaactaccttaggcgtattacatgatttttaaacgta

SEQ ID NO: 26331 - DNA, 3244 bp, Cannabis sativa
accaagaaactaaagaagaaaggttcgaatggtgatacaagtgtgactcgcatgcaatgatggaggaggtgacctatcgatcccctggagaaatctgaagaggaagaagacgatgttgatgcgaagcatgggagaaggagtctggaatcagattgtgccccgtacgatttattccaacctcctctctcaccccgtagctctttgaaagagattcaaagaatggaggatatacagaaagatttttcaagctttgtccaagcaaataagcaatgtaacagtaacattgctagaggtatgtctgctactccccctgtgctacgatctgcaactatagttaggaatcttgaaaattcttttaagggttctgaacaggggaaaaaggttaagatttattgggaggatatagaagaggaagttaactattggatgccctctctggtctgctatgtcttaggttccaaccctcctctgcacatccttgaggggtttgcaaagagactatggaatggcaaagtagacaaagttaaaatgctagcatatgggatttttatcattagatttgattcgattgagagcagggatgctattctgaatgggggatacatattttttaataggagaccagttataatgaaggcatgggaccccaataccaattacaagaagggagatgtgaagcaaatcccaatttggatttagttagaggatttggatctcaaatattgggggcaaaaatctttgtttaagattgtaggacaacttaggaagccaatcatggttgataatgtcactaaagaaagggagagactcaattaccctcaggtgttgattgaagtgctaatggaacaagagctaccggggatgttagaattttgggatgaaaatggagtgaacacttcggtaggggtacactatgaatggaaaccaaccatttgcaaacattgtgatggtataggacatttaaccgaggaatgcaagaagaaagggaagacaaagcaagaatgggtaattaaggtggataaaagggctgaagttaacaagagtaaagtagatgaagatggattccaaacagtcagcaaaggaaaaaagcagccagaaggcacctgctacaacaacaattgaaaacacttttagcatccttgctgaagacaatggagaaaaaatgattgagttacaagaagacatgaatattgaaaaggataacacaagagagggggggaccctctcttggcaatatataagttcctttgttggaatgtccgaggagccaacaacattcaaaaacagaggtcaattaagcaatttatttagactcagaatgttggattggtagggctcattgagacaagggtcaaggttcacaagatggggaccttgtaccttcatgtgtttgatggttggtgtttctcaacaaatattgcttggcataaggggggagaatagtaatagcatggaatccggtgaggtacattgtagatattataaagtgctcaagccaattgatgcaccttaaagtttctaccttggacaacacttatagtagttttcttactttcatttatgccttcaatgacaaaaatggaagacaaagcctatggaaagacttaaaggagatgcccactagagacaattggatcttaaagagggattttaatgagatcttggcaaaagaagagagagtggggcacagagtgaaatactacccggatactgattttgctgaatgtgtgaactattgtcagatggaagatgttaaagttacggggaacttctatacttggtcaaataaacagcaaggaaatgacataatttgctacaagatagacaggattatggctaatcaagcatggttagacacttatcagaatgctgaggcaaattttttaaatgagggccttttcgatcactctcctggcattctccccctttatcctagatggacaaatgggagaaagccctttagatatttcagaatgtggaagagccatggtgattatgataagaagatatctgaagtatggaggaagaagattgggggaacaaagatgtatcaggtagttactaaacttaaagccctcaaaccggttctaaaggagatcaacaaggctggtttttctgatattcactcagctgtaattcgtgctaaaaacgtgttagaagaaacttaagttgagctccagcaatatcctcttaatgctagtttacttgatgcagagatgaaggcaagagaaaacttgatgcaagtgcagaaagattttacatcttttctgcaacaaaaggctaagtcatgctggattcaaaatggtgatagcaacacagcccttttccatgcaagtataaaagcatagaataaagcaaaatcaaattttctcaatagagcaactaaatggcagcagagtaatagattcgaaccttacttctgaggctttcgtggagtactacaaggtactgttgggatccaaaatgaaagataagaagagggtacaaaaaaattatagcaagaggccagtagtgaatgcttagcaagctgaaatgttaactcaaagatttactaaggaagaggtgaagcaagctttatttgatatacctgagaataaggcacctggaccagatggattctcaagtttcttctttcaagacaattgggacttgattggagaggacctttatcaagttgtgacatctttcttggaaacagataaattactcaaagaaattaatgcaactgttctgactttagtacccaaattaaaatgtccaaatactgtaaaagattttaagccaatagcttgctgcaatgttctttacaagattgcaacaaagcttttgtgttctagaatcaaaaacattcttcctaatctaatctctcagaaccaaggaggttttattaggggaaggtttattgggcataacattatgatttgtcaggacataatcaggcattatgggaggaaaaataacaagccgagttgcatcatcaagttagacttgcaaaaggcatatgacaccacagaatgggatttcattgaaaaaatgttgactgacttactatttccccaaagtttcattaacattgtgatgacttgtgttaggtcaccaagattttctctaatgtttaatggaactttacatggatactttgaatctaagagagggcttagacaaggtgatccaatgtctcctctcttatttgtgattggtatggaatatctatcccgaataatggggatggttggggagaaat

SEQ ID NO: 26332 - DNA, 1919 bp, Cannabis sativa
aagaattgcaatgttaggctttttttctaatcaaacaataaaaaaagaaagaaacgaagattttcctggaaaattagatgaaaaataagctacccaccttcttcttcggatactaattcaagtgattggagattattgttaaagactccaccttttatagaaaaggggtttctgtaaaccctaattctaatttggaggatttgagcccagcccatttgttttttattgggtcagcccatttgttttttattgggtcattgatttggttgctgtcattttcaggcccagcccaatacctttttcatttttcttttgagaaatattgtatttttattttgtttatgtttgtatgacatttttacaaaaaagaaagcatcaaacatgagatttctttttttctttctttttaatttgatagtcataattcatggcttactataaatgtagtttccaaaatatgataattaattgatataaaagtatactagaagtatggctatttaaaccatgttcaaaaaaaaataactattggagaatatttaagtaggggcaatactttgtacattggcatttagctagtcttaatgccaatgccaatgccaatatttattttgaacaccccatgcagatagaatcaagattttctgttaaaaattagcgtctcatattgtattaaacttattaaaatttgacatatcaattaatttaatttatataaaatatattaattatttttattgattttattagaggtttatttttttataaataaaaaattaaagtataggataccactttttaacagtaaatcttgattcattcagggaagactcccatttctaagtatttcgatgaatctctcattgattagaaaagccaacacatcatcttttcattctctctttagcttatgtttgaagccacacttgcgccatacttcctttattgagttgcatctccaaagtccatgaaaaatattttcattgactctcctagaacaccttacaacaaagcgttgttagatgttggatacaactccaaatttatttagccaaacaaagcttgattaaatagctctaaatccctaaaccctagccccctttctttttttggcttgtataggaaagaccatttgtaccaatgtattttgattgcatgttccgaagaaccccactaaaattaggctgccatgttatgaaggctgtttatagtgttcttggggagacataacaattcataatgtaagttagaaattacttgaacaatagatttgattagtatttacttgcttgccaaagagaacatagattttttccagcccctcagcttgttcctaccaacaaaggatggaagatcaaggtacttaccatgattttccaccaccttaatgcctataagatcaaccacttttgcccttgtatcctcaccaactcggcacccaaaacaaacctctgacttgtggaaatttataacttgaccagaagcaatagtatacttgttaagaagcacctgaaaattctcacaagctgctcttgtagcatcaaaaaagattaggctattatccataaaagataagtgagatactacccatttcctcctccctttgaagacagtaatactagtaatctatgaataattctattttggttataaactataaaaatactaattattctattttttaatatttatatataaaaaaaattgcaataaaataaattcacaacatacaaaaacactttattttatatgcgtataaaatataagaatcatgccgctaacacattatttaaactttaattttaaagtgtcatttttttccttaaatttttcaaaatttcacataacatttttgttgattagagattttcagcaaccaattaaataatagaatgagaagagctgtagaagctttaatg

SEQ ID NO: 26333 - DNA, 5048 bp, Cannabis sativa
ttttttttttgttgttgtaaataaatttgtgtaatttataataacaatctttccctaaaaaaatataacaaaataattaaattttaaaaaattataaataatcttaaataattaaatatacactatcagaaaaaaattagtagaaggattgtaattaaacttatttgtatatttatttattttttattttttaaatatttatatttactgtctttccctaacatataataaagctcattaaggtataaaataatgtcacctgcttactttaccacatttatatgcaaagagagagggagctttggttctcatggttgttccacagtaacacccacaatatgctactctactaaactaattactcactcccaactcccaacttttgtctgaaatttttgcttcaaaattgcttcttttccttttttttttctcttttcctgtacaagtatttgactgtgtgtgtgttcagagatgcaatttaacagcagtgaagctcctcaaacaagatacccttcaattcattactgatcagtaaggtttccacttcttattccttcagcttaaaattctttatgatttgttttccactgcaaagtatggaccttttgttttgttttgttcttggtttttgttgagttgagttttcttgcttttcaactctgttatttatgtacagtcttttgttaatgttaatgttatgtaatgggtatataactgttttcccagatactctgtctttctattttgttgtgattttcagtgaattctttgttttgttttgtgtatgtgactgttttcttcgatacccatttttgtaaatctcgtaaagcttcaagatttggtgaaaagtttgtacatttatggttaatgaaaagaatgtaaaaaaaaaaaattgtattgtgtgaggtgtaagtactaggaccacatggtgtctttgggagtttcttttctttgattccccccctccacctgttttgtttggttggtgagaaactagaggaagaaagaaagttcaaagctgctctgaatagttgactgtcttttctttttgtatgttcttagttgtcttggaaacctaacaatattttgtctggataatcatgtaatcaattatgttaattgacacttgggttttgtttaacttttggttctgtaattatcaatagtttgtaacagaaaaaatggaaagaaaagttgtctttttgaaacttttgcaattatgtttggtttttatggtggaaaacatcattattttgtctattcaactgtactaattactcctttactttagggaggatgttgcattattatgattttcacgtttataaaggttaattttcttgacctgagttcttcttttctctctaatatgaaggcataattttgctttgtactcgtagttaagatttcgggtccatcctattttcatgtcttgtctgatttctagttctattttgcaattgtgtacagtacaatcttgcatttttgtgtaaagccaaagagcattaagtatctttgattagcttatgcgcttcggtagagacttttcttgtgtgtgaattaagatatagagtttgttttttcgtcatagatgtaacttcattttaacacttactatattgttgctttaggtgaaaataaaatatggaccggagcagacacaatccaatggttcgatgttcatgttcaacaccatccgaggaatcagctttagaccttgagaggaactgttgtagccattctaatttgccttctttaagtccaccaacaacacttcaaccctttgcctcggctggacagcattgtgagagtagtgctgcttacttctcgtggcctacctcaagtcgattgaatgatgctgctgaagaaagggctaactatttcgcgaatctacaaaagggagtactacctgagaatcttaacagattgccaaaaggtcagcaagcgactacgttgcttgaacttatgactataagagcattccatagcaagatcttgcgttgttacagtctgggaacagcaattgggtttcgaattcgtcgtggtttgttaacagatataccagctattcttgtctttgtttccagaaaagtgcacaagcaatggctcagccccatccaatgtctacccactgcgttagaggttaggaatgatgtaaatgctcgcataatgtgttttgaaaacaaaaaatggctgtctggtaataacatcttgttaacttattattgaatcagggccctggaggagtatggtgtgatgttgatgttgttgaattttcatatttcggtgcccctgagcctgctcccaaagaacaattgtacacagagattgttgatgacttgcgtggaggtgacccgtgcattggctcaggttctcaggttttattaagctccctttgaacttattattacttttatataaaaggattcaatggatggaaatggtagtttttcaggttactgcattttctgtgctttgtattgtcaagctataacatctagctatatgatgaaacacacagaaaccttaactcatatcctaatcacagaattcttaataggtatggtctctcattgttttggttaggtggcaagccaggaaacatatggaactttgggtgctatagtaagaagccaaactgggaatcgacaagttggctttctcacaaatcgtcatgttgctgttgacttgaactacccgaaccagaagatgtttcatcctctgcctccaacactcggacctggagtttatctcggtgcagtggagagagccacctcatttatcactgatgagctttggtatggcatctttgctggaataaacccaggtacaaacttccgaattacaattagacttgtcgaaactacttttcaagagttggggatcatttatgagagacccttttggaaaaatattagtacaaactcattttcttaatgtacttttacaaatattttcatgcttcaaagtttcatctgacccttgtgcaaattatgggatatcttgttctggcagagacatttgtgagggcagatggagcattcattcctttcgctaatgattttgacatgtgtactgttactacatctgttcgaggcgtgggagagataggtgttgtcaaaataatagatttgcagtcaccgatcagtacccttatcgggaagcaggtgatgaaagttggaagaagttctggcttgactgctggaactgttttggcgtacgcccttgaatacaatgacgaaaaaggtatttgcttcttaaccgactttcttgttgttggtgagaatcaacagacatttgaccttgaaggggatagtggtagccttataatactaaaaggtgagaacggtgagagaccacgaccgattgggatcatatggggaggaactgctaaccgaggacgattgaaattgaaaattggtcaacctcctgagaattggactagtggagttgatctcgggcgtcttctaaatctcctcgatcttgacctcatcaccactgatgaaatgcttaaaggtttgtcaatgctgtcctttgtagcttgctcctattactaacaatttaaacagataaacagccatcattttgagtcaaaaaactatccaatcaagattacaaaatggggaagaactcgccccacagaatatagatttagattgcaaacaacaaagaaagagctaaaagtcaaaatgattgtcgatagagcaatttacttgcgtaattttgaagctgttttcgacattcacatgaagtcattatgatttccttctaatattgtatgcagtggcagtacaacagcagagagctgcctcagcaacagtgataggatctaccgtcggtgattcctcaacaacccccgatagaatccatccaaaggaaaaagctgagaaatttgagccattgggactccaaattcagcatatcccattagatgttgaacccagcagcccagcaaggaattcattctacgtagaaacaaaattccaggtagaagaagggtccgaggaagccccaatcccaagcgtagaacaccaattcattccaagcttccctagaagatccccacttcaccataacagtctcaaggaaagagtagcatcagagaatctttcgttgttacgaaatggctgcggtgaagacttctgcgtctcacttcagcttggggacaacgaagccaagaggaggcgttcggatgcttccactagtgctgaagaaccaaaataacttggattttgttgttgttgttgttgggtttgatgatatgatatgataccatgttgtaacattctaaccattgggtgatgttgttaaactaatgttaaaagtgtaaattcttaggctcaaaacaagggccctagagtggagtacactgtacacatacttggaagctctcttgtatcaccattttcattcatgtcaacttcattctactttaactacaaattttgtttaagaagttaattcagcttaagtgacatctctttcatgttattgcttattgatgcggttttctgtttttgaagactatgtttggaagttggatttcggtgaaaataaaaaataaaaaaattctcaaatagaaaaattgtagaaaaaaacacttaatttaacaaaaattttcatatcaaattttaaaaattgatttattttctcatcaaaatttaatttccaaacataatctttttcttatatcaattttttatgaaaaataatttcctatttgatcaaaagccgcaaaggttaaattagtatttttatcattaattaaaaaaaaaaatgactaaagttggatttagggttattttcatatattttttgcaaaacatggtatctattggtctatagaatgaccaattaactttttttttttctttataagaatgtgttttattattttgttggattatgttagggtaattctattgagactcatttttttgttttttcccctctcctcacctttttttttttaactgtaatcttaatagtctaaaaattctttctacacccttactaaatttaatcaggctttttcatttttacacttc

SEQ ID NO: 26334 - DNA, 1289 bp, Cannabis sativa
gttataattaacaattttatttttcataagaatgaaaagtttgataatgataaaagataataataacacccataatgaggtttttttttcctttttcctctttgagggaacaatatagtatgttattacaatatttaagtacaaaacatatgttatgttaaatcttaattttacatatggatgacctttgaagtacctgagatttgtgtatatattgataatttaattaaagaagaatgaggtataaaatctttataactgatacactaattattgataaaaaaaaatctcaattttacaataatctaatctctaagttgaatattatccactagtaaaagaattttaatttaggcaattgtattttgattttatctagtttttttattttttatgtacaattaagtattaacaaatggctttgtgtccctccaaactttcccactcttaatttagtgggaaagtttggacaatctctacatgtttttttttttgctcaaaaaggtcaaagccaaaaatcatatatttttatatagaatcaaaacactacatatgcactatttatcaaataaataaaaaataaataaactatacatattctcttccaattatttaaaagagcattttgatactttgcttgattgtcaaggacaaaggagttgaaattgacttacctagaattaattcaaagatttatgtgtatttattttatatattaattaattatataatatgatatgcactaatatattttactgtatttattatttaacaataatatattgctcccttccccaaacatcattttctaaaactattttcttgtaataattatatatataaaaaaaaaatccatgttgattagtcaagagtattaaaattatgtatcaatgatgtcaagtatactactatcatggtaatttgtgaataattaattattaaaataaaatatataaaatatttaattatactaataataatatatataatattattagtatcttattagttaaaatatatagtgtatttatcaatgtctataatttattaataaattacacatcttcttgcaaatcttaaactaaataaattaaaaaaaaaaagaactaaataaaaaatctatcatcttaattataagtaaaatttactcaaaacatatatagtgcacaatagttgatgattttatttatagataaattatctccatataatatgtaaattattgcaagttgtttagagtaaaattactaaaatgaccctctatagccccctcaccatcaccaatatct

SEQ ID NO: 26335 - DNA, 5187 bp, Cannabis sativa
ataaatatcaaccattagatatttgatccaatggtcaagaataaaatactcatacatgggtaatacccattaagagcatacccatacatgtatatatatgtacaaatatacacattatatatctccaaagagctcaccatgacatgtctcccctctcttgtggaatcacatttggaatagtaaaattttagagcgttacaaggtcatgtagaaaagcgtcctttcaagtgctctcctgatctatcttggcccaaaaaatgcacattgatgagacacaatgctcagtttgtgagattacagcggaatctttagaacatctattcctttattgtaatttgacttactatctctgacaatcttccttgtaggaaatttatcccattcccaaggaaagcacgcggatgggagattatgttactttcatttggggtttgaataaaagaggaatcaatatagacaaggtcttcctttatgtctcgattgtggtcgacattatttgatgcactcgtaatgataaggtatacagtaataacttgggtagtattaaacattatattaattttgtttataattgttatgcagactataagactatagtggttccctgttacctctgtctcatcctgaagtggcgattaagtggtccactcctctgattgattggatcaagcttgtaagagcagaactaagagagaagatagagagaaattgaaagagaagctctgtccttaactggagcagaggagatgtatttatatatcttgagaacttaacaatattacaatgccacatagactggctttaaatagaaagctaaaacagaaaattaactaactaaatgaagcctaactaactctaacagcccccctcaagttacaatgggttcccgaagtattaacttgcccctaaaattatcgaactgagtttgaggaagaggcttagttaggatgtctgcgatttgatgagtggcagagatgtggcgtgtgtcaagttcgtgggctaggactgtcacgaatgaagtgaagatccacttcaatgtgcttcatccgttgatgaaagacgagattggatgcaagagaagtggcaccgagattgtcacaccaaagaataggacagctttgtatgtgtattccaagctctttgaacagagattgaatccaaattaactctgtggttgcaagagcagtggcacggtactcagattccgttcttgagcgagccactacggtttgttttctcgagctccacatgattaaattgtggcccagatagacgcaataaccagaagtcgatcgtctgtcatcaatagagcttgcccagtcggcatcagtgtaggcaactagattgagaggagatgctgccttgaaatggagaccatagtctattgttccagccaagtatcgaagaagccgtttgcaagcagaccaatgttcattggtgagagcttttaagaattgagacagcttgtttacaacaaaagagatgttgggccttgtcagagttaggtactgaaggcccccaataacactgcgataaagagtgggattttccataatagtacccatggaggcagcaagtttggtgttggggcacattggtgttggtgtgggagtagcagcagccatgttggtacgagtgagaaggtctgaagtgtatttggcttgagtgagatagagatcagtggctgttcttgtaacttcaaaacccagaaagtacctcacgagtcctagattttgagggcaaactgttggtgtaactgagaaattaagtgatgaatataggcactatcttcacctgtaagaaggatgtcatctacatagattagaagaagagtaagtttgccttctcgttggaggtaaaataatgaagtgtctgctcttgagttatggaaaccccactgaattaaagcatgtttgagcttgtcaaaccaagctcgaggagcttgctttaagccataaatggctttgtttagtttacagacatggtgagggtgagtctcacttttgaatccagctggttaagccatataaacacattcttgaagatctccattcaagaatgcattgttgatgtcgatttgctgtattggccaattattagtgacagcaagagaaaatataaggcgaatggtacacggcttgatgacagggctaaatgtctcaaaataatcaagaccttgggtttgctgaaatcctttggcaacaagtcttgatttatacctattaacagaaccatcttggttgtacttgacacgatgcacccatttattgtcaatgattgtcataccaggttcatagggaaccattttccatatgttgtttttgatgatggctgtgatttcagtttgcatagcattcaaccataggggatcttgaagagcagccttaagagtttttggttcgatactgacatttgaggttacagtaaaggctttgggtttcctaatgccagctttagcacgagtgaccatatgatgtgtgttaccagattgttgttgttgagtgcttacaggttgatcattggtgatgctagcagcagggtcgattatgatatcgggttcatgatcaatagccgagggtgacacatggatgttgcttgggagaatatgagtgtcaattggagagaagggtgctggtatgacatgttctggaggattagagggtggggtaacaaattgaaaaccaggttgctgtggtagagagaaatgggttgctgtagtagtgggaatacatggttgtgtctgtggtgtgggggtatgagatgtagggtctgttataaaaggaggtggtggtatagggaagctgtgaggagacaaattggttgttgatatgggaggagagacatgtttggaaaaaagtgtgtcataagggaaactggtttcattgaatttgactgtgcgggcaacgtagattcggccagtacggtgcatacatttgtaacctttgtggttggggctatatccaaggaacaagcagtgagctgtgcgaaaagccaatttatttgtttggtaagggcgaagtaaagggtaacaagaacaaccaaaggttctgaggaatgagaagtcgggtttttggtgaaataatacctcaaatggatttcgtagttgtaacacaggtgtaggaagccgatttatggtgtaggcagctgtggtgaaggcatcccaccaatgtgttagaggcatatttgcctgagccaaaaaggagaggcccatgtcaactacatgacgatattttcgttcagctcttccctgttgcttgtgtgtatggggacatggatgtcggaagttgattcccaatggttcaaggatggactgaagtggcctatattcaccaccccagtccgattgcacggctttgatcttagtattaaactgtagttcaacataagacttgaactgtcgaaaaaatggcaacgacttcatatttgactttcatagggtatatctaagtgaatttagagaaatcatcaatgaaactaacatagtatcgaaatccttctattgaattgtaaaaagatgttccccatacatcggtgtgtactaaatcaaaacaagatgtagtcttaggaactgaactaccaaagtgaatactgtgaagtttgccatattaacaagcttgacaaaaaggaagaaaattacatcttgttttgaaattaatagtacaaacgacattctttaaaattcttggggaggcatgtccaagacgatgatgccatatttgagcttcagagaaggatccatttggtgtgttcttgacacaattgaatgcagtaggggaaagagagagtcctcttgtggactgtgttgatttgaggttggctttggacaaatcaagatgatacaagtcttgcttaagatggccccgaagaagaacttggcctgtaatcttgtccttgacaacacatgtatcagaatcaaacaataagatgatattattatctgtggtaattttagagatgctcaataaattcttggtaatttttggagcaaataagacatcatttagtaaaattttcttaatgggattacttgttgcaaagttagaatgacctatttgagaaattaaaatttaagagccattacctacggtgattttggctttgcctttgtaatcatttgttgtggtgagggtttgagcatcattggtcatgtggtgtgtggccccactgtccacataccaaccattgtcttttgcaggtgtgttaaagtcagaaagaagagcctgtgggttgtggcctgtgttctaagaggttgaggatgatgcctgattgtctgtatcgtatctgtgatagcattaataggtaagatgaccaatcttgccacagatttgacagactggacgagaaccacgtccacggccactggagggaccccatcctcttgtctgagacccacggccttgagtattgccacggccattagatgaacctttgccagtgttgctgcgattagatctagagggatttttattgaactgagcgtagttggcttgagcatagtccaagatttggggagttgtttgttcaattcgcatctcttgattttgaagcatatactgcacttcttgaagggtcagagcatcagctcttgcagtaaggagaacgacgactgtctcgtattcatggccgacacctccaaggatgtacatggcaagttcttgatctgataatttgtgacctgcagctgcaagagaatcaggaagattcttcatcttcaagatgtattcatcgatgcccatggaacctttcttggtattttgaatagcaagacgaagttgaagctggcgagccttggattgagttgcaaagagactagcaaagactgtccaaacttcggcagcagattaacagtgaagaacatgtccaagcatagcctcggaaagagaattcatcagccaactcattaacagagcatcacaacgaatccaatggtcaaaggcaggattaatcgaattcgtacatacaagaagaggttcaggccgtggagttgtgccaagaaggatgccatcgagtccatgagcacgaacagaaggaagaattagggatcgccaatatgagtaattgtgacgatcgaggtgaatattcagcggaaggaggttgtttggaatgtgaaattggatggcggctgcctgagatgcgaccggagcttctggatatggtggtggtgcagggtggcgggggtcgtcagga

SEQ ID NO: 26336 - DNA, 3125 bp, Cannabis sativa
aatttttcaaaaatttataaggatgatgttgtaagcataacaaacactactgtgaaaaaaaatttgaaagaaaaatatatcgacatgtatttttgaccgtagagattgactaagaggttgacggtattactctttattattttaagatttacggtattactctttattattttaagatttattcttaattttattttatttctaaaagaaaaacaatattacatttgcaggacttttttatttatgggaaaacttgtgaatcaaacaatgaatccagtgctcaagtatagttacatctgagagaaagaaataaaaataactaatcaagtaaaaaaaaaaaaaacagcaaaacgattcaagatcacacaagtacttgatggatagtcattgactagtcagtataatttaccctctacataattttcaccaatgaaattgttctgtcataaaaattgaattacattgtcagtcaactcatataaaattttcattaattttgctaaatgtgaacccaaatttttggacattttttattcttctcccaccactctgcagtagtaacacccagaaaaataatggcaattaaatcagaggggtgggataatttaatcacattcccagtgttgaaccatgaattaggaacacttcatgaacaaggttttaccaaaagggtcatccatgaacaattaaaaaactaaggctacatatattaaataataaaaatctgcagacttgcaatatttatttactactttataccattggactgtccctttctttctttctctcatgtcattattagttggcattgggacttgcaatcacaatgacctaggctttagaataatggaatctctctcacacactctctacttttatacaaaccctatgtacttatttaaccagggggcaatagaaaattgcccaattaaagaggtaatttgtgttgattgggttacatttttaaggggaaaaaaatatatcagaaattacatatatttatttattatcactcttcttcttctttatttaagtaacaataaaggaatttaatatcattatcatttctgtgtgaatgtgaatatttatataatatatataaaccatgaacaaaaaaccttcaaagaaggacagtccaaagaagaagacaacaacaaatataaaacctactaccttattagggggaaaaaaactaaataaaataaaataaaaagggagaattagattccttaccagtaccacatagtttttaaagaaaacattttggattatgagaatgccaaagaacttgacaaatgggaaactgacacatgttaaggtgtaccctttcgataggaggttcctattgattggtgtcatataaaaaaatataaatgagtataaaaagttaaaaatgttaaaattaattaaaataaatattatatattatattatagagagggaagagttggttcatggttggcatggctctgcttttgggaaagataaaaccaagcaaccaaatcccatccattgcaacatgggatgagagttggggattcgagatctcttaagcagagctttagaattctttaacctcaatcaaccactgtatctgtaatctttgatgatctctctcttctttatatatatatatatacatatttttatatatattgaatatgtttaataaagtagtccaaggagggcttaacacctttaatcaattgatgaagaagcacgttatgacttattacattaataaatattatcatcattatgacatatttttctgctaatcatagtctactacagtactcatataatatattcatctaattttaaaatacccacgtatagttgtgttcttgtgtgtatatttttgtatatattatataataactatcattcttctgatttacttaaagagcttcttctcataggggaaaaagattaattatgggacttaggtaactcttattacttataatatatatatactcttgttacttgcaaaccaagatttcaactgaatattcatcatatatgttaacgacatgatccatgttctttcttatagtaaatcggaataaactttttatcatttatttatttatattaaaatgtatatatttggagaatatgattcaaaggagagtccaattaagagcatctctttcatagatttaaattaattaatattaaataattataaaaacttgtataataaatctagatatgcaaaatattcatatttctaaacttttatacttagacatcgtcgtttcacaataacataattattacaaatttatcttactgtactgtaatatattattaataaatatatatactagacaattatcttatagaataatccttattaatttaagaattgtgatcgatttttatctctatgtacttctatagtgttgatcacaggaggcttctcagatttgccggaccctaagaaaataatattattgggcccttgttaaaaaaaatatagtattttcaaaaattacaaaaaattatgtgtatttaaaagagaaaaattattttgggtctctaaatcgaagggttatttacaaaaatataggaaaaaaatgtaagttttgataaatatagcgtaaaaacttaagtgtattgttgtgaaactcagcaagaacattaaatgacgagattaaacaataaaaccagttaaagattgagaaaattacattgtatatccactttattttacttgttttaatttttaccttaatttttatatttttttaaaatatacccacttcccattagactccttttatatcctagatttaagtagagagtgaggatatattggacaacccactcaaaaagaatggatatattttaataaaatattataatatgagggtatttttgattaatgaataaaaaaaaaaaaaaagaggtaatttttaatttattccttaaagattagcaaggaatgacaccaatcaatatccatggcaaaaacatattaaaatcaacactaaacacatgaacttaacgaggttcgaacaaggtgatagaacatcaccttgcctacatccccagccaaaaagcagccacaacagggttgagagattcctttatttgctgatcaatatgaagagatt

SEQ ID NO: 26337 - DNA, 3372 bp, Cannabis sativa
tcatttagctcctgtagattaaaattagaaaaatatactgagaaaatcccaattccttataaatcttaaatatatacaccaaatgattagcttcacaaacaagaaatagtaatgtttcataataaaataacctgctgcaacttgtttaaatttgcggatgtaacttttttttgcttagaattgttcactctttcctcctcactctcgtcactgtccactactaaatcaattgcttctgcatttcgctcgacccagcttttctgtaccttctcctgaaatgtgaagaaaaggaagatgtaataagttgaaaaataatgatggatcaattaattcgaagttaggttcagttggcgaaaaattcaaacacaacactgagcctgtttcggaagcagctacatcaggaaaaactttgctactcacacaaagatctgtaatgggtaggataattaattaaggaattggatgaggtaattcaaatccaaaataaataccttagagcctttccgtaaaatcttgtctatttgtcgtgctagagataaacgtttcatgacctgaggcatgtatgaattctccaaaggaaaacgctggaaactttcctgtggtaaaggcacaaagatatatatatattaagattgaaactatacagtctttgatttagaagagattgatttacagagttaatctcaaattcctaaggcactttagctaatgagagcagaaagaaaccactgcaaacaaaaaccttagaaaaggatttccacaaggaagcaaactttgaagtttctttcggtgaaatcagggcaatgctgcacccatcagcggaagctctagcagttctcccacttctatgaacataaacctaataaaaaaggagggagattatggaaaaagctcatcagaataatgcaaaaacctaaatatggtgtatgaatacagaagatccataaaatagcataaacaagattcagagtttaactaacttccgctgaatgtggtagctgatagtgaacaacagttctcacaccaggaatatcaatgcctctagctgccacatcagttgcaagaagtataccatgctcatttgccctaaaacgatcgattgcctgcattgaatccatgatgtgaggagcagaatataaaacaagaaaaataaagaaagtacatgtcaggctatggaaataggtactaggctacaacaaaagaaattacagagagtgctcctctggcgtaaaggtttagagttgtcaagcaaaatgttgcaacaaattatttaaaaaaatatatgtttgtgtgtatagtgttctgagacaaaaacaagaagcgaacctttaatcgagctcgctgctgcatctgggcatgaagtgtccaaacatcaataccaagtatgcgcaagatagaagatagatgacgcagagcagccactgatgtacagaagactattgtgcgaccttgtccgtgaacactcaatatataatacaaaaaagcatccttatcttcttccttgcatctgcaatacataaaaacattcagtctatactaaggaaaagcatctatgtcttcttctttgcatctgcaatacatacaggtttagtctctcattggcagaggttcacaattctatatttctataaacagaaagtgatgtcataaattgcatctataacaaactttccgcattagccaataataattagtaaatcactcaatcattcagaaaacacataagttattggaacaaatcaaggtgtccgcacattaataataatcagctgtatgcctaagtcaaaggttaaatttgtccatgcccaagatgagtaaggatcggacgcaaacataatgtcacaataatatgctacacagttaatttatagcccctattccatgtaacacaaatattttaacaatcaaactgctgccttatagccaaaatgttaccacagttgatgcctcagactaagaatttatacacacctcaaatgtacaattacgtggtttatcatatggaaaaagactcaacaatgaatatatgaataatatttatacaaaagaaaaaagcaggacaatagatgggggaggagcatactctataaatgattcctcgagcttatttgccattatggatgcatttgtcaaatcaataacagcaacattgtctctcatccctgctcgttctgaaaggttttctattgaactgaatccctcggacattgattcctttgattttgcggagccacgctttagcttcttacggaaatcggcagatagagctatggtagcagaaaagacaaaggtttgtcgtttctttctctggaagcttgaaactgtaacacaactttgtgtattttgaggatttacttcagcagatccactggtcataggaagcatgtcaattattgactgcaactcgtggaaatgtccattttctatcattcgatcagcctcatccagcacaaagaaagacaatgaatgtaactgcaaagcaaatatgaggagtcaaactgacaacaaatttaaaactcacaaaagcatttgcaaggaaattgaaggataaatatggaagaaagaaatctatggacacaaatacttagaaccaatttagccagagtcaacattggagaaagaacttgtgtgccaaggatatttttcttatttcgattttattatccgaagaaatgatttaatatagcaccaacctccacaagatgcttgtcacccccagacatgagttcccataatctacctggagttccaacaacaatctcaggcctccattttagaagccttgcctgtttctcggacgacattcctccaacaattggaacaactctcatgttggtatccttgccaattgcctttagatgatcggttacctagaaaaagaaaaaacagtgattttcatatctaacaactgagataaaatcttcacatctgtgcaaaaataaggcttaaaacaaactatgaatacttaaagtcaaagcaatcaacctaggaattagctactagctggcctgataaatacatagattatgaaattttaaccaactctcccaacccgtactgtaaattttcaaacatgacagaagtcgtaatatgggagatacatagctgattcatggggaaaaaatagttcataacaccttcaatttgattaattgaagtcattgaattcaatcttatagataagaaaaacattattacatatattgatgtatgataatcagactggtttatatgtatcaaataatttattatcagttattatcaaacatttttaaattgctaacagcatccctacatttacagcaatcctatccactcaactgagaaattataatttaatatcaggttattatcaaacttttctaaattgct

SEQ ID NO: 26338 - DNA, 2459 bp, Cannabis sativa
tttttcttttgaatattatggatttgtttggagcttaggataaaaggcttgagattatacaaaatagtcataagccatacaatttttttatcttctttcaaattaatcctaagagttttgaactattttaacccaccaaaagaatagaataatttttttaaagcaaaagaaacttcatttaattaaatagaatatgaatacaatagggcctccataggagcatgaacattagaacaacatatttcacaatcaacaataaatctagttctcttagtagtatagtgtgcaactcagtttgcagattattttacaaactcaacatgtttacaatcttgaataagaaggtcaaataaataatttattaataaagaacctcgaatcgcttggataattaattggcttactatttcgaccactacttgctgtcggacatacttttaatccaactcaggatatccttcacccccatagcctcaatagttacaacatccaagtcaccatgtctacaactactttggacaccaactaaagtccatgagtctgaccgagccaccataacaaaaccatataggccttccctttcaaatattgcagcatcgacattgactttgtaaacatttgtaacaagtttagaccaaagctctagtccatcgccattttgttacaaatcatacaacggaaaacagtttgtgttttgagcttttctccattgttccaaggtcactctacctgagataattacatcatcgacagagagagagatttatccttctaattagtgcatttcaagtcttccatatagcccaccaaagcatagttgtcatacgtacaccctttgtactcgtcagaacaacttataatttgggatagccaagtgccaaaagagaggtagattcaccacatcgataaatagtctagctcttctccagacagtaacaaaataacaagaaagtaaaacatggagaatagtttttgcaacactattatacgacggacagacagagggaacatcaactttcttaatctgtagctgaatccaagtaggcaagcactccgatacaatttttcataaaagattttttactttcaacgaaatcttaagctaccaaagttttatttaaaaataagaattgtccacctccaccctttcttatttgtactccttgatcaaaataatggattaatttagtctaatgtacttacttttttcatttcttttttcataacctaaattttcaagatgtaatattatttagtaaaaatatttcaaatatttttttattacttaatttttagaaatcttatttttattatatattatttattttaaaatacaatattttataaatttattttgaactattttatactttagttattattgcattacaccaaacacaacatagtactaatatatctagttcagtccaatccaatttagtcataaattttaatccaatccaattcaatcttgtatactaagagtgaaatttagtcgattatgttcattttttcatttttgcacaccgtaactgaccgtatgatagtttataaccgttcataactgatttggtggttataatcggttatggtcaatttttggcgatttcattcaaatacatttaaaagtagcctttatatatgttatttcttttaaaaaaaaaaaattgtcaatcgtgtgaaagttaaaccaataacctcctcaataataagcttgatgcttaccacactagtgctaactcaatttaaatgaaaatattaaattacatttttatatattatattttcttttacatattatacatactaatttttaatttgggcccttaatattatggggcctaggccctggttgccccatccttaagtcggttctaagtacgcgcttgtttcaccaattgtgaggttgtgggttcgattctcaactgaaatacttttaaactttttttttcttaaaataaactaaaggtgtagcaaataggtgccatccagctttgatgtataataaatcttatgtatatatttataattttatattgtatatatggtcatttatagttaaacattttttataaaagaaatttgaattaatattgatgtatttggacaaaatttgtacactaaacttaagtatatcaaaaataattagatataccactttttcattaaatctaaaagtaccattctcataacttacccctcctctctctcttcctctattctctctgtctctcttgctctcttcttctcacgcacatagcaacccacggctgccaaccaccacgcctccaaccgaagaccacccaccaacgactaccaactcaagacttaggatctctgaatcacgactaccacgccatgaatgtaagttttccatttcattttattgtattatgtgtgatttagggttaaaatgtatgattttattataagtttattgatttaggaataaattatat

SEQ ID NO: 26339 - DNA, 1272 bp, Cannabis sativa
ttgtaattaatccaaatttcatgtatttcaacataaaatgtttcatcattgaccaagaatacttcaagaaaactaccaataacaattcattctcatcaagaaaaactaaattaccaagaaaatgagcgaggccttcgaggccatcggggtcgcagaaagatccaatacgaacatccatggaagcagcacactacaacacaaacaaacaaacaaacaaacaaaattaagcaaaataattctcatgaaaattcaagaacaatgaagttgaaattatgccttatcagtatccggatcgctgattaaaagagcctggagagaattagggaggacgatcctcctatactctcgcttgtccgtacgagctttcacaatctcgcccatttctcctttcccaaccgccatttctgtgagttgttcttgttctgtaaactcagaagaagaatgagtttggtttaatacgccgccttgttgaccagaacagaagactctgccttgccttctaacgattctttactctataggcgcggcaatctaatctaagctcagctaaccttgcaccatttttttctttattctaaaaaaatgtctaattatgatttttaactccaaattttaatctagttaaaaaaaaaaaattcagaactattgagcttatttaatttaagaatttttattaagaaaattagacagaagtcttcgagttgaacaaatttaatagttcggttcggtgatttttaaaggcttgaaaaacacaatttatatgtcaaaatttagaaagcgaaaattataattagagtttttacaaattttaaagaaaaatattttatttaggctttaagtaaaaaattatgtaacatttttaaaaaaatcattaaaaggtaaaatatataaaattaaatattgtacattatttattatttaaatactagttgttatttgaagatataatttcgcaattgtaagattaactcacgaaaccacgtgctgtgtgtagtagtaggaaagtctattggttttcttagttgggttaagagttcgactctcactccgtccctcattttgagagaattatgcttagcccttgaaggttggcttgttgtggtgtgctatctttgggatgagaactttcatgaggtgtaatatctgagttaaggcaagaagaggtataagacctttatagctagcacgaggtctcaaggtaatccatttttttcagcaaaattttaaaaaaaaaaaaaaaaaacaaaaacaattaactcatgaagaaaatta

SEQ ID NO: 26340 - DNA, 5220 bp, Cannabis sativa
  modified_base (1247)..(1259): a, c, t, g, unknown or other
taaaactcacgtaatacgcctatggtagttagggtgttacacacactctctctctctctctctctctctctctgtgtagcgaaaaattagacagtctttattgtttgtgtctttttttatcatgtttggagttgtttgttttattttatttatacttattattaatgcttttgtcacttttctcttttttcttaaacctcaccttcttttttttttctttttttcaaaaagtttctctcatttttttttgttcaattttctcttttaaaatatatttttttaagtattttctatatttttttaccatctcttttttctcttttttttttttttgctaattttttttttaaaattttattcttatttgtttataagtaaatatataatagtttagaagactatacaagtatacatatgctattaatcttttttgtgttgttattttactttttctcataaatttttcttaataattattttatttttcttcaaaacattgcttaattagtatataatagtagagaaaatcacatgtacttacatttagacaagacgactgatgatcttagtttccataagcgaacctatatcttcttgtttaaacataatttttttttaacaattgtataaatataattgataaaagtaaaatatatgattataatccacatgttttaacggggttatgtgcctgtgccacatctaccacacttagtatatatattgtgtgtagtagtagtcagctgtggtccaagatgattcgagacatctatattggaatttattatgatgaattttaaaaattcttcttttatgttttatttataattttacggcctaaattttttaattataaaaatactcttgtaatgttttaaaattataaaaatacactttgttcagcaaaatatataaaaaaaacaactaaaagataacgtgaaattaacccccacgataactttaaatcgacaataaaataactaaaaaaaatctcatgacaagtgtaaataaactataaaacaactaaaaaatagttcattattttcactgaagatgtgtttttgtaaataaaaaagtttaaagagtaaaaatgaaaaatgttatgtgctgatgtatatttgtaaagatgccatttgataacacttatattttctaattttttaatcataaaaatgaaagtaaattgttttttaaagttttatttttgcaaaataaaaatgtgttctataactatttttatttttcannnnnnnnnnnnnaaaataaaagtgtgttctataaagtttgtttttatttttattttttaattttacttaagttgggtctaggtcttgtgtagagtccgagtttgattcaggagtcaggttcggcgccacggccagggctaggtttggttcccagtccaagtatggtcatagtctaaaatattaatggaaaaaaaatctgttcaaaaaagtattaaaagtagctttttttgtttttaaaattttaattctttattaaaaatttagaaagtgaaaatagttttctaaaacaggaatttgaaaaatatttttaactttttaattttaaaaataaaaaacttattagaatattattaccaaacgccagcaaatattttcaaattttcggtctactaaatttttcatttattatttatcttttgtttaagattatatgttgtgaattttagtttaagggaaaagaagaaaaaaaaaaaagagttataagtaaatttattaatgccattattgggtgatgatatttttttctcatatatttgtaaatttgtgaaattatgttctttattatttttgagatacttgtgttattgtatttttcctatacaatttattattcaatttattttactatgtttattaaataaaaatatttagaaaattttacaatgcatcatttaaaaaaaaatgggtgtatcgatatacttttgacattcaatagaatattttagtctagttttttttaatgtttgagaaattggaaaaaagaactaatatggcaaaacaaggttcaaacaatctgttacactcgtgactcttttatttatacatgtgtgaaataaactgtttgaacactattttctatattgtaaattataacaaatttctcaaaattttacaggattaaacgattataacgtacaagactataaaaataaatgattaattgttaacgcgcgcaaattttcgttaattaataatgagctattttcgtaataaatttaataaagatattataaatattaataaagtttaataaatataataataacatcatgtattttgcgtggagccaaattgtctgtccctttactctgtcccaattcctgtccctccactcaaattttaacacctcatctaaaatgatagcaatgcattttaaccgtgttagtttctctttctaaattacactacctcttgttcataattttgtccattctttatttctgtttttttttctctttaaaaaaaattcttttctaattctctaacaatttttcgaaaagttttagcaaaaaggatgtagatttttttttttacctatttatactcggtgaaccgaaaagatttaaataaagatgtacaagtacatgtacaacccattttgttttctttttcctatccttgatgtattttagttttgccttatctttgtaaatggtgttggaccaaaaatactgcaagattattctcgtagttgattgatattctcaaaattaacactaatcccctattactaatctgatcaacaattactgcaaaacttatgataacagtcaataacaaccaccattgcataaaatattaaatcaaactgtatatattattttctttttgattatatataaaaattgaaggaatatatttcaactaaatctcgtctattgaaaatgtgaattaatttttaattgaaggtagtttcgtttcttaaaaaatattgatagaaagagttgtagagagagtacctagttaaaaatcttgaagaaagtaaagagaaaatgaccaaaatgttaatggttactgtcaagggagatgttttttcttttaaaaaaaaaataaatacataaatggagtgagttaagtgtaaattccgttaattatatacgtgacaatgtaaatgatatgcaaaaagagtattggctgggacagaggaagggatagaagatttggctccattttacgtgattttacagttaaatctccacactctaaaagtctatcttattcaagatatttctgagtatttgatacaatattacaattagtgatctttttctctaagttttttcgttccttttttgtagaatctgcccctatttataggaatatagattggtaattatttacatttaaatttgaatcacataactgtttagtgaaacgtgggagttgatcaggtttcactaaaacacgtgtagataacaattgataaccgcatatcgctgcttatcattcttatcttcaaggcggttgacgctgacttggacagtggtatctcgctttgcctatagatgaccaatgatgagttggctaatcatatgacctcgcagactagacaatcatgtcctgcatatttccatgtcaatacacttagttattataatgtagaatatgcgctaactgtttcaacaactgactcgcctcattaatatttccttatgtgtagcaaggtgaacgtctcgctatacactatccgtggttgattcaaaaaactttactgataaacaagtcttgttcttgggattgcgtattccaaagtaggttgatgtctcatcaatacagacattaatagtcttgtatccttgtctcgcctaagactatacagttagcgagttatgaatatactctattaattctatatttaatgagttattccttttttcatttaatgatatatgttattatatctggtggttcatattaaacttaattggcacgtgttacactctaaagtgtagctgaatttcgagtataacactaatttttttctagatgttaaaatagatacaaggtacattggtgcacctcttttagggaatctattagaaaatcaccaaaacatttagaggataggtatttttaagtatttttcttatttatatattagtttgttatataatgtctaaaagttatcagtttattatttttgtatgtttatagttcgagaagttatatttgcacattcaaaaattataattatactctattttaatcaaataattatatatttattcatatgtaaaattactaaaatatacaatttaaaatattagaaaatgttatagtcccacttaaaaatggtacatcaatttactcatgttctctttcgatacattggagaatttaaacctaattttttttatagtcatgcacattgaagttatttaagacattctctaaaagttataagaaaattagaaaaaaactaatcaactcaaaacaaggttcaaacagtatattacaatcgtgattattttaattgatacgcatgtgagatagactatttaaacattattttctatattgtgaatttaaattattttaaatttctcaattttttgcaagatttcttaaatgacaataacatacaagaccataaaaatttgactaacaattttcctcgatgccgaaatgcatgcacccttttttagggagtgcattgtagaagcattccccacttttttggcttctagtctattttttttcctgaccgagtacgttaatgttatttaagacatctttcgaaaaaaatttaaaaatatcgaaataatttacatatgaaaaatagtgaccaatctatttcacacacgtataatataaaagagtcacacttgaacagattgtttgaaccctattttcgtcatgtgaaatttctcaaaatttttcaagatatcttagacaactgcaacgtacacgaccatgaaaaacaattggactaaaaaatttatcccagatgtcgaaacagataggggtgcaccggtgcactccatttaggaggaattcaaactttgtataacataacttgtattttataatcttagatactttactaatacatttcattcttcaggcgtgaaataagagtaggattgtatattggaccacatctaatatttttaagactatacagatctgatctataacgctctaatctataaggacgccacgtgtgtgattttataaactatgttatctcaat

SEQ ID NO: 26341 - DNA, 15621 bp, Cannabis sativa
  modified_base (3863)..(3869): a, c, t, g, unknown or other
aaatacagggtccattttgtcattaaacaaaatacagggtccaattggtaacttttttaaaacagagggtccaaaatggtatttatcgttttatttttgacatcgttaatagtttaaaacattccaaaaattgatgaaatgcctactacataactataatattatatagaaattagaggggagcgctccctctgttcccatgcccattaacaattttaatccccatcccgaatgaaatgtggacggggtggagaatatcctaatataaaaataaagtttatattaaaaatttaaatgtataaaaattaaaatattacacattattatttattattcaatatatatttattatcatccaaaaatataacttaaaaatttataaacaaatactaatatattaaaaacataaattataaaatataaaatactattaaaaagataaaaaaaatatattaaatgggtctccatcaggcggggagtgtcatcctcgtccccctcctgtgacaaaaataatcgtcaagcccttccaatttagatgggaaattcttgccctattaaaagtgggttcctccagggccatccctaccccgtataaaaataaaaaattgagcaggtacgtaatatatattacataatttataaaaaacattacttgctagttatcgtttattaatggaattttgcttattaattggtaaacattaatattttcttaatttgttatattaaaaaatttattaaattaactttttttttctatcctaaaaataaactaaataaaaaaaattatatgaaaattaatttattgaaatttgattggtggaaagtttgtaggacccgaccatatgcatgtgaagacgttagttacaagtgttattaagcacactagctagggttagctatattaacctaattaatcaataacccaaaaaagaaagaaagaaagaaagaaagaagaaataaggtctagctaggtagatacatttgaacaagaaacatatcgtaatgctatttatgacaagattgcatttaatttttgaattgtaactaatcacgtatttatatatgcatgttaattttggaattacgtgagctgaacgaaaatcccataataattaaatatgcatgcacgtacgttgattgtgttttataattgagaaatgctatgaagcaccttaagttgttaagcatcataagatgtgatatattattgtttgtgtgccttttaatattaagttttacatattttaatttaataaactatataaaataccgttaactaattacagggtattatattagtgtgatgctaggcaccttaaagcatctctaatatggaaaattataaatgtaatgtattgctattttttaaaaaaattttgctaaaacttaactctattattgatgtaaaatgtgtgtgaaaattttagcctaagctaaaaattgtgtaaaatttgatacaaaaaatactataggccaaattttagctcacaatgaatactatattttctaattatctctttgtcacttattaatattattcattgtctttcaataaaatatatttataagatattaaactaatataaataaaattaattattttgtatatttttaatgagcattaatgataatattgacttttatagctaatttttaccttctgtattggagcacaaatacaaaaattatgccaaatataactttatagtatattttaagtcaaatttaacctaaactatacactatccattgaaaataatcataagagcatctctaatagactgatataataaatgtgatgtacatgtattttttagcccatattcataaaattaaactctaattatgtataatgtgatctaaatttgacacatattaaaaattgtgctaaatttgacacaaaatataacttggactaaattttacaccacataaatactacttttttatttactttgtcagccattagtatctttaataacttcttacattttatttatatgtttaattagatttgtatacactttcaattaaaatttattgcatttgcagatttgtttacacttttttttaaaaaataaagttaatttacccttaatgtatttgaggataattataaaatttggactaaatataacattgactcatttttttgagctaaatttaatctaaaatttaaaccatccattggagatatctaaaaattgtatcagtacaaaatatagcataagttaaatttatttagtgtaattttacactataataaatattatttttttttatttcctcttttacactcattaatatatttatttatatatatatgggtggaatcaagatctcctgttaaaaaaaagtggtgtctcatattgtgttaaacatattaaaatttgacacatcaattaatctaatttatattaaatatactacttttgttgactttattagaggtttaatttttttatttaaataaaaaattaattgacgtgtcaaattttaattggtttaacacagtatgggacaccactttttaaaaggagatcttgattcatatgggtgcactcttaatggatattatacctattcattgatatgttatgaaattttgagtttttatgcttagtttttctatctaattaaaaaattcactcatttttacattatatgagttggggttgttccatcagctaaaaaaaattaagaaaaagaaattttcggcaaaaaaaagttaaatttgacttaagtattttatatataagcatatttttatatacggtaaaaagtgatatttttttaattaagtagttaaattaaacataaaaatttaaatttatcttttattatttgtcattagatcaaaatctaataatttaatatttttaaaattaatatttatagatagctaatttcaggattatgaaaaagggtgttgaatatgttgtaaaagtatattattggaataatgaaaaacaccactagtttctcaagaaaaaaattaatatttatagttaaattatttagtaaccattaatggatagtacctattaaaaaatattatatatatatttatatatataatatatcttttgagatgagagagttgtagtccatcataatacaaacatttacatcctaccacacctttttcaacaaaaggccttgtgtaaatatttaatttgattttatgttttaggtatataacatacaagtaatcattatcaattactttcgttgttatatattaaacacaaatgttcgatcgcatgcatatgcagagaatttcggtagtactactttgtttttctttccaaaaaattaatattcgattcctcagtaattaaaagaaattgttcgtgatgggaacagaagaatctttcatttattttcctctttgcaatagtagaaaaagaatctaatgtgacaaaacgaaatttttctttattttacttgcattattttttcttctttctcctttttaaatttccctcacacacataaaatttgtggtttccttcggtgcatgcatatgtatgatcatgagcatcatgactatttatatatataacaccaatgtccattatatattctaaagtagtcaagcagaaattactgtaaaagaaaaaaaaaactgacatacgagtcattaaagaacctggaacctaataattaataaatagtattagtatacgtactatatatatatatatatataaatatatattacagactagctatccctataatctctcttccttgggccataagacaactacctatagttggaaatctaaaaaatatatggagaggaaagaaaaagaagatttctcgatcgtttgaaatatataaatatataaatatannnnnnnatatatatatttatatattccattaacctagccataacggcttgttccaaacattgcacctccctaatgtttctttaattagctatgcctaacttttgctttttgacttaatatactctttatgtaataaattaggcttggaagttttacttaaatttcacattagcatgcaataaaatttaaaagcatcgatatatctctttctagctcctttgactgaagcaaagagacacaaattaactaacataaatgtaggaaaattatgactaaatgtgtaaaatcaaattaataaaattttgaacaattaaacaattagcaatgataagattattaaaccaaaaacaacaattgaatgaacacatgggcaaatagaataaataaaaacaaaaaacaataaatgtagagaataaaaaaaataataccaaaatatatactggttcaagtctgataaatcgatatgatctatggttctactctagttttggaatacaccataatctttctttattgattgagcaagaataagtacaaaactgtcgagatgagattctccgttgagtcatctcaaagtgttacaactctcacactttacatccaagaattttctttatctatagaagattcttcttacaaaactcaaaacaaatctctcttttctttgcacctctctctctacctctcaatcttctctccctcaaactctcaatctcatctgatctgagtactaaatctcgtgttgtcaaatgacaaagtcaaggtggtatttataggcgtaggatcaaaaaaagttgtatagttattccttcctaaaaaaaattagtgaaaaagtgatgttggactcgaaattagaaattctcaatctttaaaaattttctttgggtaattacttagaaatgtggatttctgtgggtacttgtttcgttataatgtgcttatagagcctaaataacttttaatctaccttttacctaagccatgacattataacccaggatgacctattgattccgagcaaggattgttgacattagtggagagaggtaggtcgtgtaagcatattgaacattggtttgtggaatgttggtaagggtagaatgcatgtgatgtttttgaatattgaaatgtaagttaattgttagagtttttaggttttaattctggtttaacttattgattgaagtttcataggtggcagcggtagtttgattatatggaggcttggtaatctgttagtttctttgtttatttgtttgttcgcttttagtttttaatattacttgagggcgagtaaggatctagtttgggggcattagttaggctagttttagcctaagttttaggtcaatttttagtgttgttttcgctctttgtttctacttttaggacggttttatgcttatttttctctgtttcatgttcttgaggtgtttaaagagaaagttgattaaagttcgaaaggacaaagtcgggagaagcgagatgaaaattttaagctaaaattgcaagctcgccgcagcaagcttttccctagtcacgactaattgttctcgccatgacgagccttatttgccattgcgctgaagcactttctagaaccaccattttttttagctttaaacggtcaccgtgactagacctttcgtgatcacggtgacgcctctagtgtgaagtcgtgggaagttttgtagattcgagagttttaagttaaaacctggttcttttgaagggggtatgtagcaatttttgagttgattattcagaaacttagacctaaaaacaaagaagatgaccactagagcagattgtggcgatccaaacaatttctccattagttctttcttctctcttttagtttccttatgtcaattttcgttttaagtttgatttagatttgattatggaaattatgaactaaactccctatttagagatttaatgaatgttgattgaaattatgccatgagtttatgttaatttctatttcttctttcttgattgtgaatttattcatgtttgagattgatcaccttaggcatgattcatgacctcaatacaaaatcttaaaagtgagtattgagaatggtaaaatcgaataaacctttgttttgatgtgaaaagagagtatttgcatagcctttgtgacatttagattattatttattgtggattgtatgccagtttatcttagagatgcaatagataatataaaatttagggcataaaagatctgaaaagagttaggttaattttataatttgtcattcacgtaaagaaagaagaatagtaattggcattaacaattggataattgagataacaagattggtttctctaatttctcatcctttgattaaatacttttattgttttttattttcttgttattctttacttttatttttatcaaaattattgtctaccaaatagaaaaataagtctattttagtggtattcagttcaattccccgtaggttcaacctcatatgtgtgagtattacttgattacgtgcacttacatagttgtctacagtttttgtaacagtgcctgagtgcaatgtgcgataaactatgatcgatcttgttgcaattttggtggggaacagagaatggtaaaaagaaggttgcttgggtgaagtgggatttggtgtgtcaacccaaatcaagaggggattgggatttaaagatttagagatgtttaatcaagcaacggtagccaaacaaatttggagacttttgtgaaatctcgattcgttgctggggcgtgttttgaagtgtaaatatttccctaattcgtcaatctgggatgcttaggaaaggaatgggtcttctcatttatggtctagtttaatttggggtcttggcttattgaagaggggtatgcgtttgatggtgggtgatgggagctggattgaagcttttgagacctgtggattcctagaccaagatcgttttgtcctatcacgtgttggcctagggaagagttgatggtaaaggatttttttgatggtaccagagctttgagtataccaaatctagaacaaagcttctcccctttggatgtgaaggctattatgggtgttcctttggcagttgggactttggtggatttgtgatgttggcactatgattcacatggttgttattcggttaaaagtgggtataatgtggctcttgatttagtgagtgatgaacaggttgttccttcatcaaatttgagagagtggtggaatgacttatggtgtttggaagtacctcaaaaggttaaaatattcatttggcatatgtattatcgtgctatacaagcgaaaacacaacttcttaaacgtaaatacatattcatgctttacgccagagatgtggggaggctgaagaaaccctgagccttggtcttttatggctcattgatcccgttgtggtgtcatttggggtgttggaatatcttgtcacaactttgacctgggcctttgtgttacgtgttatccaagttttcatcaatgagacacgtggaacgatcgaagaggagaacacgatccctacataaggcatctagggtaactaaaagaaataactcccggatctagaaggtagcgagaggtaatggcttttgggagcaacatccttcaatgaggatctcggaaggtagtaggggttttggagacgttggactcgtcaggtccttgcaaaatatcgctccatagacggttatacctttttctaacacaggatcagatcttgtcccctgtgccagatcatggcagtgcacgtactcaccctcgagcatgatttttgctcaacggcctacgtagagactattttgtaaaagagagacctttgcacgaaacatgtccaaggtcgtacgaaaatccttgctagctactgtacaccacacgatgaagaaggttcctgctaagtgatggtcagatcgtccttaagtagtacataccttagtagcgtgtggaagacaaaaccctaagtaggtaaagggtatgccctttaccccatgtgtgccgataaatagcctcattgttttgaaggcaaagaggacaattttttcacctactgccactctactaaaatccccagattaaaccttctgctacaaagtagatgagaaacctacaatgtaagaacttgtaatcttaaagcacttgcccatagaggccaataatatagactcgtggactaaggatagttaatgcctgaaccacgtaaaaatctatttgtttattgtttattatcgtttatcttctttaaactctcaaaatatttggttttcgaaaaactcgttaaacattttggtactttcattgagagctgaaggaagtttgatggtgttcatcatccttagatcatggtgaagacgcaaaaggctaccgacaaaggcactatgttagatatggtcatggaggaaggtacctctcgtgcagctgatgcacaggtggaaagtggtagagaaggcatagccgctactgagaacccagagaggaataccactgtcgagaatttagaaaaaactgttgaaaatgtcaaagaaggtcatggagatggccaagatacagaagattatgacaaggatgatgatggcgaccacaagatggatattataaagatggtctgtacaatgaacataaccctagtctggtgtgagtaactaaagagttggcggcaacacaagcgaccctagaacagtaacagaggcttactgctaagatgaaagagacaatggaacaacattgaatcaaatttaatggtttgattggaacagatcgggaaccgtctgtggaagagatgattgaagggcgagctcatgtgcagactaacacaggagcccaaaatcctcgtacgaacaagggtaaaggcaaagtaggcgaacccttgcaaaaaactgctcctaacccttaccaaaatggcgtgccaccagtcgggcaaccctcgagggcgcagaagaccaccgatgctttcgagcctggacatccttctgaccctcaagatagggttgcattgaaaagaccagcaacaaaggtccctaggcctagaagacaagtggatccccctagtaattccgtcaatcaagatgggcggactaccatcagtcattctggggatagttggtccatgacagatttgcaacaatagttggaagcgaagtataagagatataagagtaaaaatgcgaggccatgtggggttgacctaagaaatcatttgcatgataaaatgagggggcaagacctcccaaaaagtgataccaagagattggaagaacagattgttgccctgactaagttggtgaaaaagcaaagtggagccttgtcatactctaaggatgaagacccaaaaccttgtgtcaagaggattgcggagacccgtctccctgaaaacttcaagatgcctcacatcaaattgtatgagggaagaactgatctgcaaacacatggagccaagtacaacaagatgatgcaagtcgctcgagttagtgacgatgctaagtgcttatgcttttccatgactttaactaagtccgcagaagactggtggaaatgactagctctgggaacgattgatagctagaaggacctacagtctgcgttccgtaaacaaattattgccacacgagagaagcacatggaagttggatccttaaccagcattaagcagcagcctaatgaaagtttgaaagctttcattcaaagaatgatggaggtagccgccaagaccaaggttagcgaagatctcaagctaatggctctgtagtcgggatgtgttgtaggttccttattgtgtggggatatgtagagaaagagagctgagacgctgagtgaatttatgtctaagggacagggcataattaaccttgaggattcctacatccaagcatttggagtcccttcagcaccaacacctacaacaaccgctctgagctttgcctcccagactcctgccccatctttatcacttctcacttctcacacctataaagcaagtttggcgacccatccaattcatgaaatctcaaccccaagaactccataattttagcaatttcagcatagtccagttcctcctcgtcctcgtcaatcactctcaaccattgttcatctctagaatgatccggtaactagtaaagcctaccaatagcaacaaacatgactaggatttccttattgcgaaccttgaccatttcattcttcctttcgcgccaattagccaagaatttacaagccatagtgacattggctcagtctttagcatccacaaaaattgtctaactcatactctcaatttgacacttgataatctcaaatcaatcccccggtcttcaatgtatggcctatctttcaaagtgagaaacctatcttctacctcctcgctcacaaattgagtcttatcaaatggtggcctcgaaacagatcgagtcaggttggatgacgaacccccctcttcattcacccttgttcttttgggtcccatattcacaatcaaataacaatttcacacaccaaagattcttgggaatttttgacaatacttcccctaatttcttctcttcccaatattaaccaattcacaaaacaaagcaatttcaccaataatcaaagaataatcccaaaaatttcaaaagaaatcacaaattcaacacacaatattaaacaatacctaatcttgccaccaactattcacttaatcaaacaatcaatatacattattagagataaaacttactaattgataatgctcttaatgtacctccattattgaatctccttgaaaagcttgatgatgaagatgaatagtgtatttttggattcaggtgagaatgaataaatttgggtgtgatttgtgtgaaatagaagattgatgaggaaaattaagcttttaagagatttagatggaagattgagtgatacgatgaaagacattaaaatttttagggaatgggggagacggttcggctaagaggttgtgggaagaagttgtggatttgaaaaataggtttaaagagggaaaagtgggtgaaataggctgtttaaaggctttagggtttttttttgttgagtggtcgcaaccacataatggtctagtcgtgaccacagctcaatgctcgaaaccccccattccgcccaacttcaaagtcgcaaccatagtcacgaccatgaaaatttgtcgcgactactgtgcatggtcaaaaacactactctttgccaaaccaacctagtcgtggccacagtagcgaccataaaaagggttgcaaccatggaataggctagtcgcgactactgagacttggcacgaaaaaaattctttttttagacttttcacgctttgcacggtttaaagtaaaaataaacgtctaaaaattctaaagaaaaaagattaaaattccaacaaataaaaatgcaaatgtctcaaaagtaattaaagtaaataaactaacttgggttgcctcccaagagcgttgtctttatcatcatatagccgaacggctaaatttcttcttcaaagtggcgtcagtatgatggtggacttggcttggtcaatttgaccttccaagtcaagctttaatctttgcccattaactttaaaagtttttgaattcttgcctttcagttcaacatctttatatggaaataccttgaccacggtaaacagtctaaaccatcttgacttcaatttactaggaaaaagtttcaaccttgacttaaaaagtaagacttgttgtacgggttgaaattcttttttgactaaatttccgtcatgcaatttcttttgtagatcttcgcattctcatatgcctcatttttgaattcttctagcttatctaattgtaccagtctcttctgtcctgttgttgtcagatccatgttcgaggttttcattgcccaaaatgctttatgctttaattccactggaagataatgggcttttccataaactaacctatatggtgacatcccaataggtatttttaacgttgtttggtaaacccacaaaacatcatctaatttccttgaccagtcctttctagatcattgaaccatcttctccaatatcaacttaatttctcgatgggaaatctcagcttgaccattgctttgtagatggtaaggtaaggttgttctatggcagactccatatcttgctagcaatgcctcaaactgttaattacaaaaatgactcccttcatcattgatgattgcttaaggagttccaaaccgagtgaaaatgtacttttgaaggaaagacaagactgttttaccatcattggtgtgtgttgcagttgcttccacccactttgatgcgtcgtccatagccaacaaaatatacaagttgttaaaaaatgatggaaaaggtctcatgaaatctatacccccacacatcgaacaactctacctccagaataccagtcaaatgcattttgtttctccatgaaatgttgcctgttctctgacaacgatcacatgccttcacaaactcattagcatccttgaaaagagttttccagtaaaaattgctttgaagaaccttggcagcagttcttgttccactgaaatgccccccacattgtaaactatggtaatggtttagataaagtacatctcctcttcaggcacacaccttattatttgattagcacagtgcttgtagagtgttggctcttcccagtagtagtgcttcacctctgaaaagaactttttatgttgttgtcgagacatctctagaggtgtaccattggcagcaaagaaatttacataatctacgaaccaaggtaccatcaagctctccctcaaactaaagagttgtttgggaaactcttcatttatttgtacctccttcgtgttttgactctcttccaattcaagtcttgacaggtgatcagcaactagatttttggtccccttctattctttttaactcaatatcatactcttggagcagaagaacccaccaaattagtcttggttttgcatctttcttggttactaggtatttaattggcgaatgatctgtatatgctattaccttattcccaatcagatatggtcgaaacttgtaacatgcaaacacaatggctaacatttccttttccgtagtggcatagttcaactgagcatcattcagggttctactagcatagtagatggtatgaaatacactgtcaactcgttgacccaaaacagctccaatggcgtagtcactttcaccacacatcaatatgaatgaaaactcctaattctgtttagtgactatgggtgtcgagattagcttctcctaagagcttgaaaggcctctaagcactcatttccaaactcaaagggtactccgttgacaagcagattggacaatggcttagaaatcttcgagaagtctttaataaatctctggtagaatcctgcgcgacctagaaaactccaaacccctgttacagaaattggagggggtagatttccaatcataaacacattggctctatcaacctcaattcctgcccttgagatcttgtgtcccaaaacaatctcttctttcaccataaaatggaacttctcccaattaagtaccaagttcgactcctcatacctaattagtaccttctccatgttcctcaaacacttatgaaaagatgaaccaaaaatcaagaagtcattcataaaaatttctatacaaccctcaatcaaatctgaaaagatagccatcatgcaccgttgaaatgttgatggagcgttcatagtccaaatggcattctcctagaagtgaaagtgccatacgaacatgtaaatgttgtcttttcctggtccttcagcgatatgattatttgatgatagccagaatagccatctaaaaaacaatagtactcttgtacagccaatcgatcttgcatctggtcaatgaaagccaaaggaaaatggtctttcctagttgcattattaagctttcggtagtcaacgtaaattggccaaccagtaacagttctggtagggatccactcattttttttcattcttaatcactatcatccctcctttctttggcactacttgtactgggctgacccatttactggctaaaattgggtaggccaccccagcatctaaccacatggcaacttcctttctcactacctctttcattggtggattgagtcttcgttgtgcatcgatgcttggcttagctccatcttccattaaaatttggtgcataactattgagggactaattcccttgatatcagctaatgtccacccaatggccttcgtatgtgctctatgtactctcaacaacttatcagtatccacatcaaaaagtgaagctaacactatgactggcaacgtcttgttgttacccaagaattcatatctcaaatgatcaggaagaaccttcaactcaagctctggtggcttctctacagacgacacatgcctctttggaacgacccccaactcttcaaagtattttctattcaacgacccataagagtcaagacattttacatattccatcacctcacttctgtcttgctcattcaagtcctcttcggttagactcacttctaactaatcctcaatcaatttcttcttttccactatagtgtccacgagataaccaaagaaacaattatcactagcctttggaaaagtcattgccttaagaacaataaaaaccacttcttttccttgcaccctcagctttaattcgcccttctaaacatctatcaatgcttggtctgttcccaagaatggtctccccaggatgatgggcacgttactatcttcttccatgtccaaaacaataaaatctaatgggaaatgaatttatctactttgactagaaatcttcgatgaccccctttggatgaactaatgaacgatcagccaattgcaaagttacgatagtaggctttgcttctctcgattacaatcttctaaaaactgacagcgacatcaaattaatgctcgctccaaaatcacaaagaacattcatcccctctattctcccgatggtacaaggtatggtaaaactcccaggatctctaagtttgggaaggaatttcttctgcaatattacactacactcctcggttaatgccactgtcttgtaatcctccattttaattcttcttggataggaattccttcatgaacttaacatagcttggcatttgttccaaggcttttgcaaaggggatgttaatgtgcaacttcttaaatatttctaaatgttatacccgaactttggctggatgacacgtgtcaagattaaggggatgagaatcggtgcaatatctttttacgaaataagtcattcattacgtaagtatcagagtatatttataacccgctgactgtaaggtcttaggcaagaaatcaatgtacaaactgacacttagtgtattagcgagaaaccatatgtcgctaaatatgaatagtgaggcaccggagaaagcgacacgtattaaccgtgaaaatccttagcatgcaataaacaagctaagtataaaagtcagatcagctcaaagaacaagtaagcgagatgaccatctcgctatgggaagacatcctatagcttcatccaactaacaggagcgaggcttacaaccctggcgagttagaagacttctttataaataaccttgatcgacacaagatatacattgtcgacctcggaggcaagaatggccccagctccctattgagatcaccataatcaagtttctgtcgagacatctccagattcaacagttaaagacgtgtttaat

SEQ ID NO: 26342 - DNA, 3104 bp, Cannabis sativa
tcgagatgccttcaccaacaaagcaaaaagaagttcaggctttaataggaaggatggtagcactcaatagattcatctcaaaatcaattgataagtggctcccatttttcaatgtattgtgaggcaataagagattcgaatggactgaggagtgcgaggaagaagcatttaaaaaagggataaaaaagcacctcctttcagcacctccaattttggccaaaccaataattggggagacactatacctttatcttacaatctcgaaacatgccatcaatgtagcattagtgcgagaaaagggcacaaatcaacaatctgtttactatgtcagtctaaggttactaggggcagagttgagatacccacctctagaaaaactcgcactatgcctaattcatgcatttcgcaaattgcggccatattataaagcacatcctattaaagttctcacaaatcaaccattgcggcaagtattatcaaaaatgatgcttcaggaagattgataaaatagtcaattgaattaagaaaatttgaagtaacttatcacctgaggatttcaatcaaagggcaagctttggttgactatttgatagaaggaataaactcaaaagaagaccctaatattgaacgcgaaccagaaacatggaaattatatgttgatggggcttcaattgagaattgctttggggcaggagtaataataatgtcaccaaaaaatttcaaattccacaacgcactaaggtttcagtttgatacttcaaataacgaggcaaagtatgaggccttgttagcagggttaagaatagccgagacactaaaagtcaaaagcattacatgctttagtgacctgcagctaatagtgagcaagtcttgggagaataccaagccaagtcaaatacttagagaaagttcagaagaacttgggaaagtttgattattttaaaatagaacaaaactctaatgtagatgccttagtaaaagtagcatctcaatttgatctcgataagttgaacttggtatcggtagaggttttagatgagccaagtatatgtgaagaggaagcaatcgagatgatagatactttgccaacatgtatgacaccaatcatcaagtgtctattaagtggagaactccctacagacaaaattgaggcaagcaaactcttatattcgatccctcgctacacaatggttgaagggaaattgaggagaggttattccatgcctctattgcgatgtgtgttaccagtagaagctaatgaaataatcagagaaattcatgagggtttatgtggagatcatgcaggctggaaaagcttatccaaaaagataattcgtcgaggatactattggccagctattaacaaagacacacatgaatttgtcaagagatgcgataaatgccaaaggttttcacatatactttgtgtaccaccaaccaagctgaggatgatgaccttgccataaccatatgcaatatggggaattgacctgattgaggctttacccacaggatgaggtggagcaaagtatacagttgtggtagtcgacttcttcacaaaatggacagaagttgaacctttggtttctgtcacattcaagaaggttcttgattttgtcataaaaaacatcatatgtaggtttggcattccaatcaagatagtatctgataatggaactcgatttgatggaaaattattcactgagttctatgaaaggaataaaataattaagagcttctcatcaaaattgaggcctcagtcaaattgacaagtagaagttgttaataaaaccttgaaggatactattaagaagaagttagatgctgccaaaggaagatgggtagctactgcaagtactctgggcccatagaactacagagaaaacagcaatgggacacactccattttcattagcattcggctcgaaagtaatgttacctgtagaggttaacattgcgacccacaagcgtgaattctacaatccagagcaaaaccaaaaacttctaaatatgtccttggatctgcttgagaaaaaatacaatgagtcacaaataaccaatgcagcttaccaacaccgaataacgaggtactttactaaaagagtctgaaagatgctatttaaagtagaagattcggtatttagacatgtatttgcaaatacgcgagatctagcggcaggagtgttcaacccaaactgggaaggcccgtatatcattgaagttgtggtaggaaccagggtttatagattatcttagcttactggctcgctaataaataatcactggaaatagcgagcatttacagccttattaccagtaattttattatgtaaaaatgttatattaatctttgtaatgattgatcattgttctgaataaaagttgaatttttttcaagtaattataaagtttattttcttaaaaattacttggggacatatatgtgtataataactagagtccacctaaaaatatatactacaatgctcaaaacctaaaaattaaaaaaaaaaaaatcacaaaagaaaggattgaaaaaccttttctttaagagaaaattaaattagctattgtaagtgagattctttctcaacaaaaagttatatgcaatctgaataaataacggctcgcatgattatagcatgtattgtaaacgagatacaaacgtatcttgagaaataatacataagctaaattatgaatagaggattaactattcgtataagcaatcaaaaaatattcaaaatagttcttaaaagaactattcaaaatatttgaagtttgctctaaatatatcacattgcaaactgctcgcgaataacatagcacattgcatacagctcatctaaatcaagattatgatgatagaatgcatgtaatccaaaaatatcctaagcaaagtccaaaaaattattttattgtgaattcaaacacaatatataaatattaataactcgaagaaagtaggataaaaggcataaaagtaaatatatataaattagcaatgttggccatccaacaaagcaaaagatttagcgggctcttcttcttcttcaacttattcttctgtggtatcttcatttctcttggtttgttcgtagaaa

SEQ ID NO: 26343 - DNA, 4599 bp, Cannabis sativa
aaaacgccaaattctgtatgtttatatgtgcgagtaaatgtaatacacatgtaaatatatgaaagaaatattacttactttaataccagggtagtttcctatccaagaaagattaagttcattcttcaatccatcaattgcttcatttaagtagtgattatctgaaaagaaatacataattatatgtttaggatataaacaaattgtgggaagaaatacataatttcaaatgtatactgtttatgaatttcacacataccagacaagtttgtttatttactaagggcatatccttcatattttgtaaagaagtgtctcgacacacaaaatgtgtttggttctagaaatcaaatcattctttttgttctaaaggcacttgcatgagctataagaaaattagtttctctaagttcaatttcaacttttatatttatgtcacttctataaagaatgtacacagggtttcctttcaaagctcaagtaccatggcaaaagttaacaaaaatgtcaaaatacattgaatactacaatttgaagggaaagaatacattaggctaagagcataccagaaggaagaattgccaacttagcatcagtcatgttagaaaatatccgagatttagtcattgcatagttcatcattgtcttgtgcctttccaaatgatcaggtgtaaggtttagcactgcagcaacctaaaaagatgcacatatcgtttgatgatgtcacgatagaaaaggcaaagaaacagtaatgtaactatcacagaaaattagaaggcaaaacttgtaagcctcactcacagatggggagaagtacttgttgggaatgtccatttggtaactgctaacctcaaccacagcaacctgtaaaccattttttttaattataactctatcctactatttgatctcaaagtgcatagaacagattcaagaaattgacaactaatacttcctaatttttttttacctgaaacttgtgtcctgaagaagttgatggcaaacattgtaaagcagcttctgatagcggattcccaaggttaccccccacgaatgcctcaatgcccagttgtctaagcatctggctttaaataataaactaaatatgaaatgctgaagaccaacatacttttaaatcataccagaatgtgcatagacatgtaaactaaagaaattgttcaagaaattccagtcaacaacctttgccacaaaatacttaaaacattaacaatgtagcttcgagaaaggctaatatcttaactgttagtctgattttctggctaaaattcctactcttacaatgcaaaagttactcgaaaacatataaaattcgaagaaaacttcacaacctgtccagcaaacgtaacaacagtcgactttccattggttcccgtcactgctaaaaccttaatactctttggtagaatttctgcagcaaaatccaactcagacattacctgttttccctacatttccaaattttcacagcaatataaggttttcaagaatttcaaatttgaattattttacaagcatgatatcactgtcaacaacaactaataaaagaaaagctttttattttttgttctagatttcaaatattgacttactgaatgccataaagagttaagaccataattttcaagatgaactccaggggaaacaaccaccctgtcagcactattaagtaggtctccatcaaaatttccaagaactgttcttaaatcaccactatgcttctcaaaatgaggatcttcctgtaattaatttcacaattttgaaattttataagtacatataatccaatcaaattgttgaagcatcataggtatattatacatacctctaacaaacccaaattttgattatggtcaattgccacaacagaagctcctctagctaaagcaagcttcactgcagctttcccagattttcccaaaccaataacctgaaaaataaaatcacatgaaacaaaacaacaaaaccatgattagaaaatttaaacttccactccctatattgatccaattccatgaacataattaaaagaaaaatacccagaatcaaaaaataagatcttactgcaatggattggccttgaaggtcctgagatgaaacgcaggctctaatggaccttggaagaaacccatttggggagtgagtgggtttgagtctgagaattggggtttgagatccaatgaggagtgagtttagcttcattttgtcacgctatatcactaactggttcttcatttgaaattgaagttatatacaagaaggagaaatatatatatatatatatatacgaatttacacaaaagaaatctggaaaattgattttggtaccgttttaattgtgtaataaattgccctttatttattttctttaaaaaataaaattggaatgctgtaccactaccatgaaactcaatgactttgattatttggattctgttgggattttcatcattggtttgagagacacctgttaaatatgtcaactccactttcagattttcagtacgttacttactgtggctacttccgagtcaacggtcaacctcttctgttctctggataaacaaaaataatagcaagtgaagggactattatcaaaaataaaatacaaatggggacttaattgcaaatttacttgtttgttttgatacgaggagttcatgttcatgcattttgttttaaacttttttttatctttctttctatttctatatatgtatggttttgatctcacaagataactacagattatgttttctttaatgcatattaaatcatatctatataaagttattttttacatttaagattgaagaggaaagtagtattggaaaattttgtagtgcaacgtacagatatactggtttcgtcgtgatcttaattgaggctttgatttattattattattttatttatggtgtttattgcaattatgcttttacaatatttgtaaaatctaaactattttaaactttaatttgaacattgtaagttacttaaaaataattattttttttattaaataaatatgaaaataataggaaaacatatgccaactttcaaatctaaaataaaaataccttttttgttttcttgaagtatatttgaaattaattaaaatatatcctaagtaatatataccatactataatttaaaaatcaagccatatattaagagataattcattacgttttgtgggatgtggcatgataagagaatcgagttaagaaaatggtattaaaggtagttattaatctcgaaaattaatattgctaactttcgagattagttaaccgacaatgagaagattaacaagaacaaaagagtcactccgaatgagtagcgatgcatggtccctagcatggtcaccaccatgcaagccattcggtatgcatgctcaaaactcactcggcatgcatgcatgctcaagagtcactcggcatgtatgctaaaagtcactcgacaccacacttcacaagtcactcgacatgcattttcacaaatttcactcgacatgtattttcaaaaagtcactcagcatgcatgctcgagtgtccctcaacaagcctcactcacaaatcactcggcaagcctcactcacaaatcactcggcaagcctcactcataatacactcgacaagcttcccttgatcacaagtcactcgacaccaaacttcacaagtcactcgacatgaattttcacaaatgtcactcgacatgcatcttccaaatgtcacttaacatgcattttccaaatgtccctcgaccatgcatgtccaatgtcacttagccatgcatgctcaatgtcacttgttgagcatgccactcaacatggaatttccacaacaacatgactaaagttagtagaattctcccaagtaaaggaatctttgagcaacatacgatcacaagggcaaggcgtgcatgggagaaaagtacgatcacgtcttctgcaagctctaaaagcaagaaggtacgagtagtagaggcaccacaccagcaaggtctgaggacttgaccaagggtacactacagacactacccctgcgacccgggaccacctgacaccaaacaagggtacgaggcgcaggaccacctctcgcacttgcaatttgcatcctgaaaagcaacatcttacctctttaagaccatcatgtatctcaggccactagagcctataaatactcatttctcacatatgcgaggaggttagaaaataaatcttgtaatcaacacattgaatgcagtagaaagaaattttttctctcctaaaaaatctcattgtcatttgaatttatactctatcttaatcttcatcttatttatgagtttcgtgtataaattttgatttttcggccaaaaagttaattgatgagttcttactgtccaaaaaaagaaaaaaagataagttaatttaagctatgtattattgtataaaatctattttataggtttattagcaaaaaaatatggagtaagttgaaaccacttttattaatcaattaatcaaatttgtctctaattttatatttatttgaaacatacctatttttatatgtattgtacctaaaataccttga

SEQ ID NO: 26344 - DNA, 958 bp, Cannabis sativa
gaagctgaattccatatcgaggtcaaaatagatagcttccaaggtcctccttatgctcctccaatacctttttggttttctataggtctaccaaagttgccatcatcttgctttcggcggcactgcactcgaattgagtgttctccagctttagagccagcctggcattagcacatccttcgctaagaaaggcatccttaaaagacaggaggaaaacacttagtaaaaaatcaacacatgaaaagcgattaaaaagagaatagtatcaagtcgaaatacttaccccaacgacctagtggcaaagagcctgagataagaacacgacatctttgctagtgaccgtggctcacctttttggccttagttgacttagagaagtcccaatcagtttgtataaatccgcaacaaacgaagctgcatcactgcccaactttacttagaatccctcggaagcggcggatctatccagtatcctagtaccgaaaggagcatttgagccctttacgactatctttgagctccgccttactatgattcaacaagcgacaatgtaaatgttaatcagtccatctctcttttttccgaaggcaatttcaccctcgtctagttgaactggcctgagggggaaggatggagccatagggttcccccttgtagacttctcgtgcattttcgagggttatgctccccattgggatgtcactacaaatttctctctccgggtcttgctgcttattcttcgctgcctattgctctctctcctctctttgactctttgctaaggctgtcgccttggcctttgtacaagtttcctcttgttcagctgtcgtacttccctgcttgagaggcacttttagggcatcttccttgtcaagattgatcacttggttaggtccttcagccatgtttggagcaggaggatcgactaatgggacttgtgttggatatttattttacc

SEQ ID NO: 26345 - DNA, 2334 bp, Cannabis sativa
ttataattcgttattagcacgagtttctgtctatagtaaatatttttttgttaaagttcttcagttatttttcaggtgacggtgcactaaatatatatatactcatttgactgaaataatttcaagaaccttttttatttttcttgatttgattggatagttatttgttgtattaggtcatattattaatgatcaatatttaatggacttagcatctgtgtgtataaagtttagttgaagcaaaaatgtagacttttctagttaactgaaactgttgacgaggaggcccaatctaacttaagttatgtagctaagtcatatctctaactttataaatacatactatctcatcataattgtataccattttgataataagataaataaatttacttctgatttagatatctaaagagaaagacttagttgataatattgtactatcaaatattataattgttgtatagatcaatcaaacatgcatacctaataattatattcattattgtattctaattaaattatatacaaaatttgtatatgagttattaatttttctaacattgtgtagttgtgctattattcaactacaatatttggtcatgtcattgtcagttttataaatatgctgtgctatattttgttttgtttcataagtccaaactagagtttatgttcagactttcacaccttttccagggctttaaatgaggaagaaaagtgagctaaacttaagctttgaactatttcttgcattcacaaaaatgtattgcttatgatttgtcagattttcttcattgggacaaacctagactcgtgtgggcaaatagggatcgtgtagtggacattcaatttcattcattatatatttttcaataataattccagtaaagagaaaaattcatcagattaaattataccatctaatccattctactttaactaatattttgttttttatgtgttaatttttgctttgagataagaacaaggtgacaactcacaaattacaataaaaaagaaatgtgaaacatgtgcgaaaatgacatcaatctaaaaaattatgagcaaataatcttaagatttggcaccaataaacaattccaacctccacctcttattaaatgtatatagatttaattgttaacatatatagatttcattgttaacataaatatgaattacattaaatatttttggaagtatatgatgtctccaattccaacctccaccacctgttattgtcagagttattgtcagaggttggaccgctctttaaaattcagtaatcagatccaaccaaagtcgctacttctcgttcatctttatcctgctccacaccgtactggataacgcacgtgttcaaaatctcaagccacatgtctttctttagttttttttttgaaagggagccacatgtgtttcttatccatctatttttctattattcgtttcgaaaatttatagcataaacaataaaattattgattttattgcttatagatatttaaattttaaaattacggtaagaatattttaaaaaaattaattaatataattttgtcaatatttaatttaataattttgttaagtggtgactagaatgtcacatgttatactttatattagtccaatgcaagatgattttcttttaaaatactttaaattagaaaaaaaaaagagtaaatctttaaataattttggccaattataattttaatttaatcataacttttacttttataatgttttcattttttataaaaaatatgacactttttcttttttttttttttaaataataatcaaaatatatttttagtaattgtaataggtaatggcatcacaatagtaattcttttgttagatttatgtcctaaagtaagtatttaatggataatgtactactacaaaagaaggtattcgcgacggtttgaaaaatattttttggattgtcgctaataaaattaaataactttttgaaccgtcgggaaaaattaagtattcttgacagttaagaacacttgttatgaaaattcgtgacgatttttaagttaaaacgcgattttttagttaaggttatacctgacggtttaaaactatcaagtatactatagccgacggttttttagaacataattttttagtcgggtacaatcctgactaaatataaccttctatcgtcactttctttcttcttcattttagctaccatatctatctctcaaacccagcagctagcggcgcacctaaaccccaaaacccatccatttgatcgccatctcttatgcctccacccacctggccatgaaacccactctctctctctctctc

SEQ ID NO: 26346 - DNA, 2270 bp, Cannabis sativa
acagtatctcattagttgagaatatactaagatttcataattgtactcacacaatagaatttaatagctcactctcttcctgagtgttgaggctggcttaaaagattgtggtgtgaactcttcatcaaattttgggatttgatattcgataataatacgaaaacatagcaagaatctcctaataagctacaagaggtattgtctctcttttcattagtctagattaatatatatactttatcttaagatccttgagattatggttcatattggattaaattattcttttaatcaaatctacttctgcttttttaactctcatatggaccatacaaactaacaaatggttcttccttgtgtggagaatcattcgtacattggggaccggtgttggagtagggcatgtgttgggtgaaggcttgcacttagtggaccaaatggtcagaggagcaattcgaataacgaagagtgtagaaagagggtgcacgcactaccatggtctgacatagaggacaagatctgatactatctccaaaaagaataaccatcataaggccatccagctttcccctcataagtggctttcggttctttgtgcgtagtgggcttccgtcctagactctttgcgtggctctctgacatctgcatgtactagtaagtaagttggtcttctcctggtgccaaagtaatggtgggattctcagatcctgaatggttatttgttttgtggcaactttcttatgcctctcctggatcaaacctttcccgggtcagtattaaggagacttaatcagaaatagtcttcatattctcttccattgattgctacgtgtccttcatccaaaaattcagataaaaactaataagtaaataagaagaatttttttaaaaagaagtaaaaaaattgaaaaaacaaacaagagaaaaaagatggtaaaaaatatagaaaagacttaaaacaaatgttttaaaagagaaaatggagtaaaaaaatgagagagattttttaagaaaagggaagaaatatgaggtttcaaaaaaaaaattacaaaaatattaataattggtacaaataaaataaaacacacaaacatgaccaaaaaatcacaaattactaagataattttatttattttgagaaaatataaaaaaaaaaaaggaatataggaaaatctcacctaaggagtgtgaaacaagtaaaaaaaagggcttgcaaagttatgtataattaaaaaaaaaaatttaaaataattcttattaaagtgaataggaatatgtacatattaagagcaattttaatgaagcactaaaagtgttgtgtatatgcatattttagtcgatcttcataaaagtaaactccaataatggtgtatgaagtggtcaaaatttagcacatactaaaagttgtaccaaatataccacaatacatattacttttttatttacttttttttcacttattaatataattaatcattttttcacattttatttatataattaatagaattttaaataaattcaataataatttaatgtttttgttatttcttttttacagatttttatcaagaaaggattaattttaccctaaatatattgaagcactattataaaatctgagctaaatttaatattgacatgcttttttagctcaaattatacaccatacatgaagatgataacaaaaatactaaaggatgtgctaaacaccatatatgggacataccgttattggtgtatgtcaagtgagaaaatgcagatttagaatatgtttgtaataatcagctcaatgagctatgccttcattcattgcttaaatacagtacaatggataattctagaaagattacacctcaccaaaattataacaagaaaaggaatattcttacaaaaggtaaataacagaaagatatgcaaatcagagtgtaatcattggctaatgatgagttgtcaggaaatgctgatgttggaccgctatgacagatgtcagcagcagcagaggataggtagaggtgactggagtgtatttcatttcttaacatgtcaatatcgggtctcacaagttgtaatttagggaataatataggaaatgctaagtattaagtgccatatttgtatagtattaaacatcttaaggtgtcaaataataatgttttattaacaataataaaaaaataattcatcagaaaaaaatattataaaaaaatgattcataaggaaaaaaaataataagatcattaaaaaaaccacataagttgttgtaaaaa

SEQ ID NO: 26347 - DNA, 2579 bp, Cannabis sativa
gttgaacctaatttcacagaaacaaaaaaaggaaataagaagaaaaatcttctcttaaaatgctatgtcattgcaaataaaggcctgaataagaggttggtaagttcaactacatacaacaaattgatggtagtgagtttcagcatctgcaaaacaagctagtaaagcaaacaaaacaaagatgccaagtgaaaagcaagacgaccaaggcttgagactaagtttgaaagcttccattgctctctaattccttaactttgtataatcaagtatggtgctgatgagtatgtttagacccatagtagagttgatacttatactaggatagagccttaagagggaataataattaattcattattttgacttaaagaaattataattagtaataatgtatttagaaaattaggttttaagtcaacagtaacacttgagattataggacagcttagtccaaccacaaatgggtatttggtgcacccactcatagtttctttcttcacttgttaatttaattacatggagattagtgggttttgttgtataatctttgaaactctaccatataataatataagtttattaattgtctaaagttgcataatatttcaaggctcttgcggtcaaaggcttgcaagtcttctaatcagaaactagaaacctttgctttagcttcataatttatccaaccaagtaacgtcgcacaataaaactttttttttttactaatttgacattgacaaaggacttttagaaattcataactaaactgtacatacatgtatttgaatgtgaaacaataattaaatatgaatttctattcttgtgtttaacaatatatatatacatatattcattacaattaaccattagcgggtttaaaaaaactataatagccgtacgaggagtgttaattacaaccttttagtcaatttttatgtctgaaattacatgccaaaatatttttttaaaaaaataatttatagcggtatttgttatagttacagtatcattcttgtaaatttttgaaaaattacgaatagtttacaataccgaaaatagagttcttgatattccagtttaccacgcgtgttcaaaaaacttcaaacgtatttttggtattgtaaattattcaaaaaaatgtcaaaaatttacaaagatgatgttgtaagcataacgaacattgccgtgaaaaaaaaaaatattctgacatatattttcggacgtggagattgactaagagattgtaacaggaggttgatggtaggactcctctaaacctattgtgtaattattccactacacaatattatttttagttaattatttagttaaacaaatacatttcctatagataaatttacacaatacacttagaaacaattttttttacatttttatgaattcttttttacatcttttacagagcttttttttatttacatttttatgaattatctttttagaaggtatcacttgcttttttttagaaaaaatgttgtttttcacattgttttttttgccagcagcaacatcagatcaacattgctctagcataaacaaaaaaaacacaacactccatattgttgtaaaaaaatatcgtgttgcttttccacagcggtaacatcaaaataatactttttttcaaaaataataaaaaaaataattccatatttttgaaaaaaaaaaatctatgaaatctgcaaaaaaaaatttgtcatttttctgtatttatgaaataatctcatctaagagagggcaaaaaatgaattaaaagaatttattaagatgtatttaaaatgtaattggaattgagtgtaattcaaaataattactaaatttgtttaagtagtccagataattacaccataagataatttgagataattgtaatatgacaattatatattttgaattctcatatcttcataaaaattgagtataatcactaaatactattagttttaagtagtaattattacatactatatataattttactatgtaattcctaattattttagttgataataacaaagtctagaatatataattataataataagaagtctaaaacttgtaatttaagaatgtgtaatatttttctaataaatgtaaatggtattttagcttaaactaaaatatatgaaaaaaaaaaaaaggtaagttgaaaaatatcacttttattaatcaattaattaaatttatctctaattttatatttaattgaaacatacctttttttatatgtattgtacccaaaataccctaacataagagagtctacttggagaatatcttgaagtgacagggggaaaattggtacaatgtttaaaaaaaaaggtaaaaatgatagactttagaaaagatggtaaaaataaaaaagataatataaaaagggtatagagtgtaatttcctcaagattttaagtacacatccatgattctcgatggcattttcacccttaaattgtaataattgatgcatataatgtgggactttgtttataacatatttagtaataattttttttttaattttgtagatacataaatttaaatgggttatttttacatta

SEQ ID NO: 26348 - DNA, 1999 bp, Cannabis sativa
caagtctaataactaatttgcattgcatcttcctattacatatattagattatacttattttattaaagctatgcaaaggcatttggtctttctctttgtgtttcttttcatagacaatataaatatatgcatatatataattattcactcacgatgtatttttgaacaactataatgtagtaacaaatccagaggcttgtgcattgtatttgctcatgaatgtttattagtattcactctttcaaacatttagttcaattaagtatcgagtcccataaaatttaatataataatttttatttagtattgttaaccaatcgcaaagtagaagtaaaacgccttgaaaactattaataactcatcgtttaaaattccatacataaatgcgtaagttttaccattattggaatgtactattaaacctaaattggggttatccgctaagaattacggtagagcagtttatgaatgtcttcgcggtggacttgattttactaaagattttaataatcaaaacaacaaatttaatattatttgttaaggtttctctttctaaatatttagtcacctgaggatgttctttttctctggacaagttcgctagccctccttgggcatagatatggcttggtcggagttcctagttttgctactacgattctagttttgtctttataacatggttttgagtttcatttaggtttctgtgattaatcttatttctgtgacataattttattttgatttatttcgttgttggttcgtctttttgttctttaatgcctcgctataaaatttcttttagttgttattaagttctccgtagcttaagaggttgttagtggtgcagttacttatattgcacaatagttgaatactcaaactaagaggttgaatgaaccatgctgcaacagatctactgttgtgtcctctgtgacgtgaagtaaactaaatataggtgttcttaaagataattgtgatgttgcaatcattttcatctgactttcttttatgtttcttttgtgtaaaacgatctagaaatcaggcagccgattagatgactcatttttttattctaatcttggttgtattttcaacatgaaagatatcctgattggattgcaggttgctattaatgaaatttcatcatttcttaaaaaaataaaaaattcttaaatgttctgcatagcaatctagtgatgttttaataaaatttatgtgtattgtttatgaaattaagctaaatttgcatttgtatttatttttcaattaaaaaaattacacacaagatgatcttggttatttgtcactaaaaaggataagtagaaatttacctatgtgccctacaacaactcacacacagacatagtaccagtaagacaaagagtactcacatcagtttctttactctattttttacaatacatcatttagattcaactttctttattttacctcaaaattttctattacgccatacattaatttctttatttttttctttacattcatttaaatattatttttaatatatattaaatacacaataataaagtatgaataaagtactaattaagtatcattaaaatattgtttgaatagtgaatagcaatttgctacatgtaaagaagtattataacattttataaaatttgagctaaaatagctattttgatgtttgtcagttttttacttttatcttctatattttgaaaaaaaaaaaaaaaaagaatattataactcatctaatgtgaaatctataaggtgcttttagtaaggtcatagatgatcacttttcacacacactataaatattacatgaatggtctataatatttttactgattaattaaataaacaaaaaaaaaaagctttaaactatttgaatcgagcaaatacaaattttgaattttttttttcaagaaggactattataattgtacatatattatatatattatataattactagctgattgttacgtgccaagccacgta

SEQ ID NO: 26349 - DNA, 3567 bp, Cannabis sativa
  modified_base (3203)..(3209): a, c, t, g, unknown or other
gtgcatcaatgtatccttttaaggtggtgcattgtagaatttctctaaattttatatctcaaaacatcacttctctttctcttccatttcaagtagttttggggccatttttgataagcaatttagatggcaaccctattattgttgtccttgttgggttcttgttttacattgaagttcaagtacttcatccactacaaccacttttgataaatcaacctccttccctttccttgcttccataattttctttgtggacttgtagaataaaccataaagtgtcaactgggccagcccaagtaataagcccaacccacatgatatctgcagttccatgattcaatactatataagcaactgaaaaaaaaaaaaattggagaatttttattttttattttttaatttttttagtaaattttagcttttttcaaatatataatatatattatctaagaaaattaaaaaaaatatatatatatgaaaaaaaaatagcttagggtaataagtcgggtaaccagttacattatactttttttttttctatattttaattatttttcctgaaaattaattattcgaaacaaaaagctatatattttcacaaataatataaaaacccatcaaatgtgtaattttcacaaaaaaaaaaaaaaaaaatgatatttgatcttattttgaaaaatggagtaagttagaagttggttacaattattttgtctacaaaaacatgcatgcataatgaagtttctaatttattaaataataataataataaacaagtattaataaatctcttataactactaggtggtctgcaatatttcatgtcattttctaaattcatacttgtaaatactagataaatttccattctttttaattaattttcaaaaataagtaaaaaggaaaacccataattttacttgattaatggatgcatgaaattgaaatttaagatatgaaaataataaaagagttgagtttggtaaattaccaaaattatgatatcaaatcgaatgagagaataagcaacccaaacactaccattcacaacagacgcaacagacagaaagaatggcatgtattccacactttttgtcctaatcaccattttctgtaacaaaaacgacaaaatcagatcaaaacgacaaagaaaactacaaccatattaatgtcgttttttcgttctactagcaaacaccattgtcgtatgtattttttcccttgaaagaaaaatgatgagcattatttttgacatattatgagcatatttaactagaaaaatttatcaaattcattcaattaatgtactcaataccttttcataaaagaaaaaaaagaaacaaaaaataaaatgcattccaatgtatttataagatttgttttatgtactttagacttagtttgatatattttgatttttgaccattagattaacccaaaatcactgcaaaattttatttttttgtcatttttatgattgcaaaatataattattttaaaacttcagatatatatattttttatatatatctgaaaaaatatatatatatatatatattaagtcttaataaatcacgctaaaaataaaattataaaattaaatatataactactaagaatcaatttttttaataacatgttaaattttcctatatgtataattttttttttttttaaaaaaaaaatatagtacttcaaattgtgccctcaaattttggtatattaattgttaaaagttctctcctaattaaccaatacattaattatctataaatattattgtatatgcatcggattaaagatgacttaccatgatggtcaaaggtgcagaatacatcaaaatgttgatgaagacacaagcaatgccaactatgagtgaccttttagcatgagtatgaacaaggtttaaaaccaaaaatgtaaaaatgaaagtaaaaatgagctccaagaccactaccacaagcaatttaattctagttttcttgtctgaaaaaagaaagtaaaataagatgaagcaaaattcgatcaaaatccctgtcgcattgatagtcagtacaagaaatctttcgggttgcaccattggtagcccatataggctacacaacaggcaattcattagggttgcaaggtatggtgtcgctgagtattgctccactgaaccttttctccatatatctatcattgttggcctgaaaaattatcaataaatatatgatgatataagatttttattttggggttacattacattttaatttgtttattaaaatatgagttgatgaatagttttttgttgttttcactcgtatagttagtgatgatatatagttattggtcttaatatttgtatgaagtctaattaaatcaaagtatgatcttttctaattcaactaagttttgttactaatcaattttaaatatatgaaactggagtttatttctctgaaaatataattaataattgataattaataatgataagtttacgtacattggggacaagaagaaaaagagtgtaatgatgtttcctgcatgcatgcaaattaatcacaatatcagttataaatattattataaacaaattaattaataagcaaaaaattatgaagatttctgtaataaaattcatatacatatatatttaacttaattaattggtgtagtaaatatatttactttgtagttaaacaaatctcattaattgtgccacaataataattaaaaaaaaatctagttaataaaaataatagttgttgtcattaaaaaaaaagtaggtaattagagaaaataaaagtgatgaattatgagtagtttataataataataataattaacacataattattacctaatataccaacaaaagttcgagcaacttcagcagaaaccattatttgaagaatgaaaaaactcagagaaattattattaggtgattaataataagagcccaaagagggctttattgattgttataattaatatcttctatataattagtatatattataattcatttatatatatttatatgaaagtatatatacttaattccactaatttattgccccccctcccaattagagagaacaaatgcccaatataagattaatttgacgtgtgaagaatataattatgtatatatagtagtataccatattaattaatgttggcttgattatatataataataataataatnnnnnnnataataataataataatatgtatgtgtgtatatattaatgaatattcacttaataatattatataaatacaaaaaattttacttttagttacaacaaaacttgtgaatgaaagtaaaaaaaataagttataactaattataagttattattcttatattgtgactaaaaagtccgtgactaaaaatattggtcacaaatattacaatttattgtgactaaatgaatttttagtcacaataaatattaaattaatgataacttgtagctaaatattatattttaatcacaaataactttttgttgtgattaaaaattacattgttataaaaaatttatattgcgacgaaaaagttatca

SEQ ID NO: 26350 - DNA, 1819 bp, Cannabis sativa
tgtcttgggtgcttgcacccattcccaaacttaatcggttaaagatgggccttagaacgacttgcttctgaatgtttcagagaggaagctcgctttgttagccgactaaaggtgcaccactaagggcctggccgaccgaaggttagccaactatagggaagttgttgagccagagatccctggccggcccccatgtcattggttgccagagtctgcctggtaccgccactagatctgtgtgacaggacttgtccagcttcgggtagggggaagtccatcattgctcctacagaacctagttggattatttttctgtagaccattcctgatctgtcaactagtctcccttggagaggatctctaatcaaatcccgacctctctcgacagttctttcattgaactatcttatcaggtcactagcttctatgttacgacgatctagctccaccagatgagaccaaaggatgtactctcggtcatccatctattttaaaaattcatgtctttattgtgtgaacgcatcgcagccagcaacgcatggttcttcagtttgcacgacttggtatacaacttctctaagtctggccaatccaaagtcttctcccaagtccacatgaggctcaccaattgttggtttgccaattcctggccccattttcctagcataatattggggaccagagtcagttatggtgcgcgggggctgctctacattggttaaaccctctgtacgaggtgctaatggcgaatctaccctgggcagtagaggctatttattgggatcggccaggttggcagggtcgacctaaccagttgtcttggtcgagtttgttgggcctaccgagttggcagggttggtaggattagccacatctgttgggttcgtgaaaactctaatggtggttggaatacgaacatcaagattaacaatcatggggtcttgaggaagacccaatgaggtagagattgtagtcggagttctccttgttacaaccacggtggttgatcatatcaatagacaatgctctcaatgaaagcaccaaattgttgacctcaaatttggccaaccaacaacgaagtcgtatttatgattgaaattaccacatgtaaacaataagaacaagtaaataaaaaggacaccataattttatagaggttcgaccccattggttagcggttaatgacctactccctttttggttgtattgatattagagataacaccactcagatcacgagtgttgtggattctagaggagctctcttaagattacaatagtgggaataagaggctaatcttaagtagatgagatgagagagacttagtctctactacactactaatgtcgtgtagaagagaaagtgagctagggttttgagtgcttgaactctataacttaagagtgagagcttcagaggtagacttagaacttagagcgtagaacttagagattttaggtttaatttagcactctttatataggaaagagcatacaagagataatagattgatatcccttaaaatgaggagatatcacctatttgttacacattaaattaagaagaaaataacatgttaattagtcataaagaataggtaaataactgaagttaatcttctattttcgtgggttgttgaagcctaattcttaactggaagtgttgtccaagctgaaagctgtagaggtacaaaaagtgcctgcaagaagagaggctggccgacctacctgttgctggaggctggccgacttacccgttgctgaaggctggccgaactacctgttgctggaggctggccgaactacccgttgctagagg

SEQ ID NO: 26351 - DNA, 2368 bp, Cannabis sativa
tttttaagcaagggatccccgtattacagtggtattttaaatgatagttatattccattttaatcaaaagtttttaattaaaccccactttttttttccaaactaatagattagtctaagtaagtttttaaaaaaaacacacacgtggcgtccctgtgagtcggggcgttacactttcacaaaccaagaccgattggctgggctagtgtgaacatccctaggacgaccgttgtccctcttgtaagtgatccacttttggaaaaatttgcacagtcatgagtctgctggcctcaaagtgtctacttccactggcccagttcgttgtttcttcttcctctctgtgtagtccttcaagaaaaccggcttctgttttctcctaaccctggagaattccactccagtaggtggcccatcccactcttacacatatagaaactgtgtatcaccaacaaaaattataatggcatccattggggtagaaggaacctcatctacattgggttcccaatcttccggatacgcatcatcctcatcacaatcgtctcccaaatgcgatggatgtgtcgtggatgatgaatgcttttgtaataaacttatcacgatcacaatgtgatccatgataatattcttcatctctttctgacttctcttaaagtcatccttcatctcactctgtgcagtcagaattgtaagttattgggctttggcattctccaatctcttcgccaaccctaggtagtcggcgtcattggctgcaatagaggttgggggcatagtggaagatgtggagggctcaggtgcttctttcggtggtgatggtggaattattttggaattttgaacatattcgacaacctgttttgcttgggtcttgaatacagtcgaatcataagtaccaacttgtgtttcttcgacctcatccaaggccatatccaccgtggagacatcaccctcacaattagacttccaataatcaacctcccaattcagaggatactaaatttgaagaacaactatctcaaaaaagtataaataaaattaatatcgttaaatattgcacaaaaatcgcatccaaatatcaaaaaaatcgcaaaaatatcacagaaaatcgcgaaaacataacataaatcacaaaaataaaaaaaaacatcacagtcacacatatgtcgcacaaatattgcacaaaacaaaaattaaattgcataaaaactcatgcacatatgtcgcacacacatcgcccaaaatggcgcacaaaaataagataaatcgctaaaaaggaaattcgcatgtattcacataaaaaatgtcgcacaaatgttgcaaaaataaaatctcatgctcaaatgtcgcacacacatcgcacaaatgtcgcaaaaaaaaatcagataaattgctaaaaatagaaaatcgcatgtattcacacaaatatcacataaacataaaaaatgtcacacaaatatcacatgaatatcgcacaaaaaactctaacacttgcacataaacaaaaataacacatagcataataaatatccaaataataatgataaatagagaaagattcacatacccttttctcaaacagtgcagccacatcaggttgcttcacatcatgcttcgtaaccaaatcgggggtactccagttcaatatttgagggaatctagtacattttcactaaccatacttcttccctaaatcttgcatgacctcaaacaccctgcaaggccggtgcatatctatagacaatgtacttcgcctctagttgagtacattttttctccttcttctctttcttctttgtcttatcttttgtaatagagaccttatccatgtagttcttcctaaactgcatcatatttttagttgtggatgacaaccacttttgataagaaaggatgccccaaggatactcggagaaattatctacattttctactaacttcagcatatttgtccagatataagcaccctcagcccttgacaacaacacacattcaacaaatgcacataaccgcaacttgtacacaccatctacaacatcgcacgcctcaaaagctagccaaagggttttaaatgtgacccttttcgtgttattgagatagtcccgtagtatccaatcataattacattatgtactcaattcttctgtcgccaggccactgctcatctttaggcctgtgatcaaaccgaactcagaccacccaaatttggcttcagttttacccacgtaaaaccacacttcatcatttttgacctcactcactttctctgcacaatcaccctggagcattttaattcactgacattccaaaaaactccaaagggagttttcttcaccttctcagtcaacttaaaggcttcaaacttagc

SEQ ID NO: 26352 - DNA, 2605 bp, Cannabis sativa
tatttccctgccattaaaacccacgtactgtcagtaaaataaaaacaaaaaaaacaaaaaattctgacaggcacccatggtattagtataaacactgtcattggtgcttagtaccgcttaattaaagataacctattttgattggctaataatattctataaaaattattactttaaattatataaaatttaatatacttaattctagttctttttgacatttctctgtctacctttatgaacatttcttagaggaccaatattagacagcggaacaattatgaattttcgtaaataaaatttctttttgagtggtgcatgtcaaattatcaataagtaaaattcgatacttttttaataattttcataaatttatacaatactctagaaaatatgagtcaaatactaaattaaaaatagaatatgagtgctgctttaatgtgttagtcccaatactaccaatattaatttagtgctagtctcaatactcatcactaaaaaaacaaaacaaaaataaaaacaaaaaaactacctttaatcatgataaatttttagtaaagttttttttttttaaataaatgtaacttaataatcgcaataaattaaaaagttaattgtaactaaaatataatatttaaatataagttatctctaattaattttagtcacaataaatattgtgactaaaatacatttaattccaacatattataatttggatgggtaatacttttgtaataagtattttagtaatattatagaaataatgatttataattaatcataattttattatttttaataattaaattttattgtgattaaaaataaaaaaatttaaaagaaagaaaaaaatgtcatgtattcactaatattaattaaagaatgtcctaattacaacctaaaaaaatgcgcacagtacactaatttatgtattttttaagtacttaatacaaccattaattgtgatgcaacgattataaagataaactgaatgtaatgttttactgaacaaaattcagtcctgtatatttagatgtaaaatgttatatgttgagaggtgtagtaaataccagttgtagcctccggcttcaaactcagaacggtaatgagttattggggatttcgaaagagacgcaaatgattcgattttaagcaagaagtgacttggcacaacatctcttcctgatagaaaatatataaaagttaaagggttaatgaggccataactatatagcacaacttttcaatgataatatagccaactaggtaaggctgtaatatagcaggggttttcaaaaattaattacatcatcatagcaattatgttttttgaaaattatttcatatattatttttttttatttttttttttaaattgatggttgcatttttatgtcggttgttatgtgaattttggttgcgatttaaattgctgttttggttgctatacatgtttctatattgattttcgtaaaaaaaaaaaattattttaaaggataaaaataaaaataaacctataattaattaaatttatcaattatcttagaggattatattagattatattgtgtatgtaattgttaattagtcagcagaaataattaaagataatatttttcggaccaacattacattacacgttattgaatcaatatcctatataaaaatcttttacttccaacgaaaccattaatttattaggaagaaagaaaaaacattatactttaatttttttttaattgaagctttatattatactttaatttcttaattattaatatttcaactaaggactaattaatatatgaaataattatcagacaaattatctaaatgagaattgctaagagtatataccttaagatatcaaaacactactagaaaaagtaattattagtacaatttaatattagcataacgcactaccatgtttagcatattaaggtggtgataatagttatgctatatctaaaatcaataatcttcgtagtacttacgatgaagagatggtgatccagaaacatgggcacagctataaggggcccgaacttgaggcgaagtttcatcattatgatcatggaatacccccatgagtaagcttaatacgtcttggctgccatcttcggctgcggaagatgacgaggaactatcttgatcgagggaacgatttatacgagatgtcattatatatttgatatttcccctattattaagatggttttacagattatgaatatgttatcgtttttttttttatatatatatatataaatacattttttattattaattatatatttgaaaaaagcgtgaatcatttttggcttgagttaagttttcactcctacttttcttgctaagcgtggatacatcctttttcattttctcgtattctcttgtaataatacttattcgtttcttttttttgagtagaaacaaaatattcctttatacctgtcgtccatgatttaccataactttttatttattttgttatgttttttggaactttgtatgaaattatgtaaaaatagaaaagtgaagtgtgtgagtaggagtcccacatgggatagaaacactacatttgaagtgtatatctagt

SEQ ID NO: 26353 - DNA, 1577 bp, Cannabis sativa
tgttaaaaattatcttaaagttgactgtattaaaaaaaataaaattattaaaaattgagctcacgttctatttttaccattttggaaaatatagtgtcagttttgtcatttaacaaaacaaaagatccaattagtaacttttgtaaaaacacaggatccaaaataatatttaccctttttaaattttaaaaattttttgaatagtttatagtgtcgaaaataaagtttacagtgcgtataagaaaaatagccgtgtgtgcaacaaaatatgtaaatcttatttttggctcgtaggcatatggatagagccttacccactgtggatgatgagtgtcgggagctcagtgatggcgagccagagaggctatcttctatcggtcttcaagagctagcctcgctaagttgcacatctaactttgcttacattttagtattattgcgagctggccgaccatatggggttgttgtatgaagctggccggtcattgcagtgtctttgagaagctggccagccttggtagcaccatagaggggctggttgaccaatgttatcttctagcgctaatcttgacctttttttttcttcaagcctttataaagcttagcttttttcatcgcaacttcagagggtcctctagtgctctccgaaagcagctaaagaccctggaagctaagctcctgactaggggtgaggttgtgaccaactatgaggctcttgtccaatagaattaggacatgatttatggtttggagatcatgcccgacaccaggaatcaaaagaatacctcgcttgttgttgacgtctctaggctagggacagaacttaggaggagtgacgacaagctaaagcttgcccttgatggccaacatgccataaaagacgagtatgttggcttgtctttggagatcatcaatgagttcaagctgaacaaccccaaagttgatctttcttacatgggggatgcttctttccttgagagcacactggcccaggggaaagcgttgtatgagagcaggatagaggtagactagaccaccgtccagtcagaaggatcgtcatcgaggctattcgatgaggccatgaccgtcccccctactgaggaggtggccaccatgattttgaccaagtgttcgaccaacctatagaggctatggtcaacccacactttggagatctagactctgtggcttccaaccaagcttcacttgcacctgcacacatgtagcttcactttattagtattttagctttatggttttgtttgcatcaacattctgattgtatgttctgtatggcctgtcggccttttacttttgaacataacttattttcaaccttagggctttcatgttggtacttttggcctatggacactctatttttgaacattattactatttagccctaaagctttttattatggatgtgtgaccgaccaggcggtctttaatcttggctatcttcttattaccttgacatgtaattatccagatttacttttttttgtgtcaggctgaagtatgcctacacttgacttagaggcaggtttagtagcttatactaagcgttaaaattt

SEQ ID NO: 26354 - DNA, 3610 bp, Cannabis sativa
tgctccttccaaaggcccattcttttccagctccccaattctctttccaatcactttcatggcctccaccattccattttctcccgttagttccttcctagtaagccagacaaagcaaatcgataaacaatttccaaaataattatctgggattggacactttgagagccggtttcgacagtcagctacgaaaatgaaatatagaagatcattgtcgttttttatgtcgctctcttctgatttgatcaaacaaacccatatcaatgcacaggttaggacaaacgaggacgcacgaaacgacgtcgagtcgctgtcgtttgagacttgatctgtggtccaagctttgagcctctcaatctgagcttggctcaatacaaacgtggcacgaaccttatgttcaagagaatgaccaggtggacccgcatcctcgtcccacgtcgacgccaagctccaccactcgtccaagaaaatagacttcaacccatttgggtcttcaatcccagccctatcatgactcggtttcgcatctcgagactcgtctaggccaagtggaattgacccagagtctccagtactcttcttacaaatggacgcccaggatttcatgaaatggttaaaagctctcccatcagcagccacgtggctaaatctaacgcctatgcagattccaaattcggggaagatggttacttgtagagccatgagcggcacgactctcgtttcgccttctttacgcgacggtggcaagttggggacaaaagggtgaagttcttcggtggcgcgtggaccgtgagcgaagagacggtggaaatcggcttcggattcgtagactgataaagttacggaatcgcagtccgtgaagagtaaatggggatgggccggtgacggaggggaaataagattaccggcgaagggaaagaagtggcggagagtgagagagagagagagcttgagaatgggaagatggtgatgtatgaagttttgggttgaggtagagagttcgtagaagttgaggcgctgcatgtggcggcaaaggagccatgagatgtcgaagaaggtgagaggaagagatgttgtggcgactgaacctgggggtggtgacaactgactttgctcaaggagtttgactgagccatgctgtagcggcggaaccataaacattcaaatattatttgctttgtgaatgccaatactcttatttttattattactagtaataaacaacgcccactttggggaatgggagatgtttaaaaaagtttaatttatacaagttgaaataaattatgttttttatttaacgtctaacacaatctaatttataagataagtatatatctaatgtaattttaatccatccatccaatccaattgattggatatccaattataattcgattagatgtggattgttggatgagacattaatcaaagtgaaccgatctaattatatcatttatatttatatatttttaaaatgcatttataattgttttgacaaaaaataattcattattgatcaaaaaaaaaactttttaatttttggaaaccctttacttcctgttcattcttgatcttctctcagccttcccccatccaaccccttttactcttgccctcacttccatttatactcatcttttatctttaggtatctacttctcaaggtatcattagatatttgtctattataacttatgaggtgtcattgcatatcttgataactgtcttgtataaaaggtgagtcataagtttgaggtgtgtggatcatcttgttcgagatattgagacatcctgttcgagataagtgagttgtcctatccgagataagtgagttcaaactgacctaggttggccatatctcagaacgatcgtgacaggtcatatctcggactccacatctcagaacaaacgtgacaggtcatatctcggactccatatcttagaacgaccgtgataggtcatatctcgagccggttcaagataaaacatatttcgaactgaccgaggtaggccatatctcagaatgaccgtgacaggtcatagctcggactccatatctcagaacgatcgtgacaggtcatatctcggactggaacgaccgtgataggtcatatctcaaactgctccgagataaaacatatttcgaactgattcaagataagaggagtccaagactaaatcgagctaggcaccttccaatccgagataatgtgtttctcagcacgatttgagataggaattatctcagatcgatttgacttagatattacttcgacttgtccaatggggttaccttcttagttatattctcgtatctcgactcctaatttaaactttatatctttaccactctttcgtgggctttaaatgtatttgtttattgggcctttcttatatttctaacaccatgggcctcttattgacccattgaaatttcccccaattaataattttatatattttatttaaaatatatattaattaattttattcttattttgcacctacatacatgagattaaaaaaaaaaatttagatctaaaatattaattcttatattcttaaacactaaaaaagaaaaaaatcaatgcatattgaagaagttttattatgtaggttggattattaggttttaaactatgtttttttttttatatgggatattagcggtaaaattatcccaactttatattttttaacatttaaccacataaactaattttttgacggcaaaacctaccaaactcacatttctttttgctctttacacttccgtctaaaattctcagttaagtgccacggtgaactgcccacgtgtacaccagtgtacatgtgacatatttttagtggtctacataatattaattattaaaatattaaaatagttgaaaaaatattttaaaaaaccaaaataaattacaaaaaaattaaaaacaaattcttttttattattttttcttttccttttctttttctcttattctctagaagcatcgccaatactcattcctcctcctccttcttctcatttcttctttcttctgcccaaaatcagatctccaggtaccaccataactaccgccaccgttacaaacattaattacttgaattttaaaatcaaaaataaaaaaacatcaccatagccaaaatcgcaaaaataaaatctaaaccaccaccctaaatccaatatcacaaacaaatcaaaatccttaaccacaaacaaaacataaacccaatccttggctaaaaaactaaaaacaaaaatttcgagctagaaatattccaatccatggctcttttagccttcaaatcctcatctagaaggaacaatatcataactcctcattcttcttctttgtcttcttcaacaatagcaggcgcaccccaaatatttcagccaagaaacaagctccagctcagagatccaaaagcttcatcaccttatcccagattacctccgacgtcttaaatgcctcccttgattttctcaacaagagagacaaccctctattctctaccacaagatcttatcttgaattggagagcaaactgctagaccattggagatggtctgaactttttcaacatatttagagattgataaatt

SEQ ID NO: 26355 - DNA, 2733 bp, Cannabis sativa
taaataacaataaggtttttacgtggttttaaagtttaactcttctacgagtccatcttatttataggttgttacaaaatgtttacagaatacatgataatgtttgtatatttctctctatttttatttaaaatgagttttacttatgaaagttaagttgccacataaattgtgtgttacatttatgtgtacacatattattactcttctaataattcttaaatgagcttatttttgtcacaatttttttttactttcattacaaatttcattatgaccgaaaatatacatgtttcaaataaatattttttttaaaaggaaaatgtaattttactaattattaaaatttgctaccaaatgtggttacaagttaattggaacagactctatatcgaaggtacaataaaaaaaatattgaagctctaacaaagttatgagctaccatatttactgatcgtttaatgaacaaaacagagatagtattcaactccaacaagagttgtttacaatcatgaatgggtatcaatacaagagttgtttacaatgttctttttacattcatcacaaatttcattatggccgaaaatatacatgttttcaaataaatattaaattaagtatttcatgcaaatttttcttcttctttttctttatttattttaaaaataaaaacacataaaagactttcttatagtaaggtttataataacagagactactaccaaaaatttcatataggttattcaccaacatatatatatttatatatatagataaaggcaagatggcactaggcattaaggcaatcatttcccttaattaagtttagcttttaatagacgtcctctaaaaaaaaaaagaagaaagaaatctctgtaacacattgttggcaatggattcagacctcaatatttcaagtaagaaactcattaagagattgaaagaactcgatcgattcaaacacagtggttcagtacgtgaaggtgagattgagaaacttcaagaatatataaagactttggaaacacatgttgttaatctaaaacctcattcgaataagagtagaaaaaaactcaaccgtttggtggctgatattgaatctttaaagattgaaataaagaaaagaaatgaggttttggacaattttgaagagaggttcagcaagtacaatgtcccaaaacgttatgaaaatggtcacaaacaacctttgaagggttatgtagtaagattacaagagtacatggagatcacttggagaaaagaagccaagaaaaatagagaaaaagggcattggaatttgtttgagatgatgacaagtatggatatcacaactgaagatgcctactttgcttatgactctcttcaggcttctcttgaagaaattgctagcatgatctctagcttcttgattgagtacttgaccttgatcatggttgcttcgaatgaaagtaatgaaattgtgtcgtgtcgtcttgatgagcttctaactgtggtagaatgcttatctatagaacaagataataaatattctcttgttaatgatgtgtttgttgagatagtacgtttcttcataggttcaatggagttggctgggccattttgggacgataatgaggatgacaagaagaagaagaagaagttttatttcgatgaggaaatggaagacgatttagctcatcatatcatcatggaaattctgcgtttggaggtgagctttagtaatcctgatttcttccctatgatgcttataaatgatatgatgttctcaatatcagtgcatcttaaatgttatgttttcaatgaaaaattgaagagagttgtagaaaagataggtgagtggaaatctgctataagatttgtagaagaagttggtgatgatgattattcagagatggagtttttaatgcaagttttggaggctggggttcatgaaatatgcactgataataacagaacttcatggaccttagtaaatctagtgtcaaaataagaaagtttatgaagttgtattactattttcactttttggatttcattattgataaattattattgtaacgttcttcatgtttgatcaaagattcaatcaatagaaagattggaaaagaaattactctgttccaaaagttgcaggaacctatttgttttaatcaaatctttacattttcatgtatgatccttaagatctttattatactctttggtcagagtctaaaaccatcgattattaaaagaattttcaagggaggagggggtactcttttttgtttgaactagaaaaggtactacatttttgtaataacttattatttcattagtttaactagttttcaacctataatccaaacctatcttctcttgcaataaaaaatgtagacatataagcaattactgtaatccgcttagattgacatgtggtcaacatttttaaaatgggtgaaaaagtttttggtcattataaaatcttaaggtgtctttatcgaacatcatgtgtgagtaatagcacttttacaaataacatatggtgttataagagagtttaataataccttgatatacttacgattttatataatccactaatcatgtttgggaggaaaaatcaatggacaaagaaaaagccacaagcgtaaaaataaggaaggcccatttttttttttttttgaaataaggaaggcccattaagaattaataaaggggtaagttgaaaaataccacttttattaattaatt

SEQ ID NO: 26356 - DNA, 4742 bp, Cannabis sativa
ttgcgccggcaaaagcttatcaaatcaggttcatagcggcaaagggtattttttaacaccggcgcttacttttcaccggcgtgatttctcgccagtaaaagcaagtttcaccggcacagttactctacgcgccggtaaaaactcctttaccgaccaagcttccgaaataagctttgccggcgcagttgtgcaccggcaaagctttaccgacgcagttagggtacttttgccggcgcaacaatgcgccggcaaaagtggcttttcttgtagtgtgaaataagagcttttccatttatctctattaagccaacctcaaaggaaatcatcatttcacttatatgtcagtatagaagctagaaattccaaatctatgattagcgctcccagtcaattgtactaccatgttcccaagatgttagtattgggccgatcaattggtcaactttaacaaacaactcaaagaacataaataatgcaattaagctagaacctaaccatctcaggattaagatcttttgatctaagatcaactaagtaatattaacatagaaagatataacagtaagtttatgatatcttatccaattttgatatcagtccaatccgatgtacattccatacattagatactaacatagtttaccaatgccacagaaaaggacatatcacttatccaaggtgtaagtaaactttatcgctaattatcacgtcagtataaatctagtacactgataaattattagactatactttgaagtatatagtcacaattactttccactgtggtgacatcactgtaattgtgaattactatatgttctgtatttattaaaaattgtatattaaactataaacatgaaaataacatgttaacttaaatgacttctaatcttctattgatagcaaatatgattacattaaaatgagttttatttagggcataaaatcccaacagtagatttttagaaacacaagagatctaccagggatgacccttagacaagttaatacacaaccaccaatagtaggccatggagtgactttctctttggctaggttcagtactccaggtatacaagaaactgggaatactagtacgtcggcagagcaaatcactcctggcactgaaatcccatccaccataaacacttaaaggctagctagagatgatattgagctttaaaacttgcgagggttaatgcaaggccacaataacatcctgtaccatgagcaacaagatatccgagcagctatcaatcttgcctttgatgaacaaagatgccagttcatagagtggagatatcaagagatggaagtcatgagagcccaacatgcagccattgacagtcgttcgaggcaggctgccatactaattagaagggcctatcaagtcaccggtcaacaaaccaatgactgattctagcatccccttggatctcaaaatgggtctgaagagtatgtagctgatcatactgcacaaacttatatcgatcaacaatccaatccaaggccacggattcaaactctgagccaattggtagacgggtagatcttagaatgcccctcgagaagaggtagtcggctaaataaccatactcagacggaggtatcaagccaacctttcaaccaggatggttaaacataaagacctattggcacattggtgtttgactgattaggtaccgtacacgacctcagaaacaatttgaaccgtagaagaggattggatgggtgaaatgtttctcctaccgtgtagttgattaatgcaaataactatgtcacagctccagtcctaagagatcctaatgtgacataggtcggtcaacaggctggccaagttcatctacttatgcaagcataaatagatcagcttaaaagcatcgtataaggcctgacgaatcaaaactcatagatcttgaactgaatcatgcaagatgatcacccttttcaccaaaaatcaatgctattgacctaccacccaagttcaaaatgccaatatggaagatgtattcaagaaaaaaagatcctttatctcactagatgcaaatggacttgcaaggggtgaaaggtaatgtacattgcaaaatcttctcagctacactagcataggtcgcctaataatggtacttcaaactagctccacagaagtttagctcatggatttctttctcatctgaattctatgtacaattttcctccgctcgtcagcttccctctcatttagaagacatggtaaaagtgaagcaaataccaggaaaacctttaagaacttacattagcaggttcatgactgaagcaacaaagattaaggggcaggactgaagaaggaaggttggataatgcaatactgggaggtatcaaacctctaggagagctatggaaggatataaaaagactaattatggatcaatgagagaattcctagatcgagtagatggatttaccaagctcgaagaagaagtacgacgcgtagatatagttggaaaaaagaaatctcaacaacacacacaacattatacactttatcctaatagcacacaccattccttacatttggtggatcgatttgaaagacattggtgtgagtctaaattgcaaattcctcatcaacggattatgggttacaacatatgagaagtttcaaggatacactgataggcctcgagaggtatactctaaacttattaattttattattttgatttagtgtaaatacaatccagagatctcttggaatatgttacgatgataatctaataatatggtacctaatttactaccataaaaccaacaaaggaaacttccaaatgatgtggatgcttttcgaaagttccaccataaaaaaaagtatggtgcaacaaataattgctacgaacttatgtaaatttacattgatattattaatttatgaatatttctttcaactttttttttactcaaattgactatttaatttaattattttttaagaccaaatggacgaattagctacaaatcaacctgcacccaatgagaatttacctactgaggatgctataaaccccacccagtacccatgacacctgcttgtaatgacacaagtaccgggtgagcgatctcaacatctgagaggctttggattgaaggtagttggggcaaaaaagcacatgccacgacttcttctgcctcacaaactattattatggaacagtatgaggccttgtagaaaaagtggaggaggcacaacataaatctgagtatttgaagcagcaatatgaaacacaacaactctacatcaagcgattcaaagatcagtttgagtatctctctcaggttgtgcctattttcaacatgtctccaatggattttttcgccattccccactcctcctggtgttagatcattatcgcatcatcccaagactcagaacaacaacgacgatgacattacccgactttagaacaatatatgttttataattaactttcgaatttgattttttttttcgaaatattttaatattttgtttagttactaataactgtataaattttgtttagttactaactttagtacaaatcgatcatagttatatattttagcttgatcaggatactattttaattataaatgtgaatacaactattttttaattataattatttcaaatctaatttaatatttaaaattaattaaaatactattatgaattattaaaataaaataaattatcaatttttttaaaaaaaaataaaacaaaggcttttatgcgctagtaaaacttaagcctaaatcctaaaccctaaacaccaaacctttctcgacgcacaagtacgctggtaaaggtcatttctgcaaaaattcatttggcgggtaaaggtttttctaacacattgttgcgttggaaaaacctttaccaaccaaatgaaaaatgcacaaaacttttgcgctagcaaaagttattttatccctagatgggaggatttaggttcttactttccaccatgtgtttggtttttcccggcacataatgtatggcactattaaagcctgttttatcgacgtattatgcctaaccgacgcaaaaatacgctgaaaaaagtaacatttattgtagtccaaaaaggcacaaaaagagattaaaaaattaaaacatgaaagccaccacaaaattcaattgggtggacgatgtaccaaaaacaggtaccagagaaagagatagatgaacactcttgaaggttcttgagccttaaggaaagtgtctaaataaagttactagaattattttgggctttttttttttcagttttaaccaaaaatataataatattacaaaaaatacttctagctggccaaataaataaatataaaacccaaaaaaaaaaattacacaaatatcacttacacacaccttcaatacaggatccgtgcttcctgggaaaccatcgcgtaacctcgcagtaacccaatgcaaccgaaattaaattcaactagaaagataaccacatttaattccaacgacttcatctgagaagatgactagaagctataaaaataagggtggtttcgaatttatgaaaaaaaatgtagcaaaactactacgaaactaaaattaaaccagaaattcagtttaatttgcataaaactaatgtcctgacttcaatttttcagatccatgaaatacaaatctcaaaacgttaaactggagttccccaaacaatccaactcaagtataatccaaaaaaaaaaaattacatcaatac

SEQ ID NO: 26357 - DNA, 2073 bp, Cannabis sativa
taaaatcatatatattaaaataaattatattagtaaaataattatcaataaaaatataactttatcttataaacaagtataaaagagaaacttaatgaaatacaatatatatatatatatatataaatttatcaagaagaagaaaatttaattaatcaacacacctaatacaaatagttacacttctcaaagagaagcaacaaaacaaaagctccaactaattacgcatcaatctttgaagtaacttcttctcctccctagaactttccctgtctttaattaacataagtctataattcacgtcacttttaattttgctcattatgcaataaacaaagtttgagtaataagaaaacaaacaagtatttcggttgctccataagtgatatatcgcggctgctaaaattagcactcttatcctgtcaaccaagaccggtcttgtgttgcgcagccaaaccgtccagctttcaaagagcttggaccaaccttcaaagcccagccaatgaaaaatagagaacagcacctgttgagacaaaatgcacctgaaaaataagtggcagtggctctcgggttcattgtcacagactacacaattcttgtttcgaatagggatgttcattcggcaaagcagatcccttgttaacagcttagtttgagctgcttgccaaagctgaaaagcatgctttggaataatgaatccacaccagattgcaccagcacccgagaacacgacttggtgcaacatgctacaatacatcttgttgactttgaatttctcaccacctcctgcaatgatatcacctttgttgtaggttgtacgcagcctacaaagctttctccaatacgaacttgtatccatggtcatcttagaggaccaaaaatcactccctttgagataaactgagttaatccatttaactcaaagcaagtcttttttgttcatcaagtcccaaataaatctagctaaagaagctttgttccattttgttccatccttaaacccaagaccaccataggctttaggaaggcaaaccatctcccaacttatcaagtgaactctagatctattttccttcaaaccccaaaggaagccccgacaaagtttctcaatttcttttatcacactttgagggagaagaaacactctcatccaataattccttagaccaatcaaagttgattggattaattgaacccgaccagcataggataagtgtttattagccctagagtgaagcttaagtttcattttcttcaaaatcgaaccacaatcatcaagtctccacttagttggtcttagagggatcccgagatacttgagaggaaactctccaatagataggtttatcttttgagcaagaggaatcagctgagagagtcctccaaagtaaacttgagatttagcaaagttgatggagagacctgaggacttactaaactcatcaagaaagaccttgatagcatggagagaaccctcataccctttacaaaatatcactaaatcgtctgcgaaacaaagattagtgagtttcatttttttacacaaaggatggtacctgaaattcttatctctggccgctttttggatacttcaggaaacatactccatgacaaggacaaagaggagaggggagataggatccccttgtctaagcccctgctcacttttgaaagacccctgaattcttccattcaaaagtaaagaatacgaagtatttctcacacagttcatgatccacttgacaagcttagcagggaagcaataggccaccaaaagcttctcaagaaaatcccaattaattgtatcgtaaactttacttatatcaatttttatagtgcgtctaggggagcaattcttccttctgtagttcttcaaaatgtcctgaagaataaggatattgtatgcaattaagcggcccttgacaaacgctccctagttctgactcactaagtgcggaagaacattagcaagccaagaacaaatcaacttagaaacacacttgtataaggtagtgcaacaggcaataggtcgatagtctatagctttaatagggctatcagtctttgggtcga

SEQ ID NO: 26358 - DNA, 2769 bp, Cannabis sativa
atgtacttgatcgatgtcacttacatgagcaagattttgaaggagaccaattcacttggatcaagggtagaatcacagcagacacaataaaggagcggttagattggtgttttgtcaacactttatgggctgagacatttcaaaacattatcacgcaccatctagattactaccgatctgatcatcgggcaattgctgtccaaattctgccacacaatgcgtcacaccagcagcacactcgccacaccagatttcgttttgagaagatctggttacaagaagaagaagccaccactctaatccaacgaaactggcagcaatgttcaggtgaaaatgctgctgcagtttttaaaaaaaaacctccagcagtgttcggattctctacagcagtggcacagacagaagtttggtaacattaaaaaaaagatttctaaagctcaaaaaaaggttgctgatttgaacaatgttattgatcgaacttctaatgtcatggatgagttgaaaaacagtgaaaatgttcttgatgatttattagctcaggaggagacttattggcagcagcgttctcgcattgattggatgcaaaatagggatcaaaataccaaattctttcatgcctacgcatcttctcgcaaaaaacgtaacacaatcaagtctcttgttgatcaacatggagctgtggtcacttcaaaaactggtatgactgatgttatctccacttattttggagatttgtttactgcaactgaaatagtccctgaggctttaaatcataccatatccaccataccaacaacagtaacatcagatatgaatgattccttacttcggcctttcaccaatgatgatgttttcaatgctctcaaaacaatcaatccggacaaaagtcctggcagcgatggaatgtcagcaatgttttatcataaatattggtctattgttggggatgttgttactaaagttgtgttgggagttctgaataatggtgactgtatggaagctattaatcactcactcattactctcatttcaaagatcaaggttcctcaaggtatgggagatttcagaccaataagcctctgtaatgtcatttagaaaattgtttcaaaggctctagcggtcagatttaaagatgttcttccagcggtaatctctgaaacgcaaagtgctttcctctcgaatagactcattacagacaatattcttgtggcttttgaattggttcaccacttaaaacataaaacaaggggaaataaaagctactcagctctaaagttggacatgagtaaagcttttgatagagtggagtggttttacattcaagaagtcatgcgtaagatggggttccatgacaaatggattacaatgatcatgagctgcctcagttccacaagcttctctttcatgttaaatggtgaagaggttggatatgtcaaacctacaagaggccttcggcaaggtgatcctttgtcgccatacctatttttgatctgctctgaaggtttgtcaagattattacaacatgaagaatcggtccgaaccttaaaggcttacgtttaacacgccatgctccatcagtttctcaccttctctttgcagatgatagcctcctattttgtgaagctacaaatagttcagcagcagcacttaaaaaggttttggacatctaccactctgcttcaggccaaatgttaaatacaacgaagtcagttatgtctttctcacctaatacctcacaagcttctaaggatttttttcatctcgctttagggatgccaattagtgattgtcatgaacgttatcttggtcttcccgctttttctgagcgtgataaaaaagaaatgttcagtgatgtaaaagaacgaatatggcaaaaactgcatgcttggaatgacaagctcttctcagttggtgggaaagaagttcttttgaaagcagtggttcaatcgatctacctacgctatgagttgtttccgtctgccctctactttttgtagccaattagaatctatgatggctaatttttggtggggttcaactaaagatggatcgaaaattcattggcgaaattggaaattgttatgcgaatcaaagtttgaaggtggaatgggctttcgctcttttgttaatttcaacaaggcactcccagctaagcaagcttggagaatctttgaaatgctgaattccctactaagtcgtttgcttaaacatcgatacttttcaaataacaattttttggaagctcggcttggtcactcaccttcactcacatggcaaggcatccattgggggagggaattacttgttgaaggactgcgctataagattggtaatggctacaatgttttggctggttttgataaatggatcccgggatataccaactttaaaccagtcggctttaatggggctgattcattaactattgccaacttcataactgaccaaagagaatggaacatccctcttcttcatcaatacttccaacccatcgatgtggaaagaattgttaccatccctcttagtttctttccttcaaatgatcgtttgatttggcatcatactacaacaggctgttatacagtgaattcgggtttccacctagctgagaatttggccgaaaatcagcaaacaaatggttctagttctcatactacttggtggaaaactttttggagtttaaatcttccatcaaaggttaaaatttttgcatggagagtgatgcaaaatgctcttcccgtagctactggtctggttcgaaggaaagta

SEQ ID NO: 26359 - DNA, 1306 bp, Cannabis sativa
ctgagtggctggggagacatactgttcgtctaaccctctacttctgtttagatcatcctaaaggatcatgagctgttcccagtctattaatatagatacaccagtttgtctcagtgactggttggtttggccgatcacttagctggaaccattaacctgggtggagttattaggtatagcctttcctgacgaattactggataaggtctggccgcctaccacttggcccacaggtggaactgtgaccggggattgggcggctgtccattcagagtctgagatgcgttctcagccggatcttcgtctgactcacccagagggatgctggtcacaggttgctgattagtagcctgataggcccttcgtatcattatgttggcctgtcttattcggttgtcaatggccgcttgctgagccctcaacgtttccacctctttatccctccattcagcaaacagacgcctttgctcttcgaatgcgaggttcattgcaacacagagctcttcctgatcgtgatgcagagtattagtatggccttgcatgagtccaaaagcatcacggaggttttggatctcggtgtcgtctccaacagttgttcagaaatttgttgctggcagaactccggtgttgggaataccctgattgcctgccgaactggtattttcagtctcttgcacactaggtgcgattccattcaaaggagtcatcacaccctgccctacggtcggtggttgttcaggattcgtggctggtggaacccctgcctttcctggattctgcaatgcaggatccactgctggtggattcgctggattgaccacacctctacgagtctgtaccaccatcgtgtttatgactaatttgaagtaaagagcgagtttgtgacccttgctctcaatgaaagcaccaaaatgttgaccttacttttagccaatgacaatgagtcttaattgtaagcgataagtaatattctatagatataatatgaaaagataaataaagaacacagagtttttaaagaagttcggccccgagcagttcggtaatagcctactccccttaatttatattaacttaagaacaaagaatacaaagattcttctcttaaagctcttacagtaaaatctctgagtatacttctcttagatcattcttttgaccccttacccattgagaatagatcactatttatagggctctgtgcttgagaatgttttcccgttttgtctataatgtctataattggtaagattacacattaaatatatagaatacactgattaagggatttggacagcttgccata

SEQ ID NO: 26360 - DNA, 2146 bp, Cannabis sativa
ctggtgtcctttaacatttctcttaatttaaaccaaaatattaatacaattctgggatcccgtaaaatcttttataaaatattacaagttctttacataaaagtcgacctaagtggcaaaatgagacttctatacaatttccctgttggatccaaccctcgcggtctagtttggccgaaacatgtacaattcatcatcaaaaccctcgaactcaaggctgtcctaatattactttacctttgcctgcacaatagaacacccatgagcaaaggtccaacaagaaagcataatcaaacccaaataacatatagcatacatatcacatgtaatacgccactgagtagataactgtgccatcacactaatataacatggcaccatgtttatgatgatgccacaatatcctaagtctatattgtatagacaccacgtgttacgctcacacatctatttactatataaggcattattagagtttttctcagttttgattaccgagtctaacctagttatgccttgattgcataactcttatcatatttgcatagttcatacattatgctctcacaaggatttatcctcatagtgtttatcaagcctaatacaattatatcttacgcacataactcttaatatatatacataattcatttaacacatgctcaaatatagaaattttaggggtaataaccctaactcacatttctatctaattatccacataatatataagtgagccattacgctatactctaagggcagggtttgctttcttacttggattctaatgtacgtatgaggagagtttcaatccataagtgatcttgaacaagtgccaataaccctagttataattctgagtttaaaacacaatagggtaaatacttaattttataacataaatattcacatttaggactctaactctaaatgaagtaatagacctcgtaatgagctttccaacaatataaagaatattcaaaacaaaattcgaagtaaaaaattatgaccaaaataaaatgggaaaaattaaattgtcgctttggagttgccacgactaattatcaccgtgaccaaactacgtaggggctatcccctattttatgcaagggctcgtcgtggtaactgggttcgaaaaacctaaaaaacccaattttagagctttgaaaatgtacaaaaccaaaaccgactttactcatataatgcacttggtttctaagcccaaaacagagtgtatgcaagtacaaaatctcataaaataacacatgcttaaatgaaatcacagctcaataatcacataattccacaactcaaaacttaagagaaaccaaactagtttaagctaaagctcaaactcatactcaaaattcaaaacttctgcttcaaaatacataaaaccaaaaatgaccaagaatgaaaccaacaagagtcataaattgattttattccttaactcaattcaccacaaaattattatagtttaaaccttgattttaatccatatagaataacacaacaaagcttaattcaagaaaaattgcccaatctccaaaccctaagattcactttcagttgaaaagaaaatcaaagaaattccttacctcaagttggattccaaactcaagctcaaattgaaccaactgagattcgtgttgatatcaaatcaataattgcactagcaaagaattcagtctttcacaaaaaaagtaaacacatcgatacttgctatcattacataagagaatgcattgaaagaaaagaagtaagagtggaatatgtcaaatctcaagatcaagcaatagacatttttacgaagccactcaagagagaaacattcatcaaactacgaagtattactggagtcagaaatcaagtttgagggagggtgtgttgaaatattaaacttgatttatgttgtgaaaattatattgatttataattgcgcaagtgtacacaatcacaaacaagtaatacaatgataagtaatcaaggttcgtatccacagggacttttacactaaataatgcgaaatcaactaaaagcaattcaaagatgtcaaataaaaagaaagcaaaataactaatcaattcaagagaaaaaattcttaaccttaattctagagttgagaaataatattttaagctaa

SEQ ID NO: 26361 - DNA, 1455 bp, Cannabis sativa
ataatttaaaattatatatttttactaattttaatgaataaatttttgataaaaaaatttataaataaatgtgtgataattttttcatttgaattcttattgaatttaaattatattaataaaatcaaaatttaagaaacgataaattttttttttcacctgcatgggattatttatcccaccctgctagatgggataaataatctgtgggataaataatcccagacaaatgagattagttggattaattatccagacttctaacatgcccaaacactggattggacagataagtttgtctaatccaatccagtcatgcgtgccaaacgggccatataaatataagaaaaacccttcatgcaaaggagttggaaacttattcctcaaccgctcaagcaaagtttagagtttagacattcttataaaccgtaatgcttttctagctttaaagtaataatattaactcatggactaagactcattaacgctcaaaccacgtaaaaatccttgttgttattttctttatatttgattaatttctttagcttttatatattataaatcgatttttgaaaatttcggtaaacatggataattattaaatttagcgtgtttgtctgactatataattatacggtaaccatgtagcttgagataatataggggtcttaattacattcatcaattctcatggctctccatgaaaattggatgtaattacactgtgtaattactaacaactttacatttcaaatgttaattgcataacaataatatatgttttgccaaatgaagcaatatgaattcatatgtaattagtaccttacatccaaacacactatatatttattttaaaatatagtgtagttactactctcgtgaattctataattaattccttagttgcttccatacacacttttatagttgaatttttgaaaaaaaaaatttaaaagttcaaatcgttgcttgccacgtgtataaaaaaaatcaaacgtgcaacaaaatatttaaatcttatttttgaaactataaactattcaattaattctaaaaaactataatatacatgatcataaaataaaatgaactaataagttttttttggaagccagaacaaataaaaaatatactaaaatgatcttttaacatgatcacttaaagcaaagatttgaaatatgacataaaagtccatcaaaattactacaaccctttctagattagatgtcttaataaggtggataggattgagatagtttgaagccacatacacgttgcttacatccttctctaccgcaagtcgtaaaccaactttgattgaattcaattcagcaacaaaagaagaatgaggcatatgaaagaaatcagtttttgcccataaaacatgaccaagattgtttctaattagcactcgtgtgctaaacaaattatcttctatggtattattctttaaac

SEQ ID NO: 26362 - DNA, 7220 bp, Cannabis sativa
aaaaaaaaaaaaaaacataaactagccaattgataaaacaagtaccacattatactacacaacttattaaggtcaatgctaaataagctctgccctccaattaatattttgtcttatgtaaaatagttgtggaagtgattattttatcaaagtctctcaatgaaaaatataatttaaattaataagatttcttttattcttgaatatttttcatttgatataattatttattttataaaattaattaggtattttatatgttaattatttctctcataaaaaaacctttaaagtattatattttacaaaaataaaacatgtgtaaaatatcctaaatacttttaatagatacaaagttaataaataattttagctcttattattttacaaaaaaatcattgaagagcaagacaaaaaatcaacatattacaaatttattgaaaaaatatttaaactgcggctcacgtgcacctaattagtatgtatatacatatgagatatttttggggtagtataataataataattattagatgttttagctgttcacctaatttaatacaataaaatcaataataacaattatttatttttcattctattcaattttattaccttaaccaatcatggccacctaaagggtgggatagccggggcctaggtccaggccccacaattttagaggccctcaaaaattaaaattaatattatatatatatgaaaataacaatataatatatatagtttttggttcaataattttcaagtcttacaacacaattagtaagagagagtttataaaaatgtgtggatgctaggtttgattcttgcctctcttacattatggttgttttaaaattttaagggatctatatatgtttagtttttgtaagagttttatgtactggttaaaattgtagagattatataaattttatttatttgataagaatacaatattttaaaacatattcaatgcattaattaaaaaaatatataacatactattttagggatagatccatagagaaatgttagaattttcttcttagaaaaggtatattatctataaaaaaaaaaataaagattatgttataaatatttttggtaaggaacaaagattatgtttagtaaacaattttttaaaaattactcgaggtgtaattaaacgtacggataaaaaaatctattgtaataataataaattaaatatatatttttttaaaataactaacaataacttaaaaatttaatgacaatattataacttaaataaaatatatatttatcaattatcatgtattttcttaagtttatacaacttataacatatattaaaaaaataacaaaaaatttgacattctattgaggctttttttttcacaaaatttctaaaatatataacactatagagatgctattataaccaaatattactttaaattagcttgtgtggtgagaaaaattatttgttatatggagataaaaaagttaaattatattgtgtcaaaatttaaatggtaaatactatctcaaaaaaaaaatatttattttaattttttgtaaaagaaaaaaaggccccgtttcaaattcaccttaggcctctcaacaccttgagacagccatgtaaaccaatagccatcttagtttaatgagaaatgctaaaaggcatcaatggtgcctagcactctcttatgtgtcaatatcgctattagtctacctaaatattgagtctcatataatttaatataataaattttaaaaattattgttaatcaattgtaaagcgacatgtgtaaaggtgctagacttatttgccccataacaatcctctagtttaatcagttagccgccagacataggtacgcgtacatttctctacatatataataaataaatagatattcctacactaccaaattctgtatttccatttgtgttctacacaacatttttcattttcatgtttattttttttacatgctttggtattatacgcatctatttattatatattacttaaagtttgtgtggtggatatagtgtacgaatatgatgctctagaattccctatgttttaatattgtttaataagagattaagaataaatttgttatatatatcaagactatatgtttaggagaaaactaaaagaaattgtgggaatgcttttgatatagaattttagttaattgtaatataaattcaagttgatgaaaaggtaattattaattgaatatttaaacaataataaaaagaaaatactatactgcataatgctcagtagctttttcgtttctataaataaccctagatgaagacatgaatttcccaagtacatctgcctttctaaatatcattaatatagctagagacaaaatatggcccaaatagcaaagatggagcttcagattgagctcaagtcctcagctgaaaggttttatgggatctttcgttgcaaaagattacctgattcctgaaatgtgtccggacttggtgaaaaatgtgaaggtaattaagggtgattgggagtctgtgggttcaatcaaggaatggactttggtaacaggtacaattatatctactatctataacaccagactatcgcaccatttttattggttcaacgaaaatattttaatattctctttgatctttcactgaaatgtataaagctatacatcttaataacaattaacaccgttcaaaaaaaaaaaaattacaactttctgtttaataaataaattttataaatttggctaatatacatagatcactaagataacatgttaacatacatagatcactaacataacatgtatggattttttcctttcttattttttttaatcgaaaaacacttaacaaacatatgtgtgcgcttgtaagaagaattaaaccacttcaacaaacaaggaattaatccaattcagcaaacaataaacatatctattttggcacgcatgataattttctaatcaattttttttttttttttcataatcgtaaatgttgtagttatttaagaattcttacaaaattttaaaaaatttaacatactcaaaataagattcaaacagtctattgcattggtaattttttcattatataaatgtgtgaaatggactctttgaatattattttcggcgtatatttttttttattttttaaaattttataagatgtcttaaataattgcaatatagatgattataaaaaaaatttgactaattttcttttgtaaatactaaaataaataaaggtgtatcatacactacttttaatttttaaatagtatattatagaatttttcaaaactaaattattcgtgaaaaacactacagttaggatagaattttttttttttttttatcattatttttcctaaaggacagaataaaaagttgtcggttaatttaaggtaatttaatctttttcattagctttcaccgatattagactaacaaggttaacataattgagagataatcacactatctttttatatttattatattattagataatcaaaataaatgaaaatatataaaataaattagaaggtcatatatttatttcatctaaaagagatatatataactattaaaactaaattagtaaaatttatataaagttcgtaaaattgaatttctttttgtggttttatgattttttttactttacatttttacatattggtgttttttagaagaaaaaaaacattattttttatatttttgcaataatataaaatattttcataatgtgtaaatacctttttaaaataacttaaaaaaaacagttagtaataaaaaagagttcgtaaaaaagtaaaatagtatttcgtaatagttgaaactttttgtttttttttgggtatttttaaaataagttgtttttttaatatatatctcttctatataaaatatgaaatgtggttatataaagaatttttagtttaacggtattttttgattttttttacgttaactttagcaaaatatctcaattacttaacaaaatattttttttttttgatgaatcaggaaagctttgtattaatcacaacaaaatttttacaaccatatagcaccccatagggccaaaagataacattaaaaaaaaatctttacattcctttaatctctatactctaacaaacatccgtctttacaatttttgaaaaccaactagtgtcatttcagttcactttctttggccaaactacactaattttgtgtgtaattttctttttaattccttcaattagctttcctgcatcaagttttgttttttctcaaatgctgaggtttcgaactctccataatgagtataccagacagttgaaagcaactgataacacatttttcttaaacttcctgagcttggatcttccaatccacttggtgaggctgtgaagtgtattagctgatacatgccatgacaaccagctttttaaaccctgaagacaagcaagaacaaagttgcagtcgaaaaacagatggtctgcattttcattatgtgctaaacacagttcacagtgtagcaattgtcatccccattattctcaatctatctttggtttcgagtctattttgcattgccaaccaagtaataaagctgtgtttgggggtatttagtctaccctaaacctgctaccaaagcacttttgtctggactggacagagcaaaacatatcccttggatatttgataactctgtacaaacagttgctgccctgctatgtctttgaactgctccttcaaatttacaaggcttctccagtaccaactactttgtgctaaagccttgtaactccaccagtcacaatccttgagataaacactgtgaacccacttcaaccataaactgtcctgtttttgagcaattgcccaaatgtatttccccatagctgctcgattccactcttaaatcttcctaagccaataccacctgcaactttagattgacaaagtgtatcccatgctactagactaggtccatttgagatagcttggccctttcagagaaaggctttgcaaatcgattcaagctgcctcacaacaaaatatattttattaattttataatattattataatatttaaaaataaaaattatatagatattttataaaaaaaataaaattttttaacggaaaaatttaattttattacatataatcaaaaataaaaattactataaaatatatatatttaaacatcaatttcatcacaactttttatttaaaaaatgattaatgatatatgtatacttttaataatttgtacattttattgtaaccacactctcctaactacaaattaagaatgtatctataactttcattattttttttaaaatatatgtttcgacattatatataaaatatattttgaaagtaattaattcactaatcaaactctaatcatatagatattactatgtacatattagtatattgtgattgtaatatgtattgatgacattcttcaaaatgattttaaagataattgaagatcagaaaataaaatataacaggattaattattactgtaacagtaaatcgaataaatggacaatagaggtagcatctaccaattatcatcatatattccgacggttataatttgatagtttcttttcataagtagattttctttcttcaagtaatttttattgatattaataaatcaactatatatttattatcttaattctcatcattaaaaatgatctatgatatcttattatatataaataaatataggtggttgtgagagaatgagggagatagttgaagcaatagatgatgagaagaagagtattacttttacaacattagagggagatatcacaaaggattacaatgacaccaaggccatacttgaggtgagtggtagtagtagaccaggctgctctatcaaatggactgttccttatgagaagaagaatcgtgatctccctgatccttctaagtatattgattttgttcagctcatttctcaaaagatcgatgcttacctctccaaaacggcttaattatctgtacaaatgggactaaatactaaataaatgatgatgatattaggaagcatatatctactacctaattactattttcttccttctataatgtatgggttataattattgtggagtgattgtgtgacctaataataattccaatacttgcctttctcatctatactagattaattaaaaaatgtattgccaagttatgcattcaattatcataaatttatctaattgttcatggatgaaaaataaaaaaccataataataaccgatactttttcatattatgggacaaaatattaaagaatatttatataatataacaaaataatgccaaaaaataaaatgagactaaacaggaaaaaaaggataaacctatggagaacaaaaactatataaacaaacgtaccataacaatttgtaaaattttctcatccaccttctccaatcggattctctctttgcaattctctccaaaaacacgtcacaattttactagccattcttcctcactccatcgttgatcaattacttcagcaaatctatcatatttcaattgttcaactagttattccacagctttggtggctttgtcaacttgcgacttcactgtcgattatcatctccacatccagtaacctgcaaaattcataaagcctgactaaacgtgcatcaaatattacaaaatgaattgcattcgataaaaaaaggaacaaaaccacaaccccatcagaagcagagcaaccaactcacacgaccgacttctatatcaaatctcaaaactcttcaggtaaattcaaaaaagcatagtcaattatatatcttcataatcaaataataacttacataaacataaaaaatatgtataacatttgaacaattgaattagcattagatttttcaatattaatatgtataaatgtacattcttcatctaattatatatgtaaagaaatcaattattttatcaattgcaaaaaaataaactaagtgtaaaattcattgttttgatagattattttaattgtgagtccagtcttatatgtgattttaatctgttataactgcataccagtttttcgttaaaatccttgtgagtcggttatgttttaactattggtataaattgttcttaggttggttgaactattgtctataaatagctagtttcattctgtaaa

SEQ ID NO: 26363 - DNA, 2855 bp, Cannabis sativa
atactaaattatttcccatgtttaaaaaagtgctttcctaatgctaaattaataataataaattactgaacctgcataacaaagctaagagcactcacaataacttttttactctatcttttaaaatacatcatcaaaacttcacttttattattttacctcaaactttttcattacatcatacaacttctttatttttcttctctatttcatttaaataatatatttataaataaaatatgatatatatgggcaatgtgtatatgatgtgattagaaatgtcaaaataatattaaaaatattttaaaaaatcactatttatgtagttaaatgtgaataaagatttagctcaaaatcttgtgagttgtttacctcatctgatggagctaatatttaacatcattctttaaaatttttacattttagctattatcaagcactagttgggagtgctctaagaaaataagagatcatcaattaattgaaataattaacctatttaaaactaagtactgatcaaaatataataaaatttactacttaataataatagctaaattagacagataaataaggaaaaagaaacagagagaaagcagagtatatttgctgaaatgaatcgtattaattgtattaattcctcaaaaaaatatacagaaacgttaatggtatatatatagtacatgggagaggatcttttcctaaccataaaatatttattttgccaatgattggctgaataaaaggaatcccaagattttagggaattctagaaatctctaaatgacagctcatggtatatcaaatgatgaggtgtccaagagggataaatatctaattggaaaatatctaatcttttcaacatgctccctcaagcttggcttgcttgatcaacaatggcaagcttgtccttcaagtatgaaaactgacttattgacagtggctttgtaaatatgtgtgcggtctgctctgaggtgggaatgtgcctaacttcaacaatttcttgtttgatgaggtccctaacataatgcacatccacctctatgtgtttggtgctgctgtgaaacatggggtttgaggaaagttgatttgcaccagcattatcgcaccaaatgacagtaagcaatttatgtttaatcccaagttctgtgaagagtgaataaagccaagcgatttctgtggcagtttgtgagagagccctatactctgcctctgttgaggattttgccacagctttttgtttcttagaacaccaggttatgagatttcccccaatgtaaacgcagtagccagtagtcgactttcgatcatcaatggacccggcccaatctgcatcactaaagcattcgacattccactcctttgacggcttgaagagaatgccttgtccaattgtgccttttaaatatctgaggagacgtttgcaaacattccagtgatgttgggttggactatgcatgaattggcttaacttattcactgtgaaggcaatatcgggatgacttagtgtcaaatactgaaggcctcccataacacttcgaaaaaagcttggctgatcaaaaaccttgctgtcatttagactaagtttgtcactctgagaaataggagtgggacttggcttagagtgtaacatgtgagttttgttgagtaaatcaatcgtgtacttgcttagtgagagatgaataccataggcccctcgagtgattttaaaactaagaaagtaatttacgcagccaagtgttttgagcaaaaagaactgctgaagtttggcaataataccgcgaacagtgagattgttgttgcctatgagaagtatatcgtcaacataaacaaggagatataattcagcatcaccttgtttgtagaagaagagagaaggatcggatacagagctgcagaaaccaatggaggataatacttgctgtagacgatcgaaccaggcccgtggtgcttgacgaaggccatataaagccttctgcaacttgcagacataatgagggtgtgaggtgttgacataactagcaggttgctccatgtaaacagtttttgaaagtgtgcaatttaggaaagcattgtcaatatcaacctcctgtatgtcccattgattagaggcagaaagatgaaggataactcgaatggtggaacttttgacaacaggactaaaggtctcataaaagtcaactccaagttgttgctgaaaacctttagtgacaagacaggctttgagacgttgaaccgtcccatctttattgagcttgacacgatacacccatctattatcaatgacactcattcctggacgtcgaggcacaaggatccaagtcttatttttcaaaagagcataaaattctgtatccatggctgacttccactttggattttttttaaagcctcgtgcacattctcaggttccaattcagtcattaaagccaaaggtaagggtgaaaaggcatgaaatacacggggtttgtgaatgccaaccttggctctagtgatcatagggtgggagggctatggtggacgtggtggagggcaagtaatttggttagtttgttgctaaattggggaatgctgatgtggttgtctggtgtgagaaataggtgacagtggcaagtcaatgtgaaggggtatagttgggtatgatttgatagaggctgggctggtttgttgtgatggagttgatgatggagtaacaggattgtgtaaatgagaaacatgtgagctcgaggagtgttcatcttgttgacaagcttgagaatgagtttcactaacaacaactacaccaggagcatgctctgaagttacagtggacaaatatggtaaccatttggggatattgactaggtgtgtaaaga

SEQ ID NO: 26364 - DNA, 1015 bp, Cannabis sativa
caatctttaaactttaatgcatattttattttacggattgtttttgaatagtttgtataagaaaagatggtatgtaatcttttttttttttttttttgaaaaattaatctaaatctttttactttttgctcttttgaaaagtaatctgaatcttttgttttttcccaaaaaaaaaaaacccaattttttttgttatgattttgtttaaaagtggaatattttcttttaaagagaataattgggtgttcaatttgaatcttttacttaaaagaaaataatggtgttgaagaaaaagaatgggtgcagtcaaaaaaaaaaaaaaaaaaagaaaaagaatgggtattatattatgatactcgttggtattatatataatttggtagttattggtgttatattagtattatattataatactatttggtgttcaaaataacttgtgatgataaacaatttgttttctttagtagaagatattttgttattatataattaatagtgtcatatgaaattttgtactaattgatataagaaaaaactactaattagtatttaaatatataatttaactattaattattttctagaggaaaaaaaaaaactattaattagtatctaaaaatttgagttaactactactaaataacttttttttattggcattttaggttgagggagacctgatattatatgagtattataatgctataaacaaggattgaatgtaatatatatatggatcgttttttaatggaaagtcaccactgatggaaactaaaatatattattttattgctgatgtggtacggtcatcaacttgccatagcaagtatttaacaactttgaaaagtcaaattagtggggtggcataatggaatctttcattttattttatatttaattcgagattccttttttttttttttgccaaaaggaatggtgattccacccaatcagaacaagctctctttttaatgtattgactatatatttccaatgtaatgtttgaatagtt

SEQ ID NO: 26365 - DNA, 2971 bp, Cannabis sativa
taacgcccaaaaaagttcagggggcacgatttactacatgtcaaaattcaaggggaaaaattactaattagcctttattatattatatatataatttttcaataatatacatttatttgcatttattaatgttactactattactgacgtgtcacattaactaaatcttacgtatttgacgtttttttatcttttttcttgcatttataaaagtaactttttaattactaataatattgataagaatcaattagctaccttcacataaaaacttcatttttatattatataatttgagatatattttagttacctccaaaatttttttgtatacatcttcataattaattaattatttttaagttgtattgaggtagcttataatttaaaatatatttaggtaaccttaaaaattatttttaaaattaatgagagttatcatgtaatataacaagttatcattttttatatatatgctaattattttacatacatttttgttattttaaaaattaattagttatcgtataataaatataattcaattaacaaaattctaaaataaatattaataagatttattaaatattatacaacagtaactaattactatagtaggtaaatagttttttttgtgtaaataacaaaaaataatatgctatccacatcttgaaacacattgaagaataaattaaaataattattatttttaggatcaaccatgacattacaaaaaattatttttaaagttaacaaaataaaaaagaaaaacaaaagagaaaaatgcatgcaacaacattaaaaggaaagtaagagagagagagagagtacactataaaaatacccaacaaaaaatggttattaatatttggttaagtcatttttgacaattatattaaaaataaagtattaaatgtaaaaatctatattagagcactcacacatcttttttactctatttttcattaaaactttattttttttatttcacctcatacttttacattacattatatattatatattttctttatttttttctctatactatttaaatataataatatttaatatattttattataaaaatcagaaaaaaaatttaaaaattaaatgaaaaagatttaaaaaagaagtgagaaataataaaaataatatataaagaatgaatagttagaaaaacactatttataagataaaattttgagttattttaacttgaggaagcctcttttcaacaatatttattatagatatactcatatttgagactttgagttagtgtttgttcaattggattgaaattagcattaaattttaatttagcattttgccatacggttggagttggactcaagtcctcttgactaacataaacacagttagagcattcttgtctgaaattggttgatcatctctttgattatttcctatgaaatcaagatgaattgaaaggaatatacttttcgttctattcttagaatcatgtgactggaataaactagtaataacaagagatttatggttccattcgaaaataaagccaaaagaatatatgtaagtatatttatatattaaatatatgtattcatccttctggtactggtctcctagggtggcagtttactagttctctcaggatcaggtttcacattttttttttaattatttttcatagatactcctgataaattgtgaccatgtgtaaatttttggttatatttggttaacaaaatgagttaatgttatatttagtctaaattttataattttgttctaatgtattaggggtaaattaattttattttaagtaatttgcggcataaataaataaattttactcttggttgcaaataaatacttaaatttaattttttgacggtaataacatttaagttatgtttctataacttccataagtacttgactattaagtgttaagtcattatccatatattatttttttattagtatatttaaattaatttttaaataataaataaaaatttaaagacctgaatcaatcaaagactgtcacgtggtaatttacttggcccgatacctacaaaaattttagaatcataacttaagtattattaccttcaaaaattaattaaacttaagtatttatttaacatgtaaaaacttaggtaagtatttataacgtaaattactttttgattttgacaaaaatatgtaagaaaatatcaacaaatgattgaaagggtataaaatctaattaaatatataaataaaatgtgaacagttattaaaggcactaatatgtgataaaaaataaataaaaaaagtaacattattgttttgtaaaatttgactatttttatattttatgttaaatttagtacaatttatgggctaaatttaaaccacattagatagataccattttaactttatgagtttggattaaaaaatacacatacaccatctaatactccataagaaatatttcaagatttggtgatattctaaactttaatatgttcaatttttgtgtagaaaaaagaaaaatatgttctatttatattataatatatatgtaatcattttttcttttaagaaaaaaaaaagaaacttatgaaagctcaattttctacctttaactaaaaaatttaaaaacttagggattttactcatggctggcttttatgcattcctaaaacttaatcaatatgagttgagtaataaaggaaataaaagatacgagataatctgatgtgatctacactgatggccctaatgcagtgaatatatatatattatttaaatgtatatatataaggagtgaaactggagctgatcgatcactggagggataactggtcactgctgctgctgctgctgcttctgttggcctaaaactaaaaaagcttatattataaggctgcggatgccaaagcaaaccagactttctttttgttttgcataacccctattccctattcccttc

SEQ ID NO: 26366 - DNA, 1685 bp, Cannabis sativa
  modified_base (32)..(46): a, c, t, g, unknown or other
ttcagaattcaaatataacaacataaataatnnnnnnnnnnnnnnnaaataattttcataattaaatcttaattatctgctaattttcaaatttaaactaagtggtctttacatggtctgtcacttgaagtcccgtttgagtgctcagtccttattagctgaggtgctaacttgaccttcctgttggtgagttgtattgccacatggcgatgactttgcccatgtaagcaataccacgcaagtgaacaaaaatcaaaataacaatataaataattaatagttaataatactaataaaataataaaatgacataaaattaaataaaagaataatatatttatggagtttttactattttaggctaatactaactaaaataaatatttatacaatgataaagagaaataaacatttatactatcttataatttcaaaaatacaatttacatattttttttatttacaaaaatattgttgtagataagggcaacatgcaaaaggagaaaattagatagacatgtggcctatgcgggcgagtgaaactcacacgcgagtaggggaccaaaccatcaaagttgcctgacgcgcccataatattacaccgtcagaacgcagcagtggatgccacgtggcaagtttggatgaagtgcacttggatgcgtgttgggcttcttttttaatacaactgtaatgcaacaactaattagcaacgaaacaacaacttgacaacaaccaaactttaaaatacaaatcaattaaatattgattttgctaaggcaaatgaaaattatgaaaaaaagcaacaacctccaaaaaaaaaagtttataaattctttacaataaatataaaaaattatgaacacataagctaaaaaaatacttagttaataaaaactatactaaaatattactttaaaaaacctaatttgattaacaaaaatatgtttaattaaaaaatatatctatgaaaaaatatgcttaaacacaaaatcaactaaaatataaatgagatcaacttgataaatttactataatacaattctaaaaagttaaaaaatcatttaaaactaaacatatattcatttttctttaattaatgacaagctacaaaacaaaataaaaaatataaaagtagacgaaactacacatataaacccaaaatcaattttaaaaaaatcatcaactaaaaaatatataaaaaaaaataaatgaaaaagatacataataataaatgcacaaaaattgaaaaatcaattaaaaaataattaaataacaacttaagaatatgttaatatgaaaaattgagcttatgttttttaatcttttgaggcaactaaataacaacggaacaacaacaagatattatcatacttgtcgaaagcctcaaaaaacatgaaaaaatacccaaaaaaatcctgataaaaaatttacaaaaagaactatacatcacctatatatatttattttttctcttagttgaacaaataaataagaacgaacagtgaactaacaatgataaaataattagacaaaaaactcaaaattatgtatataaaaaaattgccttttattagacaataaaagtacaactacacaacaacactaaataaatatgcaaattattggacgtcaataaatattgtcgacaatcttaaagaaacataaccttcatatatgtttgaaca

SEQ ID NO: 26367 - DNA, 3840 bp, Cannabis sativa
  modified_base (3586)..(3591): a, c, t, g, unknown or other
tccaaagactttaaggaatttatactctggtttcttggagtaaacaatattgaagggacactgatttttcaatactagagtggggagacaatttatgagataaacgactgtttggaatgagtctcgcatgtattttaatggcatataggcttaagtaagtaaggttagacccatttcagcaatgtgcctatgtttctgctccgctcgaccatttggagcggatgtatgaggacaagaacgttgaaaatctatgccattttcaatgacacagttggagaatgactgaaattctcctcctcaatctgtcttgagagctttgatctttctctcaaattgattctccacaaggtttttgaactacaaaaatgcagagatggcttcacctttgtgtttgagagggtagatccatgtgtatcgactatggtcatcaacaaagtgtatgtagaacctatagttggtattggacagaatgggggtagggccccaaacattggaatgaattaaatctaacatatttttagcacgctcagaattagtggtaagaggtaatgcatgagacttgccaaattgacaagcctcacagaagtttttattgcaattagtagtaggttttacatcagcaagactcaacacttgactcaagacacgattggatgggtggccaagtctcctatgcaacttatccttgattgaactaaaactttgctcagcaacatgctggctttttgacttagacactaaaccagtaaacacaaaactagagttgacagacttggtggagtgatcacaacgaccttctttagggtctgcaaattggtagagtccatctttaaatttcccttgaagcagcaccttctttgtttccaagtccttcacaaaacaattttgagagaaaaattcaacagatacgttattatcagatgtgagctttgaaatactaacaaggttttagtaatattaggaacatgtaacacatcatttagaacaagagatgtttgatcaatagataccaattttccacaaccaacatgagctatttgaagtctattaccattgccaacagttaagaattcctcaccgttgtactcagccttttgtgtcacgttgtttgccttagctgtgacatgattactagccccactatctgcgtaccaagctatgtcctccaccatatcaggtgtggcaatgaaagcaacaaccccaccttgatttcctttgtttccagtgccagagttgtttggatctgaacccatataggccacatcttatcggttgtaacagtatgcagcagagtggccataacgaccacaaacctggcatgtaggtttcgagttactggtgtgtctaccacctccatgccctcaaaaactcctagatccactagaagttctgcctcctttggactgtccagagttaccagcacgacttccacctccatagttattagaattgtgtccccttccaccttagaaaccaccaggttttgttgtagcaacattagcattgggagagatgtagtttgcaggagcgtttttgttagtactggacaaagcactaaggcgttcaactttgctgtcacagcttaggagaatgtcttgtaattcttgccaagttgttgagggtcttgcttcaacttgaacaactattggtagatattcgatatcaagaccagatagactattggaaaccagctgtttttctaggtacagatcgcctgcaagagccaacacctccacccattgcctcttctatcgaagataatcagccatagacatagatccttttcttgaggtttgaatcttcgtgcgatactcgtccatcttgacccaagaatgcgcaccaaagagtgtcttcgaagcctgcaataaagtagaagaggaatcgcaccccataacttaattagcaatactttcggtcatagatccgtataaccatccaagaagaaggtggtcatggacagtccatgcttcaaactcaagattcacgatgacagtattttcaccagcgtcttcatctaggggaaggaactccatcggcttgaccttggttccattgagatagtcgtctagacgatgcccacgtatgattgcagacacaatgtataattattcctatctagcttcaaggcaaatggcttggttagggtactggccacatgaggtccagggataacaacaaatggagcttagggctgagcaacaacgctggctgcactgcagccagttgagtctccttgtccaccaccgtgagtcgaggtttgttcaccaatgaagcaagatcaccaccagtgtcaagctctcagaccaagtttgaaaaaacagaggaagagtagagaatgaaaagaatactcagcacaccaaaaaattttggggcaggccacactttataaatgaaaaggttacagagatattctagaatatttagaggtataataacctcatcatttacaacggtataaaggaataaatcataacagaatgatatgcaatcattgtacaggggggaccaacatagtgacaattgtgacacctatacacatcaagaaaaataagagtaaacactaattaaccttcttaattcatttcttaacaggctgccctctccatctatggaagtgcccccttcctctcactttctcactctttctcgtctaactccctcccttgcctgattgagatccagtcatgcatgcagcaaacgacagccaatgacaaccactagtggcaagccgaggtaactctctctctctctccctctcaacctctttttctctttgattttattcttttcaagtaggtgagcggtggtagtgtagtttgaggataccgcttcggctgtctcttttcaagatttgtatgttttttttttctcgttttctctctctcacacatttcatatctgtggtttgtaatcaatttttattttcttgcatctacagaagatctcagattgttttgtgtaaaatattttggacttaatttttatatttatttatattttttttatgaaaattgagtttatttattagatatgatattaaattttctcatatatattttggtaaagatagtaaatatatttttgttcagaccagattagatatatttactattagtttcaattagtaaaaacaaacaaaaatatttcaaatgctctaaacaatgatgttttatactattagcaattgtttttaagagacacaagatttttgtaccgatggttaggaaccgacgctaatgaaagtgaattattttttgtcgatgggtcttaggaatcgatggtaatattatagctgactattttaaataattgcctaaacctttttttgagtagtgaaatattatgtagattgttaagtatatataagacataaattaaatataattttttaatatactaaaaatagaagagtaatctacggcataaatatttaaattgaactcccagatacaaataaatacctatgattattttttggcggtaataatatttaagttataattttggaacttttgtaagtacctaactgttaaaagttaagtaaattgccacgtgacaatgtctgattggtctaagtcattaaatnnnnnntttttttaaaaaaatataaaaataccaataagaaaatgacacgtggataatgacttaatatttaacgatcaagtacctatagagtttcagtaatataacttaggtattattactgccataaattaaacgtaggtatttatgtcacaaattactcaaaataaaaatatcccaactaaaatagaaaaaaatgggacttttttatttttacacttcaaaataattttctttgcatttttacaaaattctaca

SEQ ID NO: 26368 - DNA, 1773 bp, Cannabis sativa
ttgtttttttggtttcttctggagttacaaagttgtattctgtagctacggaaaaactgttttctataccagttttattattctgcatttaattaattaataaaactgagaattttaaaatacggaatttcataatttgtttatcaaaaatttcagtacactctatttaattatataaaatataatatttaattgcactaataataatactaaacttttaaaagtgccaattcactattggtgccttttagtaattctctattaataaaaacattgttattgggcactagtgatgcccaacctcctatagatagcgttctacgattggttagcgatattgtctaaaaattattttcttaaattatataaaactaaatacttaattatatcgacaacgatatgacactgagaaaaatagtaagcaccaccaataatatgttttaacaattttcttttttataatacacattaatttttataatacacatagttaatgtttaacgaaacatgaagtttattttaattcattattgcatgccagatggtttgatttaacaattaacattacttttaatgcattattagaattatttcaaagaaataatgctcctaatattctaactagctacctcgtattctcaaaataaaaaatgaaaaattattgaggtctaatgtcaacagggggtgtgatacgtaccttataagacaattctaaacaatatagtagagattcttgggttttcggttcaacattaattattttatgcattttgtatccaataaactaatataaacatcctagtaaagaaaaaagtataaaataaaattaatagataagtttttttttttttttttgaaaagaactaatagataagtttggtgatggtcatatatttaaagaacatcgattgtactcttcaattatatcatatataaatacatgacagttcaataattataatatatgtatattttatgtcatattccactgtgaagcattactgtgtgaaataaagggtctattaattccacatgcatcagcatatatctaatacacttttcatcgaaaattttatttattttactttgaaatcgacaattttatttgcgatatattaaatattcattatttttatatataggaatgtcaattgagttgggccaggcccgacccgttgcagactcggcccgacccgatattactttggcctggcttaatttggcccgattccttcttttggtttagcggaacaggccagtcccgagataatcagacgccgttaggcccgacctgtatttttttttttaaaaaaaaaaaaaaaattaatttatttataaaaaaccaaagtaatataaataaaatataaacgtatctggtaactataaatttctataattctaacttctgttttacatatttttccatatcttaactagatggtctgtctcaagtttgcatagcaccatatatattgatatttaagttgtttttttttttttttttctataatttgactaaacttagggaatgctgatacatgattagacaaagtcaggattctgaaaagttataaccaaaggacaatttttttttttttacgcggtgatcaaaatcacacatgattaataatacgacatttcataattggtgacgacacctcttcgaactaggatagctcatcgtttaatcgaaggacatgttttgccaaaccatgaactggagaaattcatatcgcaaactacatgggacaaaactacccctagaaatttaga

SEQ ID NO: 26369 - DNA, 3275 bp, Cannabis sativa
ttttgttaaaagttatattatatacaataaaatgcactaattgattatttgaccaatatattcaagttaaaaaattgttaaaaagtattatttgtacttagtactattttcgattttatactgctattagtataattaaatatcgaatttaatataaaaagtattggagaccagtagcaatgctcccaagttaattattcaaataattaattttaaattttttttatggaagattatcaactaaataaagtgactttcctttattctttcaaaaattaagaaaagggaaacccattttttcttggctaaagttgtcatcgcaacacttgtgattgaattttctgtggccaagctgagatttttttaagatactagaaggacaattatggctttgggaacatgaacaccattacataatttgagtattgttattttctctaattatacacaaattcaattacacgatgactttctaaacttacacagtgactttctaaacacaccctaaacgttatttatagtgtttgtactataaatcattgtagactaatcacttgatctttatatatcatatatatattagtgttaatcatatttgttgcttattaagagttttttctagctatagtgtgtttaaattttgacatgtttagtggaaaggcatgaccaaatagctgagagaagtagtgtctcctcatggtttcccatttttcggtcaccaagtcgggggagcagcatcggcattgagttttgggcaagccttggtgttgctattagcttaggaaaaacaatcatagtaatcaaaagacgattgcacaacgaattcaatacttaaaccgattatgtttatggaagaagtacttattccttctataccaaacacgccataatagaatcgacacatgatagttcgaaggcagaatgaacctcctttctaagctctttatgaacactagtgactacactacatctccatagagccaatccaatgaagtttttcaaagaaaaaacttgacttattgacgtaccatttgaggagctgacctgaccaaattcttattgattatcttaatattgttgcaactctttttgctttgttttaatgctgtaaaaatactgagtatattttatgaagatgttgacttatgatgaggaaatattgggacccaaaattaatgatcacatgaaatggataataggttttggatgtggcggcatgtaagccattattttattattaactgataattaattagttaatatgttttgattcagattgataataaacattcatctactgaaaatggatatattcttttgcatattatattgaaccagatagcaatgcctatcttattccgtacaaaactctcaatttgtcaaaaccaatctttaacatttttattaaggaaaacaccttttcaacacaccagaaactgtttcaagttatgagaaaagaagaaaagtaagcactgaaacctcaaaaggatggggaataggcttctaatcagaataatgacaacaatcacatagtgaagttatataaatatatatatatttatatatatatatcttcttcaactgctgcatttattcaagtatgcatcccatccttggagacgatactcacgagctgcctcagcagggtttgccgcctttataatcccacgccccactattattatgtcactacctctatcatatattacctgaaaatttgttcaaacaaattactcaattaatccttttcaatcatttatcaagtgatctctctcttaaaactgtaatccttaacaagaaattatacctttttttcttttaatttaatgaaagcacaatcatagtatgtaaattttttacttacagagcgaggagtgttatattgttgtccaagatcatcaccgccttttaccatctggactccgggtgttgcctgaataaacactggatttatcggggcacccggccatgatgccggatttactgaaataaacccaatcacaaagtctgaatgctcctctgcaatcttcactgctgctgctgtgtagtctcccttggcaaggttaccagccgagctcatttcagcaagaagcaacagacccctaccccgaggcaatccctgcataaaacaacacaacacaaacggtaaaagagtagtgggcgatttgtttaaagacataatttttgttcagtttagactagtttggaccttcaatttgagtccatcaactatcccgggaccagagattatgtgggcattagtaatatctgcccaatccaatatgtggaagataccgctgcgaacaagaacgaaatatatatcagagctgcaatgaatagtgagaatttatgaaaaagaacacaaagaaaggaatttgagcctcacccttcatactgcatagtcactgtgttgccaatgtcagcgaatttacgatcttcgaagattaagaagttatgtttctctgcaatcttgaattggatagagtaatacataatcagctcccacaattaagtgaaagaacaacaatgatcaaatggtagatggttgaaagtaagaaatgtaccgagcgaattttagatccgaaatctggggtaaaatcaggcagtatatccacatgggttttcaataagcaaatctcaggtccaacctgcattcaattcaacaaaattgttacttaacacacaattaaataaattaaggcaagaaaacctaaccacgcacttaagtaccgaaacgattcaacccacctaatatattcattggacggttttgatttttcgttattatttgagttgtgttttttatccgtttattcggtttgatttgttcggttgcatcagtcaggggcggagccaggataaaaaattatggaggccaaactatattacaaatttaggtgataaatattttagatatactttattaaatgagatattcgcagtaaaactttcttagcatttacatttataacacatatgatcctaataaaaaaaagcaacaaaaatattttactttaccattttttcactaaaaaaagcttttatttatttaactaaagaaaaattgatttcatttttctattcaaatttgtatatttttaattaaaaaaaaatagttaatattgtaagataagataattttgtcgctatttttttttattagaattatattatgggtgtttcattgtaaacatttcttattaaattcataattaaattaaaatacataattttttttcttgtatatcacaaaaatcatcgataagtgaatttat

SEQ ID NO: 26370 - DNA, 2675 bp, Cannabis sativa
cggaccatctaccggttggtactacatgtttggtttttcttaatttgttattattttttattttattatcactcattttgttacgagtgttactgttaatcttttattacaattttttatcagtttttatgcttcaaaacacatgtcgaaatattttttttttaattttctttatcattgcgatgttcgttatgctcacaacaccaaccctgtaaattttgaaaattttcgaatagattacaatgtcaaaaatacatttgaagtttttttaaacacgtgtggtaaactgaaatattataaactatgctttcaatactgcaaactataaggaattttttaaaaatttacagggatgatattataactataaccgattccttccttggctgtcatttgcatataactagctaatgctgctgggaatgcccttggcggattctatcttctcttggtggagtaacttgcaaccagtgctttagggctctctccacacggggcgtcagtcgtgaatcctatatatgcctatatgatgatatggaaggggattgcatggaaaaagacccttcgattcgccttgaccggatcacatagcgttagcggggcggtaaacttcgtaacgaataccgctataaaaaattttaaaaaaatatttcaacaagtgatttcggaggtagaggttgactaagaggttgttattagcacttctcttttattattaagaggaatgttaccgtgaattttctattatagcttcttagttaactttcgtgtttaaaaacacatatcgaaatattttttcagagttcgtcatacttatagcatcattctcaaaaatatttgaaataagtttttagttttttaaatactagtaaactataatatcatgaattctattttgagtacggtaaattatttaaaattttttaaaattttacaagaatattactataaaaaaatattctgacatataatttcgaacactgaataagcactcctcttttattaataataaaaaatgaataataataattaaaaaaattggtgagtttgtggttctagtttgggttctgagctaattccaatgactaattagttgattttattgtcacaaagctccaacgtagaaatttctacttttgtttacactttacattattttattttttatttttattctttcaatattcttttttttaaacaaaaagaagattcttttaatattctaatttttttttcttattataatatttttttagtctaaaaagacttcatttttattgagattgaaaattaaataaaattacaaaattaaagggtgacactaagagcatgatttatagtacaagttcttaataaataactcaagatatatagaatacaaaaacaatcaaatagtcataataaagaaaaattatttaaatttttattacaaaattgctataaagtttacgtttattttatgaagagattttactataaatgttattaataaaatttattatttttaaatatttgttacaaaatggtaataattacaatattaatttattatgtaattaccaaccgtcttgccaaatataataatagaaattcacatgtaattaccatttgatatctaaacgcacattatattttgaaatataatgtagttactatggagtgtaattactagactagtaaccataatgcaaaataattacacacttactttcaaacgcaccctaaaattaattgaagatttttatttcctttttccattcaaagattaatagtgacttttcttatttttacctctttcaaaaataaaataaaatctatttggaggtaagggatattttatttgtgtcccataaatttataaatacactttaaaattaaaataaaataaacttaaattaattgaaaagttactcttaataatttttaaattttcttttccatactactgtgttaatttcaatagctatttagtttttttttttttttggtattaccattttattaataatgtatatctttttatattttctaataaaatttttatataattatttttaattttttctcttaatatttaaaatatattttatttttattctatatatgtattttttaagaatgtgagcatgatgaaaaataatattttgaaaatatatatattatattttatatattttttagtgtaaaataaaatatataatttatattttataaaaataataaattatgggtgtcttcaatcgtgtaaataagaattctcttagaaataatgaataaattatataagtatatatatattgatatcgactggaccatgtattttgtaaaagttattgattggacattctattttgttaaataaaaaaataaatgatgtattttctaaaatgatacaaataagacttctaaactcaatttttgataattttatttttaatataatcaacttgaagataatttcaaacacatgtaaatacataaaacgtaactaatttttttcataaaacttctagattggattattattattatttatttattacttttttaataaaaaatcattttagagtattatttaatactattttgaaaaatatataatctaatttatcacttaataaaacagatatgattcaactaataacttttacaaatatagaatttaaaataatatt

SEQ ID NO: 26371 - DNA, 1927 bp, Cannabis sativa
  modified_base (1892)..(1901): a, c, t, g, unknown or other
gtgcaaacaatggaatcctagcgcattaccaccacctccaactctttcctcgcagtacaagtaagtattcctcctcatttagactgttttcttcaatgctcgattgaaatgtaattctcatatttggaggaatcgatcactttgcattcgtagaacatgattctagggaatagggttagttgtttatgagaaattcttgatgggtccttaggtgaggatttttggttttagggtttctaaaggggtattttcttttaggccgaagctgaaatgtatgttcgaggtttgaattttccctggttatgagatttttgtaggacattttttagagtttctagtagatcttttatttactttttctttggcctattgtatacattcattttgcttttccttagaaaacaatatctgggcccttttgttgctattatgcgtttgggttcctgatttgtcaccatgcagctgctgtatggtagtgattttaatggtgacgaatctagtggggacctctctaagcaattatggaagaggcttccccaggtaccctatttgtcatttggatgtagggtactgactatttggactttattatcgctttttttagtgtctaatgaaggcagtgatttttgtttggtcttggtgattcttgacgaggttcctgaggcatcatatattgaattacctcctattgaggagaatcctagagatcttattccaggtgaggggccttccaaaccagttcaacctgaatgacaccgtaggagcaaaggcaagggcaaagctagcataacctctccagttcctagggttcttaacaactctatttgggagatagaccaaaggctgaacttattatggaattacagtcttttggaagtgtattttattgatggatgtgtaaaaaatgttttgggactcgcgtggcactgtatgtccatcctttgggagtttgcttcccaaagtgtggagggctttagaccatggagttggtcccatatctcttccagagctcatcttccacttaggacttacttcgtggaattttgcgttaaagttggaatcactcttttccagcttctaccgatggcatacaagttgctcaaaggatggtttatattctgcaagtcctggagacagtctgctccaaccccataagaggttttgtatttttataagttgaaatcctaacccatacgaggacatcccactaagattgagttttatcgtctctaaaaatacaaaaatgtccgatgtcccacaagcacttcctctcagagtccagactaccattagtactggtttttcacaactggccctcccatgaggcgagttctagcactatcgttcgacttcaaaattctaggtatcatcatttattcctttgcacttttactgcttcgatggcttgtaatattgttctgtttgaaaacttaatttcaattcttctactgtcatccttccttacaaaatgtgtttccagaactgagctcaaagaggaagtgaatcaaaaaattgccttttgtgtgccattttctattgaagagttgagagttgagggggtggttgccacccaattattgtgccagtgtggtctcattaccacttgttgggttttgtgccctaaataaaatctatttcaatataatcaaatttacaaattaataaagatcagaaatcgcagtttatgttgcatggttcacatgaattatttcatgattctttaatgtataaattctattaagtccaaaatatatgtatgtgttcatgattatagtgtcgtcagcacagtggaatataatcatgaatatgttcaaaatttaaattcccatgattggtcagttcactggatttagactagcatgataatctgcgataggtatacttacaccttnnnnnnnnnntatgtcctttccagggcatttgcaaa

SEQ ID NO: 26372 - DNA, 1320 bp, Cannabis sativa
aaccataggaagaccctatggcgttggttatttttaaccctttagcatcacccggaacagcgttggtagtgaattttgccagtaccgacgctgaaagcccttaaaaattgcctctaaagctcaattttgtagtagtgcaaaattgggatctggatcctggcctgaacccgtagttagtgtctagatcttggaatcgtaccaagacccgaacctagaacaatttccagaccaggacccaaacctagactcagacccgagacctaaaatcgaaataaggaccgaaatcaggaccctcgaataggaattggattggacccaaaaccggatctagacgcagaactgaacacggacttggacccagaccgagatcgatacctggacccagacttgtgcgaggacctacgacccagaacccgaaacccaagacccgtgacccatgacctagacaagaacccagacccatactagaacccggacctacacccagacccagacctatacccgaactaagacccagacccagatccaaactcggactcataccaaaactcagactcaaactgaagactcgggcatggagtgagatcaagactagactaggccaagacatgagacaaggaaaagtaccgaacacgaaccgggacctgcactcggacttcaaccttaacccagatctggacataggaccctaacttgaatcggggaccggacccatgactcaggacccaagacccaaatgtagacccaaaccctgagacccgaaccaagacctaagacatgaactagaactagaccaggatttggatttggacccgacacccaggacccaagacccgaggcttggacccgacccatagtcagtgtctaaatcagggaattagaccttgacctggaccgagacctggacatgaacccgaacccatactagaactcaatagactcgacatgtttggtgtttggatttgggacaaagactctgacttgaaccctaacacggacctagtcctagaccaggacttggaccttgacccacacctctaccctaaatcataccctgtgacccaaaattggaaccagcattagaagcagacccttaaaccttaaaccctaaaccttaaacaataaatcctaaactctttatagttacccctaaaccgtaagccctaagccctaaaccctaaaccctaagccctaaactctaaaccctaaatccccaaacactaaacccaagaccctaaatcctaaaatatgacctagacacgggctcagacccatacccttatcgagatcggaacccaggatccagacccagacccatat

SEQ ID NO: 26373 - DNA, 2484 bp, Cannabis sativa
  modified_base (1558)..(1564): a, c, t, g, unknown or other
aattacatagttacattgtaattacatgatcagacaaacatgccaaattgtgtaattacctccaattacacacaaatctaattacattgtggctttctaatgtgagacactaatttagaatattaatacagaaaaaagtgatatattatataagaaaaaaaatttaccataaaaataaaaatagagaaatcattcaaaaatggagagatatgagaaaaataaaaattcactacaatattgtttatccaaaggaaaaatatggctatatattataggaacaaaagattaaattttgaaaaaaaaaaaaaattatacagagctcacttaaaaaaatctaaaccaaaaacaaaaattaaaaatgagaaatttttaaattcaccatacaatatcaaattaataaaatagaaattatggatgaagatattataataaaaaaaccattaattaaaataaaattttaaatgttaaaaataaatacaatcaactaaaacccaaataagtagtaagtatgaaatataaaataatttttttattttgattttgttttttgaatcatcaataaataaaaaattaaattttaaatagatatttagtaaaatagtgtacgtattttttctgagtttgttcttatttgaattttattttttgaatcatcaacaaatcaaaattgaatctgaaataaatatttaataaaatagtttaagtacttttttttttagattgcttttaataaaatatttaattattaagatatttttgaaaagaaacggtaatttaatatgatttttttgagtaattaattaatataataattgatattaattataataaaaaaatagagaatttgtgtgatttagttagtaataaattatttatttttattttttttaattaatttaaatttaataaaaaaatagagtatttaaaagattgcgtcccctcaaattatatatatacctatatttataaacttatagttattaaaatatcaagtgttaataaatatctttctcgaatttgaattattgatcaattataaactatttgcattgcaagtaatttcaatattttttttaatacactcaaccaatttcattctttaacttttttttttccgatatttaagtatatcccattttaaaaattttaatttttttagctaacctaacttttagcaacaaaataagagcacaaattgactccttaattaaacaaaataatagtaaactataactgaaagtccctttctcacacccattttacatcacattgtttgaaataaaaatagttaaaacgtctcttattagaataaaccttttttgtaaaggcgggggatagtaatttattcctcgaaaatatctaagaaaaaaaatttttaatcggcaatattaatagattctcgcgtagtcaaaagaaagataaatccataaaataataataatatatattttacagaaggaatatgcatgggaaccaatatttttatagaaacaataattcagatcattgaaaaatattttttcccacaaatcaaattcataaaataataataataatnnnnnnnataataataaaaaaaaaaacattatgaaatccaagatcattgatacactacttcaaatacatataacatatatatcatacaaagaaaatttaaagatacaactattttaccagatggaaataaagtaacaaaaattaaaaattctaaatgtatatgaaactaatgtagtgttgatagattatgccaagatttagtgggcgagaaatatacaaacaaagagtatgaataatgataattatgaatagagaaaaaaataagacagtgggagattgagagaaaagaaattaatataatgatgatcttaactaaataaaagaaaaaagtaatgaagagtgtcattgagagaaaagaaaacaaaagcttttagtttaggattttatttattgtagtttgatgtttttttttttttttatgttaacgatggtgtataaataaacggtattgttgtccttaattttgcccaaaatacgtggaccaatgcgaccacgacacgtgaatttgagaaacatgactctgagataaatcaactaagtcttttttggatcaagagtatcaactagaaaatacctctcggagaagatatgaaggctccacatactcccgaaggtcagagccatggtaaggcacctccgggagataccagactccatttgaacaatcacctcgcatttaatgccgcgtgggaaaagacgtattggaacataagcaataagtctgacggcgtaagccctctgttgcagctattacgctatgattaataagcctagtgacggctactttatgagggatcacatcaatcaagaaaggaaaaagaatatatctacttaacccctaagatacctatggtataggtcatgtatttcctattttgtatctgctaggaatatgtgcccctactgaaactacatagaaagacaagt

SEQ ID NO: 26374 - DNA, 2744 bp, Cannabis sativa
gtgtgacagtaattttgtaaaaatgctaatatttttgtaagtttccttagaaaaaaaaagctcattaaaaactaatcataacactagtactatatatacatatttttctctaactaacctcctcttacatgattaggaaagaaaactcaactcaatctctctctttgttgattttgtttgggtgtgacaatctactagaactatatatttagcggccgatttctagctctagtggcgcttcccttcgttcgcagcggaggtgtatatatatattggatataacttatgagattcgtgtattgaaatcttgatatgtttatttgtataaaatgaatggtacttcattttatgtatagatttgagatttgtgagatcttttcgtattattgttttggtttgaatagatttgggttggttttttttaggttgcgtcactacatagtctatgcaaaatgcgattcacaacttagcatatagtttgcgtcggttctcaagacacgtttatatttctatttataactgacacaaaaaaattattatttatgtttaggattattacgtcaataactggcgcacatctctcatatgtcacttgaaaaaacaacataaataatcttttttctagtagtaaattaagccaaaaaagacacatagtacacatatgagaattacattaacatgtctactcccattagacaaaaaaaaaaaaactcattagaaaaaacagacacacaaagttgaaaacttcttatttatcgaagttataagatatatacttcatgtaacttactctaatgcttttattgtgttttaacattaccatataaacttgagtagtaaagtgactctcattttattacgtaatgaaataaaatgatatattttctatttttgtccaacgtgggcgagtgagcttttttatttttcttaaacaatacggctttatttccaccattgaaagatcgatggaggaggatcatttaattctcaagttttagttctgtccaaccaatgaataagacattgcaacacgtattaaataattaaagtaccacttttgggttcacatccaatatccaaattacaattctaacttctccattgttaaaatacatcctaccaacatagagaaagaataataaaacagtcactcctacctatatatactgcaatcacactatttttctatacagttttgatattaattaaattaaaaagtcaaataacaagaaactaattaccaataactataacaaaaattatttcgcagctgaaagataaacccatactagttggaaatgagacgcaatctattatattcttggaatacttaaaagtaggtcaaatataatgctaaaacacaatacctactattcttttacatgttaatagttaaaatattaacattcttgtaattaaatatcggatcctataattttatgtaataattttttaaaaaatatgactaaccaccaatacaaagtgacacgtttaaaaaatgctagatactactgatacctaataataaagctctatttttaaagcagcttatttgtaccgcaggtccctaaactatataaattttagtacgttagtccctaaactttattttttgacaaattggtctccaaactatataaattttgacaaattgatccttaaacttttatttttttaacaaattgatccccaaacttttatttttttaaatacataaagtcttcacttttaaatattagtattttatttatttatttagttttatattaattttaaatatttttatattgatataccttatcaaattaaaaaaaaattatttatatgtatttttttttaaatatgcacctaaataagaagaaaaaaaaaacaaatcaagaaatatttttttgtaaatatgccgaaataagaagaaaaatatgtattttcatttatatatatattttttaaatcaaattaagatatattttgaacatcacaaaactatatataaatgtgaactaaaaatttatctttttacgaataacacttgtttacccaaattttaatgacgatgatgtgtcaagagtagccacacgtggcacgaatatactaagattgaattaataaagaatatgtaaagtcatgactgttggggtgaccgttaatcatgaagggtagtcatgaccgttagaatagaagtcagacggtcacctttacccctagcttgagtaaggtgagcatctcccaagaaggaaaaacgatagactaacaccttcataagtgggatgaataatcaccacacacctacagaccaagttagtctaggggatagatgacactacccctaccatagacataaggacattctcaaaggtagatgagaacatccacacaacactatgactacccacaacatatatggggtctcaggggtcaccctaagatgacaattgacgcccccctcaggttgggtctcgggggtgtcacccccaagtgttagctcctatccctgaaggtggtcaacgatcatgtcacacttagggaggaccctcatcatcaatgactatttcaaatgttcaaatcccacaaaaggcccaaagatagttctcaacctacgaaaatagcgggatagtatcataaaaaaaacacatttcaatcaccttcgaaaattaaggaaaacggttgagatagctccgcgttggtcgcgtctcctgaagcaagaagcaccgaccatttttcctatataaggggtcatccatgac

SEQ ID NO: 26375 - DNA, 3069 bp, Cannabis sativa
agagaatggaaattagaaaagtgggtaatggggttgagaaaatggagaagaaggaaaaggagtttttataaagggtgtgtgagagaagtgtgggggaggatacaactacccgaacgaacttttaatggttaagctattgagagaaagaggcattcaattttcgccaactggaaactagcacctcttaccttgtaatttttctagttcacatttctcacggaaatcccttagttgacctaattttataccattattttccgttttgccacttttatattataaaaaatatctatataagtacttatatgtttatgatcaagctttttttgtttcttttttaacaaagtttatatgctgtttattttgacaacttgtgcttatgttttttttttttctgacaagttatatatttatgttttttatttcgtcaaatctctggctatgtattttgtttggagagtttcattatatctataaatgttggagcattggcactaatttaaatggaaatactaaaaggcttgcttaatacctcttagtgtcaatagtccaatttagcatggaatctcatataatttattacaataacttttaaaaattatgactagctattcataaaataacccatcaaaaattagtgtaataaaaatactctaatttaaaatactcaacgatatgatgtgttgttaataattagcgtctgaattaaattacactgataactctttatcacattttatgatatataacaaggttcccttagcgcagttaattagcattaatgattaaatttagatttaaacttgacttgatatatatgaactttcaaacaacaatatactagaaaaacaaggatgggaaaatatacaaaccttatatagtatatacacaaataggctatatactctcaactatttaatacttatgtaacactatcaattaattaacataatttgaattatgtgtcatcactgatcggaaggttgtaaaccgaagatagtaatatgaaggctccataatatacatacataaatatatatatgatgtatgaatgggaattggccgtggggaaagagtggagctagcttaggttggtagggtaataagagtagtctaaatttagactattacggaagcatatatatatattgatttggtacacctatatcaaacaaagcaaaaggctgtgaatagttatattatatatatgtggatataaagatatacatatttatgtatatatttattatatatagtaagatgatgttggtgaactacgtatctaaaccatagccaagttcgtttttttaatccttgtcatcttgcagtataattttttttctcctgaaaaataaaatgaattgtgatgacgtagaggatatcgtgcaacattcaacatattgaaacgcattaatttaggttaagtttggtgttttgtattacttatttgttttaagtagttctcaatagatattaaagttaattttgagggacagactaggcctcaatttgatgaaagatttagggtgaagttattaactaagcctttccttttataaaaattaaaaataaatattaattaagttttgataccatattaattttattcttctatttatatataataaataattttttacacgtaactcactccatgaaattatagagcatctttaatggtaaaattttagagcatgcttagtgaagtggacatattatgtggcaaaatattaaaatgttataccattggagagaaaagaatatcattctagaaatttatatatggatgctatgttgtagcattgatgctattcattttttttaataaaaaattgaagctaaaaagttattgcagctaaaaattaagatatatattaaataataatgtgtgagattataattataacatttttaaagaatgttatacattggagtgtttttagaagtaagagtgccaaaaataatgtgaaagaaagataaaataaaatattttattttagatgatgtgtaaatttaacagaacgtctttccaagtatggtaagaaatccaactcaacgagcttctttgatgcctattattttagtaatttcaggttggacacgaccaatcttacccttagtaacggcttctagaagattgccacgatggtcacgagctgcacaacccacaccaaaccgaccctcatgatcaaataaggccccatcaacattaaccttaatcttatgtaacataggtgtagtccaacgcttagaatgtcgccccctatcgttcaaaggagacaaagaaagaccatttctttctttcttgagcacatatactgatcaagcatgttctttgctgatgcaacaatatgtgaagcatactaactcttctttggccaaacaaagtcattccgcgcacaccaaatagcccaactcaccatagccgcttcctccatcgatctctcaaacatgccccctgctaaacaaaaccagcaaccaattgttgtatgttttagagccgctgccaatgtccaccaggcttcgattctaggtagcctttgcaaacacacactccaccaatgtgtgatacactatttctgcagtagaattacacagggggcagacggaattaacaggcacatgacatctttgaatctgagaacatgtaggaagtatacccgaagcagctcgccagaaaaaattactaatctttggaggaatttttaatgaccaaagtgtaaagatcgcttaactttaatttagaaattagcaaataaatagggtttatttatgaaacttgtatattagttatgaattatcagtttacggagatttatttgaattcagaatgcatgttatatgtcatatatggaatttcatatttttgcatgtttgtgcccgccaacattggaacgcggcctttggctattataatcatattttagtatttttagtataacgggggaatatagtaagactttgggaatgttaggattagttgagattttagaattgaccaaaatacccctaagtgatttatgactttttggcttgagtgggggcaaaattgtctttttgccctaattt

SEQ ID NO: 26376 - DNA, 3313 bp, Cannabis sativa
ctatagacaccttattactctgaactttattttattaacaattagttcaaagtcaatgtgtctttgaccttgtagagcttatgttgttaccaaaatgcaacgcgattgatttattgtcacaacatatatctttatcaatattttaattttgcagtcatatgtgacaaaagtctcacaactaaaatctttgtaagatcaaaatcagaaatcttaatgatctctaattttttttattttttgattagtgaacatgtagtcttttattaataaaaaataaaaatataactaagtatacatgcaatgcacgaaacaataacctaatatatatatattggttaataagaaaaaaattataataaaaatctattcaaaacttgttgtgtaaaattatttaagaaaatttagttatgattgtgagaagttaaaaaaaaaaaaaaaagttgttttcatattatataagtcatatataataattgttaatatttttttaggtatattataatttttttagtaaaatcgatattatttgcttagtttagtataaatgtgtaaactctcaaaaataaacaattcaaaataatagattcaatcagtatttttgtagattaaatttgaattaatatataaattagatttgattcaaaatataaaatccgtttagtttggattaaatgcacactaaataaaatattatgaattgaagtagaccaccacaacaatgggaagagcagaaaagttttttaattatgaaaattaaattattaatttgaaatagattttctcgatcaattgaagaagagatatgagaagttaagacatggtgtcgcgaaggctttggtcttaagtttttatttttttagagctgcttgatggaggttgtaatcaagcaatgcattaattttcataagacagatagtttcactctatcataatatctcttgttcttaaaattaaaaatccttctaaggcaattgattataggctaatagtctgatgtaacacagtttataaatgcatttgatattacaaaatttgttgaagaactataagagaaagaatatatctcttagatgtgctataaaaattcacacaagcaaggcttatgacactatgagttgggattttcttgatgatcttcttatagcttataacatgcctgaaaagttaattacttgagtaatgaattgcttaagagctacctcttatttcattcttatgaatggtagagtgcaaggaaattttaaaggtgaaaaggaattgagacaaagagatctcttgtctctcttactgtttgttttaatcatgaaatatctcactaggagacttcagctggctgcctatcaattaggggtgtacgtcgatcggtttagtcggttaatggtacattttattcaacccaatgtaaagattgggttataaaaatctaagtgcagcacacccaattaagaaaaaagaaaatagtaacacgcccaatgaaattggtcggtttggtcaaattaacccgtccaaactaaccactaattttttatcaatttttttttacattcaattgttatattttagttaattgtaataatgagacaaatatatagattgaatttaaacttcaaattaaccacaaaaaaatatattagtttcaactttatattttttttaaaaaaataatcatataaattatatgatatgtaaatacatatatataaaaaatttacaaatatatatataaaaaaaaaaaaaaaaaccctcttaatcaggttgttcgggttagttcgagttgattcagcgggttggtattatttttaacccgtccaatataaagattgggcgcgttatattctcgtcgagttttttggtttatatatttcgtcaggttatcttagtttggtttggacagattatttaatttgggcggtttacaaaagtttatgtacagccctactatcaatctccctacaagtttcaccttatgtgtaaagggttaaaactccttaacttttactttgcagatgatttaattttgtttagcaaaggttcaaaggagttagttctggttcttaagggcattcttgatgaattcagctctactacaggtctcttcatcaatactcgcaagtctcagatttattttggaggtgttaaattaaatgagaagtaaactattctgagtgactttcaattattgaaggcatttttcctctcaagtatttgggagtgcctttaagacctaccaaatagaaagtagaagactgtggaattatcagcattttcaaaactaacttgttatacaatagctctttagctcaacagcagttcagatgctacaaagctatttagagctccctgaatttgtataagcaccgtttcatcctctggcaagtggcgaattctcaacttcttacccgagacaaaatggtacaatttcatgttgagctagagtctttagcttatccagtgtgtggtaatgcttctgaatctcacaagcacctttatttcgattgtactttgaaagcatggcctctagatatcattggttggagaagttgattatttgtgaagttgattaacatagctgtgttgacagtagtagtgtattgtctttgggtcaataagaataattgggttcttactaactattctaaatctgttctttttattgttaatgatgtaaagaatacagtttattacatattacaaatagttaaaaataggagattgagtaaatctgttctttttattgttaatgatgtaaaaaatattgtatttttagtaaatgtttacatttatactgtcacacggcaaaaattacatttatactgtctttgcattctttttcttttatactgtagatgctgaaaatcacatacccagtctctatcttccatacccacagacagaactactcagcaatacgagaacacctgaaaacaataattaattccagtaagatggaacaaaaatagaaaaattgacatcaaataaataatcatggcaaaacaacactaaaacaagttaaaaaacaaaagaaaaaaggatcgaaaaaaagctaaccatcctctgcagaacctcaatactagatataatatcggctatatttgcaagcccactcctggaaaattagagtaaaaaaactactaaaacaacacaaaaacaaatgtaaaacaataaagcagatataaccacttaaaaaaatatatataaaagaaccacaccccttaaaaaaaatttgccaatgagcttgtcaaatgtatttataggagaatcagaataaaaaaaaaacacaaaaacagtcatacagaaggaagaagaaatatat

SEQ ID NO: 26377 - DNA, 2210 bp, Cannabis sativa
  modified_base (48)..(50): a, c, t, g, unknown or other
ttacaaaatttaaataagttaatatttaaatgttcctcatgaccaaannnttccatgcttaatcttatgataggtaagaaaaataagcactaaaaaaatcacaaaaaaattgtgccataatactaaaattaataaccaaaatatgaataaaattcatgaattagtatcgtgcatacaaataaatgatagagaactaaaaataaaataaaatggtaaaaaagagcccaaaattgagctatgcacgcgcccccgcgcgcttgttttttttaactattcgtatgagatgtcgttttggaaaaatgacatgttgtttggtggaagaacgccatgcaatagagtcgtaaatgacccgtcgttcgtgctgcaaggggggttgaaccaagtgcgaaccacatatcgtttttgcccaacaaaggcaaaacaacatgtcatttttttccgtccctgtcacccaaaaaaattccccacgagtccgcgagtctacaactcggatcgacgcgacccgtttcgtgacccaatcagatagaccatctccaaccataaaatctaatgcgtttgagggattttattccattttcaaccctctatcactatccaatacccatttaattcaaaaaaatatatatataaaataaaagtcaaagtactataaacccgaaatgagtttgcctccattaataaactcaacaaaaaacttggattctcacaataaaactatacaataatcatccgaagaacaagataaactaattctaaaacatttaatctcatattacccattaacatattaattcgaaacaaattagatttaaaatgggttaagttcaaatattatgaagctctaaaatcaaatatattagctctgataccaattgttaaatatcacagattatgagcattaaatcacatatattatacactattcatcattactcataattataaatccaagatcaatattttatttagagcatccaaaaagataaacacacacatacctcatattgatgatccatctatgtgagccattttgattctaagaatctcaaataatgatcaacataaacacaagattagagtaatattagagagaagcacaatgtgtagctatcccctcttttcttcttattaccattaacccaaaccttattcacttaagacatatatacatatatatgtcacactcttctaaccctaaggggttatacactaattgggcttaagtggtttaataatggtatactataattttatgagtcaattatagtttttaaaggtgctctcatgtgcctctaacataatatatataattattaacaatctcattatggttgttgacaaatattgggcacatagttaatgattgtgtttatggtattaagtctatgattatattagtccacaataataattttaacagtttgcagttttgaatttaataatcgcggttcaaaccgcaccgcataatatattacaaaaatactaatttttatattatgatttattttttcatgtatcaacaactcatatgtttacaaactccaaatcatacaattaaatttaaggaacatacatataaattattctcatttttttttttttttatcttttttaactttttttattgttaacatattattattgatatataatatgtaatataaatgtatattatataaaatttagataattcaatacaataacttaattagtatatatgttatgacgttaaaaatttgatgaaataacttttttcttatttaattattgaaactttattagactaatttttaatttttattttaggctatgtttggtaggagagagagagggtaagatggatggagaggttagagaggatggggagtaagagggataaagaggattgttaatctcctttgtattgtttagtattaggtgtgaggtgggaaggatgtagaaacaattgattagtgaaattacaaaattgttcttttaaaaataatattttattattttttaagagtaattattgtattttgcaaaatatattttatctttttctacaatccttttaaattttgagggattaaattttgaagtttggagggagaatgtcttcctccttctctccctcttgccaaacaaataatttagtctctccttccatcactttccctccacccctctccatcatctccccctcttaccaaactgttggaaattatttt

SEQ ID NO: 26378 - DNA, 2949 bp, Cannabis sativa
gagttttttgtccacgttttattaatgaaacttaacagttaatttatcggtttaataaaatttttatttttatgaattaaaagaacataattctgtaatatttttttactataaacaatcttacttttagtcacaataaaaaaatttgtgactaaaaaaaattgtaattataatatgttgtgactaaatatgtttttaatgtgactaaaattaaactagttacaagttgtatctaaatactatgttttagttgtaagtaagttttgttgtgactagaagtactcacaaaaaaattatattgtaactaaaaaattgtcactaaaatagttgttttttgtagtattttttttcacaaaatatccaattaatatttactaataattttttttagacagttaatatatattttttttaattttatgtttatcttaattaatatatagttaattaatgattatttttcattatatggatacatggtttaccatataataatgcgttttttttttaaaaaaaataataataattattcggtctaatcgaaaaggttatattaataaacttttttatgttttattaggtcccaaatttaactctagatttttggttttgtcgttaacattttctaggtatgggtaataattaattaatgaaactctcgatgattttgttttgttcttttcacaaaaattaaaatattaattaattatagttttcctcaaaaaaaaaaaaaaattaattatagttagtgaaaataacaaggaataatttgaaaaactatgtgtaataatatatcatattgttttacaaatatttaatttctatattgctttcaactgtttttatttttactttatatatatgtcatcaaaacatatatatactaattaataatatttaatgtatatatgttataattatttgtcaaaattgattattatgtatatagttatttcaaataaaaattagtgtgactattattaattaccttatataattaaaataattataagtcacttgcccgattaattaatttaaaaaaacattgatctcaattaatgtcatggcacattctctatagctagttatagttttattttagagaattgctaaaaggtatcagtagtgtcatatcgttattggtgtaattaattgtattatattttaaataacttaagaaaataatttttaaggaatatcgctaatcaatcgtgagacgccacatataaaaggtatctggtactcaataacaatgctctttatcttaagaggcattacaaaatatcttttttttagtcacaataaaatttgtgacaaaatataaaaatgttgtgactaaatataaatcattattcttatgttgtgattaaatggtttgtggctaaatgtattaattaattacaaaaatcacaatttattttaattaaaaatgtatttttagtcacaatacttattgtgactaaaactaataattagtgacaacttgtatttaaatactacattttagtcacaagtaagtttttgttatgactaatagttacatttagttacaaaaaatttactttattactaaaaaagtaattttttgtaatgttatttgagatctgatattttattacaccaataataatataacaacgaagatatcatattaaatatcattagtaacttttaatatttcttgatagataatccctacaaagtacaaattatcagctcgatcaacgcaggtaataactattaactatacttaattaatgtaaataaatggttaaaaatgtaggtgtagttttggatgcacgtggttaaaacttttataaattaacctttcaaaaaagaaattataataataataataatttataatttaactaatcacatttatatataggatttcaacttggtcggcaaaatgagaatgtgacaccatagaaattaagcaaaatatagattaataataatatatactatctatgtaattaattaattaacacgtgttttaatttactcttcttgccaagtaataacgacccatcttcctttgataaagactacactactttgtccctaccttacttatatatcactttaattcattcccatattatatattatagggtaagtgtatatagtattttcaaggttgttttgtttgggtaaattatttatctgtttcggtacatagaaaaaatataattattgtatatgttatatagttatttaagaatatctataaatttttaaaaaattttgaatagtttataatattaatttttttatatatattttattgtacacacgattatttttcttatatgcatgcattggaaactattcaataatagttaaaacgtatgatcgattatgaaaaaaataaactaaaaataattttttagatgctgaaacaccctttaaagaatatattattataataattattattataattattttaaactctacttttgtaaattgtatataaaaaaatttaaaataaaataaataaaatatcgactataattataatataaattatcatataaataaaaattaaattataatttctcaaaaaatatcaaaaaagaaacatatataattctctaataataaagataaaattatatagttggtctctataatatataaatcatatatacacataaatatttatatatatatatatagagagagagtttggtttggtttggagctactagtgtaagtaaaaaccaaagttttggtctcctcaagggttaaaaacatcaagtggttcatgcatatatacaacaaaattttgtagcaattaattggtcagctatcacctagctcaacttatataaaagaaattaaagtgaatctagacaaaggaatattatgtgggacattataaaaaacaaatacatatatatttatatgatagtgacattgatttattatttgtaaaaaaaa

SEQ ID NO: 26379 - DNA, 3290 bp, Cannabis sativa
  modified_base (404)..(415): a, c, t, g, unknown or other
ggcggatgtttagtggggaaggttgtggatggtgattttaaggttattggaattgattcacttcgagttgttgatgcttcaacttttaccatatctcctgggactaaccctcaagccacattaatgatgatgggtcggtaagtcaaatatatatttttttagtatcgtcattgagtatcagtagtctctaacacctttagacatgtctctttgcgattagctagcgatacttcttattaaaagttattacattaaactatataagactcgatacttaattaaaccaatagccataattacacataagagggagctaggcaccaatagtacattttagcatttatcattttttttaccacatattaaatatataaggacacgattttgtcccgtgatgtactttnnnnnnnnnnnntccgtgatgtacgacagccgttaaataggggagttatttgatctgagagctgggattgatctaggagtaattagagttaaaaaaaaacgtaccctgagacccattattacgtaccctaggacccatctaatgtatcagggaatacattccgtgaaagtacatcaccggacaaaatcgtgtccctaaatataaatttatagcttttaatttgttattaaattaattgtggcttaataagagtagtagctaataaggttttttggttttattaatgcagttatcttggagtgaaaatgttaagagaaagaacacagcaaaactaaaaatctctaatcatttgggttaatttgtgtatgtgaatgtaattgggttaatttggttggggtatgtagacagccgttggatgcttatttaagttgttaataaaaaatatatcgttatatgctatttcatttattatgttaacaatttttatcaaattattaattagatagctaatggtgattaatttcttttagttttcttgtaaagatgagactcttatactgtttggttatatatataggcgattgggtaaacctagtttctacaccctgccaaacacatttattatagtttatcatgttgatggacatattaggctgtttaacaatttacatatgagtgcttagttaattatcaagtcaacgtgtattattttaattttaaaaattatgtatttttaataaattatattaaactataagttaattaatgattaaagtagttacataaaactaaattaaaaagtgttgacatggtactgatgacaattatatatctagttaaaacagttatgtcattttttaatttgtcacgtgtaaaatttgacagaaagattatttgcaacactgtaaatagtttaaggaccactttatcagattgaaaaattcagaaaacacaaataatacataaatcataatttatttaacaagataaaaattctaaatatgcttagttaattagtcacatcaggtgaaaaaaaaaactcatttatattctcaaagtggaatataaatgcaatattttcacccattgagaaattatgattaggattaccaagtggttataattttttttttttttttttgaaagttagagcaattataaaatttggttttgagtcttcttttttttttgaattggagtatatatttcatcgaagaatattgaattatttttttggttactttaaataattgttgaaatttataaagaaatgatgatgagattttaaacaatatatcacacaatataaataattttatagcacacattttcgtggaatcaagatctccggttaaaaaaaataaaaaaagtagtgtcccatatatagtgtatcaaatcaatctaattctaatacatcaattaacttaatttatattaaatatgctaattaattttgttcattgatcagttaaatatttatccttttaataaataaaaaaattaattaattttttaaacttaaattgatttaacacatatgacatcactttttcatcttaatcggattccacctttgtgctatggtgaccacttttcttaattatctttgtcctctctctccaattaaattgcttcctaatataaatagctaattaattaaagcctatataatagacataaaatcatgactatttgaaatccaatattactaaatcataattaatttaaagttagcaaattcctatttcttattctaaaacattaagtacgttgagtttagtcagggataatgaaaaatgaaagaaattaaattttattctattctcttatttagtttcattttaattaagtatgataatttttgatggaatgatgacagatctgttaagggaacaaaatgttgagctgtcatgttagttagttttcggttatgtttgttatatttcagttgtaactaattcagttcatccttctctttgttgatttgtatataaggcatgtaatactcttttattaagatgaataagattgctgcttctttcttcatgttctttctctcttctttctctttcattgtcgtttacatgatatcagagctttttctttggcaactatatggaggttctttcagataatggcaatggaggttcgtctcaaacacagctggtaaacgttaatactactctccctaaaacctcgatcccatgtaacttttagtcactctctctcagtccgtttagatgagcacaactaccttccatggaaacaccaagtgtttgtctccattaaaggaagcaagttgcagagatttcgtgaaccagatcgcactcctcaatttctccctgaagaagataaagcagtcaatcgtgtaagtgcagagtacagagattgggatcagcaagacagcatcttggtctcctggcttctgtcatcaatgtcggagaagattctaacaagaattgtagggtgtgaaacagctgctcagatctggagcactctcaaagtgtatgtcacaactctaaatcatccaaacattggccaatatcgaaccttgcttcgtaacacaaagatgcaaaactctcttggcgattttcttcccaagatcaaatggattgttgacattctttcttccattgaacaccaaatgacacctcaagatcacattgaagccatcttcaatggtcttcccagtgattatgatgttttcatcacctctgtaaacacaagattggatgtctattatgtagctaaaatcgaagctctcttgatgactcaagaagttcgattggagaaaggatccaaggaattggacatcaacaaaccagaagccaatctggcacagaccaaaccataccatggtagtcgaggtactttttcttctccccat

SEQ ID NO: 26380 - DNA, 3825 bp, Cannabis sativa
ttaaaaaatcctgtgttctttattgtttactgatttttgctatgtcttaattacattcgtaatcgcttattaattgactcactgtcgttggctaaaagcgaggtcaagattagacaactctcttctcttttcttcgtaactttaaaattcactatctaattcactctcacaatattgtttaaaggtaatttgagtatcatcccacactattcaagttgatactcaggcctttgtggaagaatttgatgaacacaatcaaaggaggatgagattcaagttcagatcttgagtatactctgctacagacaggagtcaagagttagagatctgaacagaatgagtcataatgttacgctacaaccaatgcaaagttttttataactcttatgtgcttaattcattgttttagtaatttccatataaggatgttagattagttataatacaacacacataaatagtaaattaagatcttggtgaaaatttttccaacagtatcatattttcgacaaaagttccttttaatctttaactgatcaaactcattaattattgtatatttatatttgtgtcaacattttaattagcaaatatacatctatataatacaatcaaaacttctttttttttttttgtctagtattttccaatagttacatacttaatttaagaagtactagatgaagaaaataaattagtagttaagaatatctctttctatagttgtgattggagattgatctggtccatctatggatggttttataacagtaataaagaagatattatataaaatggtgagaaggatgagaagaccggctgtatatgcaagaaatgagcttgaaaactcactcactacttctacttcactatcttgatcatattcttctcttgttgtaagcttcacatcagaggctgcaaagcattatagtttataattattccactaactatatcatgtatacaaaaaaacatatatattcttggaatttttttttatttttcctataaaatttttcattgatagcattgaagttttatgtgtatatataaatcatcaatttatataaaggaaaacatattagaggccagatagaaatttgtatgaacgatttcttctaatcttctactctcttttttctaatttaattaactttttattctatttttctcatttaattaggtctatgataatagtttcaatacatggagatttatcaatgattgcgtatattttattagaattttaataaatttagtttattttatatatttgtagatgttgagaaatattttttttttttttttttctaaaaatctaacatggataaaaaaaaactacatgattagtatacttctaattatataaataaagtattcatatactcactttgatttgttaaaatatatgggtaattgataacatggtcttgctcaattacttataattttttattaatttatttggagttatcaaaacaaatttatatatttatctaatatatctatatttttataagccaataaatttgaggcatgatttctgtattttattttttctaaatcttttattcattttatcttttatgttatgtttgatatacttaaaaaaaattacacataacaataaagtatacctaataatagaataaaatctaaatatatttaaattaataataagtaatcaaacttatttataataattaaaaataatatctactaataattaaatgaggcataagaaaaaaggtgataaataggaattaaaagattattctatttttatttaaaaataattaaaaaaaaatagtcaataatgatgaattataatattatttaacttatttagtaaaaatattaataatactgaattttaaaataataaaaaaagtaatcataaattaagtaaagaaagcctgaattataactacaatacattcacttttgtggagaggatattctaacgacaccacaaaataaaatataaaaattttaataaaaaatagtcaaactgtatagttttattaagtaacgaaagccagaatagtcttttaaaaataactacaacatcagtcacaaaaccattttattaaattcatgttcatttattttattataaaaacacatgtaatttttttgttaattttacgatctttgatatttgtcacaaaatcaccatctttctatatattttaaaaataaaaaattatacttataattttaatactcttaccttgtctataataacacacatcaaaatattatattttaaattatatcactcaatataagtataatatatatataaaaaaattataaaaattagacaacatcgcttgaagtgcagcttaatttcttagtgtgtgtatatatatatatatataaagaaaagtataatgagagttgagatggctttctataaagatagtattattttttttttattttatgttggttttagattttttttaatcattttctatactaatattaaattaaaacctactaattaaaatttaaaaaggaattaataatgaatgaattatagtattttaaaataaaaagtattaatatgataattacaacattatatttataatatatgtattaattatttatattctaccattaaaaataaaaattatttgtatttttatttgtttatttatgaggctattcatcatcaccaagacgctttatcatttttgacataccatatatatgtatatcttactattgctcaaagacatgaaaaatacctaaaaactatcgtatatataccagaacaatatatattttagaatttgaattatttttataagaaaaattatcataagaagtatgtcaaactattagtatgattatgattaacaaggtatgtattttttattttctattagtatttttgaatatatcatattgtgtagctcatttgtgagacattttatcatcaaaactcccaaacattcttaccatactatgaatatatatattctactattattcaatgtaagatatatgaaaaagataaaaaaaaaaaactaaaaaagagactatcttatatatatcatcatatttattttagaacttgaaggtctttagaaaattattatatgggattgggaaggaagctaagctactggtatgattatgatttataaagtgtgtattcttaatttttaattattattgttgaatatacttatttttcgtatgcattctcatgcatatatttatattatatttaggcaagagaaatgctaattacaacctcctattacaaccttttagtcaacctctacgtccaaaatcatatgccgaatattttttttcaatttttttcatagcagtattcgttatagttgcagtaccatccctgtagatttttgaaaaattccgaatagtttacagtaccgaaaatagagtttctgatattccagtttaacacgcgcgttcaaaaaacttcaaacgtatttttaacactgtaactatttgaaaattttaaaatatttatagggatgatgttgtaagcataacgaacacccccgtaaaaaaaatttgaaaaaaaatattccgacatgtatttttgggcgtggaggttgactaagagattgtaacaggaggttgacagtagcactcctcatttaggcaaccaccttacacatgtaaaataagtttcacgagaaggattaagcaatcaacttatatatatatatatatatgaaatagattttaaaattacagatctaactaggctcatcatattcaaatgcaatatcatttataaaaccttgattcctacaaagtaatgagagcattaatagt

SEQ ID NO: 26381 - DNA, 6986 bp, Cannabis sativa
catgccgggccacatgagggtcagctgcgtcaactctctgcatcgtctatttggtgcaagccatcatccttctcctggatgggtattggtgtgtattccgagcaaccgtcacggcaggaacaacaatcagaatgccaaaggcaccaaagcttggacggcccacaggaggagtgtcggtaacaccaggtcggacgatataagtccagttggacggagataacgtctccaacccttcttaagctcccaaataaatcattcatagccttctcttgcgatctattcagagtaacagtgatgttgcacctcgggttttggagtatgagaacgttcactactcacttcccaatcttcaaaacttgagttagagagtccgtcactcgaagaggacgaactggcaaaaaaaatgaggttggtcctcgtacaaaagctgaagcagatcctggttgatacagtgttcgcctctccaaaactcaccagggttcatctacaaatgacaatacacgagatgagtatttggccgagatatcaaacaaaaataggcaaatatactgaccaagtctactcaacagattaaaaagttgaaaacgtgtaaagattaagttcataacccaggagtttgaaatttttggggttaagggttaattttcacgaagctttgaatgggcaaggtgaaaatcgaacattgtgagattaaagccaaaatgtcacaaatgatgaagtcatacgatctactacagtaaaaattacagagtatcgaacctagattttctatatatctcttacaacacgtcaagaacaattgtattttctgcaatggaaacccaaaaaattgaagatacgagattaaagaagagaaagatgagaaacttactcactgtttgaagctttggtgttgttcgaatatttctgctataatcccacgacagacttgagagagaaaactcttcttgctgtgaaattgcttagtgagaaaagtggtaaaagtaactaatgaaaattttcaaccctatttataagccaatttttgaaaggggcgtaatcaattcaaaacctcagacgcttcgatttctccccaaaaaccaaatattgggaaattaaaagcaatcaagtgctaaagaagggtaaccgtcaaaagcatacaaaagaaaggcgtgtctcgaggtaaaaatcaattaaggctttaattagccaaaaactaaagagactcctagtcagaatcacatcgaatcacgaacagacttgttcaacacgtgccacccatccaaattgtaaagtcagctcaagtaaagtctacacgcagcttcggaagtctcgtacagacttgggaggcaaatgctatcccattttttgcactatgacgtggcatcacatgttggtgacatgtggacctgattccccatatctgcctaagagagatgctccgagcagcgcacaacacatacctgcacggacgatgtcttcccagccgagcagtgaacaattcgagcagcgtatcaacacttagcaattctagaatttgcatcatgaagcacaagagcaatccctataaatctgggattgtatcatagagatatagcaagctgtccacatcccacaatctatgtattctaaatatgtaatatatgttcttaccaattatagatattgtaagcaaaagagaaaccttcccgcatgtagccccataaatagtgatttattctcattggtaaaggggtcgaaagaattactttaaagagatctaagagagcatactcagagatttcattatgagagcgtcaagagaggaaacactatgttctttgttcttgagttaatgcaaatcaagaggagtaggctatcaccgaactgaacggagccgaacctctttaaaaaccgtgtgttcttttcttattagcttatatcatacctaaatcatattctttatcgcttattattagactcattgttgttggctaaaagcgaggtcaacagtcctcatatgtccaaatggaagagatcaaatgcatgtttaacaaagttgttattggatataaagggtagtttcttttattttaaaaggttacaaatgtgacattattgattcaaattaatggaaaaacgagagtcaattttttttattgaatgtattagagatgtagattgaaggatggccaaggcgtgtatcccattcgtctacattattatgtaaagaaaagaaacaactagaattaaccataagagtaaactcttgatgaggaatatagagtttcgcgagtattttagctatcccaatcaccatgttcggagaatgagcatgtattgaacaagaattattggcaaaaaaaccaaattagaactattgtaaagaaatgtagtgattgaaaaagtgtttatgttgaaagtgggaacaaacagcacattgtgaagtgtgatgtgtttgtttatttggacagttgcaatgcccttgactggtatgttagtaccattaggtaacacaaaaaatttgggaaaatcattattagaaaaatataggaaacaagatctggtggcacacatgtgatgtgtggctccactatcaatgatccaagaatgagtttgagatgaaaagtgtttaccagccatgttggatgttgtaggggcgttgcttatgtcatcacaaggagtggcttggataagttgctggctgagaagtgatataagctattggaattgggcagacaagtctacatgggttgagttgccagtggccatgtctaagctagtgctgacttagttagaatttgttttggctttttctgacttcttcttgtcaccataccctggaagaaagtcgtggataaagtagcatttatccacatagtggcctggttttgccacaattggtgcatgagggacttggtttctttgatcttgtggaggattgttggaagaggagggtcgaatagatgttcctagagaggaagaatctgaggagccaagaattcgttgcctctcttcttgaaaaattatagaaaataccctcgaaagattaggattgggttcattaagaagaatttgggcacgaactgaggcataagactcattcaaaacagtgagaaattgtaacacttggttttggttgtaatatttaagaaacaatttcatggcaccacatgtgcaagtagtattaggttgaaattttgtttactcatcccaaatggatttgagtttggtaaagtatgaagtgacggactgatcacctttctgcaagcgtgttagttgtgtttgaagttgaaagatctgaggtacattgccctcattaaatctttcttgtagatcatgccacatatttgtcgcaagatcaaaatacatgatactttgtgctatctcagaagaaatggaatggataagtcaagacattaccatgttattgcaacgaatccaagaatgaaggaggggattaccagtagctggtcgaggaggagagccgtcaatgaacgcatacttgttttttgcggtgatggccattgtaattcctcatttccaagactggtagttggcgcacaccattaaggacagtggaaaccaggactaatccaggatgatccgcgtatctaaggaaaaaaggactcgagacgtcttcatgagccaatcgattgagtggcgaataacgacgagtgtgaacaggtggttggggaatatcaacaagtagattaggagaagagtgaactggttcaagattgtcttgttcattctaggattgtggtcttgaattgggatttcgtcgaggtgcaacagagatatcaatgacaggaggtgcaaaagtggcatcagggtttgactccgattgattgtgctcagttgtggatgggggaacaccatcttgagaacgagtagaggctcacgccattgatgcagtggccaaagtttatgttgataccatatgagaaaaacagagtgctagaagaaagcttataagtgttttttttgataaatcagcaagtttattgatattccacaatcaaatacaattaaccgagcatcttttagtcaaaagatcttatgaacaaggtttttcacagcttgtgaaaccaatctctatcttgttgtcctacctttttgggccaaaacaactctattctatgtttaacactatgtttaactttctgtacaattacatcactgttttctacttgattattctacaatttgtcatttcttgcataccaaattgagtagaccaagcttgttgtagctgttgccaatacttgcttcttaaacttgctgatttttgctttgtgaatccactttatcatctgtgttaactcagtagtctgagccccctaagccagccattctttgactttcttcaaacagctgagtgaaaaaaagcagctgaagaacagatgctttgttgtctcaatctgttgtgagcaaaagctgcaatccgagacagtaacaatgtggaatttctgtagtctttccttggtttcaatctatcttgtatggaaaaccatagtataaaactatgtttaggtgtgttaaacctattccaaacttcatttctccaagtcaccctgttttgaatggggcaaagtagttcatagccgtgtgaaatcttgtacctggtttgagagaaactttgtgtgtcaaccagattgctaagttgattctttgctgccactatttgtttccaataccaactcccattgctaagagtttggtattcccaccactcttcatctttaagatacacattgtgtatccatttgacccaaagattatcttctttgttagcaagggcccacacatatttgaagagagcggctagattccattcaactatctttttaattcccgaacctccttctgttcttgattggcagaccttgtcccaagctagtaatcctgctccttgcatcatgaattggcctttccacaagaaagccctacaaatagcttcaatctcacgaattaccttctttgggagtttgagaatttggcaccaataagagtgaatagctggaagaactgaattgatgagtacagttctgcccgcaaaagagatatgtctagtgctccatgtttgaattcttgctatcatcttttcgatcaaaacattgcattcctgctttgagatttttttggtgcatataggaacaccaaggtatctgaaaggagtttgctgccttgtgaacccagaagcttctaagactcttccaatctcaaattcttccatgttgctgcagaaaatggcggatttggccttattgggctgcaatccagaagttgctgagaagagtttcaatccttgtagcaaaaggatgatactcttgaagtctcctctacaaaatagtaggacatcatctggaaagcataaatggttaagtttaagactatcacatctctcatgaaatgcaaaatccttcttgcaacccactttcttcatgattcttgtcaaatatttcatgccaatgacaaaaaggagaggggatagtgggtctccttgtcttattcctctctttgattcaaaaaatccatggagggatccattgaaaaaaagagagaattttggtgttctgatacaattcattatgagggaaatgaattgatcaggaaaaagtaagcccctcagaacttcttcaaggaaatcccagtcaatggtgtcataagctttttgaaaatcaagtttgattagccttttttgagttcctcccatagtgtctaaccaagtcttgacaaatcatgatgttgtgcgcgataaatcttccttggacaaatcctccctgattttgagccacaatgtcaggaaggatatgctttaatctggagcaaatcacctttgttgcagctttatagattacattacaatgtgtaattggtctataatcaccaggattattggggcatctgactttggggatgatagtgagagttgtgcaattgattttctttaagatcctcccagaatgaagaaaggacctcactacattgcaaatatcctctccaactaaattccaattatcttggaataaatagctagagtagccatccgggcctggtgcttttgttccaggtatgtcaaacacagctttttttatctcttcatctgtgataggttgtaacaagctttccctttgttggatagaaactattggtccactatttatcacacctgctatgactctctttctatttggcgtacttgtgccaagtagttatttgtaatagtctaagaagatcttagatattctgcttggctcattaactctgttcccttgagaatccagtatggagaggattctatttttgttgtttctggctttgacactcgcgtgaaaaagtgttgtgttgtcatctccctccttggcccaattgattttagctttttggtgtaggaaagattgatacttcttgtgagcttgaataaaactattcatggcttcagcttctgcaatttgcacttcctggtttagtggctccaaagtgagtttgttttggcaagtattaagtacctcctgtgattgaattgttgttgcctgtaggtatgtgaacccttcttggttaattttctttaaaacaggttttagagctttaagtttggcaactacttgatacatctcagtgccacggatatcctgcttccaaatactgctcacctgatgtgcataatcaggatgtgaattccacatcctgaaatatctaaaaggctttttccccatctgtgctagttgatgaaatgaaaggagggctggtgaatgatcaaacatcccctcgttcataaaaattggctcagcaccaggaaacatgtctaaccattttaagttagccattatcctatccagctttgagtatattcgatcccttccttgttgtttgttgcaccaggtaaaaaatttcccactacttttaatatcttctagatgacagcaagaaacacaatctctgaacagctgggattgatgttctttaacccgatccccaaatctttcctcttgattcagtatatcattaaaatctcccaatac

SEQ ID NO: 26382 - DNA, 1317 bp, Cannabis sativa
atattttactagtatgtatatatatatataacttaaatgctacgaaaggcataaacttctatcgtttaaagttgtatattaaaaaaaaaatccaatagtattgtacacgtttccattgcactgtggacggaattttttttttctatcctcgaactgttctaaaaatgagttactccattatttttgttttctttaaaaaaaaaaggaagaagaagaacctgattcaacaagggaaaaaaaactctatcaaatcaccttttatttattttctttcatgctattctgtataatattctttttctactgtgttttaattcttactttttttaataaaattagaaagagaccttcaaagcatcggaaagaaaaagtgaaagaaacgaaaatgctactttattaacatttatatatataattcttcaaaaggtgataaaaattgggctcctttgactcattaataaattagctatatttatagagatccagattcctttattaaagaaattccatctatcaactttgttttatttcttttcctattgcgaactgatcagagcaagtacttgggggaccacaaaaaagtccacaatttcgattgctgaaaagaaagcaacaaagttaaataaataatcatcaagtccattgaaaacagaaaagatggcttttaaacaaaaggctttagtaccattacaagcattagcatccataactttatgcatctattggcctttaaagtgttttccataaagctcgataaatgatctggctattaattttatgattgtatcacaaagacgcacacattatacaaaatagaatgcatcacttgcaaggaggcaaaatagcttagtggtggaatctgattggacaatagaaatgattacaatgtgtatagttcatcttcattattaaagctattgtatacttattttctttttaaatgattaatatgagatcaagttccatgcttagtaatattagtgtctatgagtaattaagtacgtataccacaaataattatagttaatttaatttatgtatacattaataatttgggcaaaaatctagacacgttttaatgaaattggtttgtatttatttttttagcaacaaatacgttctttttagctactatgagatgaagctatatagttagatcaatggatagggagattctattaatttaagttactgatcatacttttgtttttgttttttgcttaaagctactgattatacttggtgattataattcttcaaataacacctttcatataacaaaagttgatacggatatatcgatctatgcaatgctgt

SEQ ID NO: 26383 - DNA, 10886 bp, Cannabis sativa
  modified_base (52)..(76): a, c, t, g, unknown or other
  modified_base (222)..(222): a, c, t, g, unknown or other
tatattttttaaaatgacaaaaataggactgagctcaatttttaacaatttnnnnnnnnnnnnnnnnnnnnnnnnngataatttctaacacgaacagatgtagaaaatataattaattttgtcacaacatctctacatcagattattattaagttttactttgataaaaaatcagttcagggtcctatttgtacaattttgaaaaatacagggtccattttntcatttaacaaaacaaatggtccaattaataacttttacaaaacacaatgtctaaaatagtatttacccttcttttaaatataatcaagttgaaagtttctagcaccaacatatcaattttagcagttggatgtaaaagtggggtaatacttaatagtatgtgaataattatgatttaaaatttggtgtttttattgttctcgctgtcaattaattaattaatttctaataaaatcaattaaaaagcacacctgttgcgtctttgagctgcactctaagtaggccatagctccaatttgcttcttcagatcttcaccctgaaacataattataaagattgttcataaaaatgagtacaaacttaatgctctatttaaaagttataaaacacaataaaacacccgaatatgtattgtcatatcatcctacaaaatgatgaatgagtctgtttgataacatgacattattattagattaaaaaatcttaatgatgaattttattcaacctctattttatatatacctgctgtgtagaaatggtatgtgctccaggataatcccttagaaattgttcgtcctccctcagatctgccataaccaaattaatgacatttctttaattaccaaacacatctttttgttgttgatgaattaggcaaacactagtatagtttttcttcttcatctaaaagtaacgttattattaagtatcccatcagtttctgtatcaaattagtctgttagtttctattttttttcgacacattagtttctactttccttattactattttcaagagtatatatatgtatagtattttatataaaaaacaatagttacaatcttttattattattaatatcattatctttatgatgaaagaatatataagcaacaagtggtgtcttatgatacattttgcttgtctcttttcctagggagttttggaggctatttgattatgttttcagtttttaacttttagaattgtatttttaaaagtgagaatagaaaacagtttttatcattttaaaattttaattgtgtttggctaaggctttttaaaactatttttagattttttttactaataaaaagaaatttgatattctacaccataccatgacatgaacctatcctaccccagatcgaaccccagaactcggcttgaacgcagacatggacccagacctagacctagacatggacctggacctgagtctgggggtttgcgtctggattccggtccagggtcaaggtcagggtctgggttcgagcccgaatttgggtctgggttcgggtccgagttcgggttcagttttgagttttgttctgggtctggtataggctcagactagggtccgcgtttgggtctggggttcgggtccgggtcttggtccggttccgggtctaagttcagggttcgggtctgagtctaggtttggggtctggggtttggatctggggtctgggtcttggtccagggttcgggtccatgtcttggtcctagtccaggtctgggtctgggtctgcgttcgggtccgtgttcgggtctaggtctgagtttgcgtctgggaacaaggtctagggtttgggtccgcgctcgcgtttggggtcggggtcaggatccaagtatgtgagcaaaaatataaaatataatatgttagacaaaaaatatatatttttgaaaatagaaaataatattttaatgtaatttgttttcttgtttttaagaaattatttttaaaaaatttggccagacgatatctattagtttttaaaagttattttctatttttaaaaactaaaaaaagtttttaagttatgatgctaaatagccccttggtgttttcgttcttttgttttcttgcttttctgttcatttgtttcttgtcgcttttgtttgttagtctgatctgtgttggtaagtctggagttggggagttcttctgttaatgatcatgtggagagttgggatgatatttgattgaagacgaggatgatgaggtttttgtactaggaggagctgacaaggatgaggaaatctttgatacaaggtggtatctagtgggacgtttgcttataggaagggtttcaaatttaatgtgtttcagaatgtgatgactttgttatggtaggtagggcaagatatgttcgtaaaggaattaaaccataacttgttccttttccaattctatcatgaaattgatatctctagtgtaattgaggggagtccttggactttcgattgtatgcatctaattttgcaacgcttgaaagagggagagaaaccgtaggatgcaaagttgaatatgatggatttattggtttaagtgcatgacttacaattggggtcacgatccgatagggtgctgcaagccactgcaaactatattagttcgtatgttgaatctgattgaaagaacattaaaggggtgtggcacaattatccttgggttcgagtatccattgatgtgaataaacctttaaagcggaggatgagattaaagagggaaggtggtgaaactttctaggaaaacttcaaataggagaaggtccataccttctgttttatttgtggtatcatgggtaatccggagaagaagtgtcctcaaatttatactactccaagtcatttgttggtgcactcatatggaaattttatacgtgctacatcgcagagaccttctaatatgatatgggctaggtggctacgtttagcgccagcggtgttgagggagagtagcgggggtggtcagggtagtagagtggctctaaacatggaagggacggtggtaccagctagggtaagtgctaaaaacgtgagatattttaaaagtattgtaagaaataaagagaagatcgtggttgtcagtgatttgaatttgaatggaaaatctaatacttttaatgctagcgtgaatataatggagatgttttaggtgatttttttgagataaataaggaaataatctcatcacaggagggagatattgatttagtggagatgaaaaaaaaattagttggcgaaaaagatggcaggtcaaacatagccaatggtgaagtaatgaacctcgatactattaggctctgaaaaaatgttcttggggcgagacctatggagcaggcccaccggacgcaatgagtacgttaagtaggaattttcgtgggcttgggaacctatagttggcccaattccttatggatctcattacccaaaagaaatccaattttattttttcacgtgaaactatttgtagtaaagaagttgtggaaagtttagggcacgtattggttataagaggctttttttttgttgacgctcaaggtcatagtggtggcattgcaaagttttggaaagctgctgatgaagctaagttacttggttattcaaaaaaccacattgatgtggttgtctcaattgggagaatggcaatttggaggttaacaggcttatatggtgagcagaataagagattttgacataataattggaacttggttcatactctaaagaatcattcttctcttccttggtgtattattggccatctgaataatgtggagagcaatgacaaaaagagaggggggagggcgtatcctaacctattgctggatggtttcaaggcaggttaaatgactgtggtttgcttaattttgagcttagtgggtatccttttacatgggaacatggacgatgcactagtgcatggtttgaggctcatcttaataaagctcttattacgcaatcttggctcaatatttttaagaaagctcatcttgttaatcttgagttgtctgcatcaaatcattttctaatttttttggaactgttcctttaggtatttattccctctatcaagcaatctaaatttgaatactcttggttatgggagcccatatgtgagcaactggtgaaaagtgtttgggagggtaatattgaggctatttttttgagaaaatttctaagtgtggggcgatattggctatttggggaaagaatatcattggctattttaaggagcgactaatgcaaagtaagagaaggttaaagaagttttgttataaaactgatgttattcccaaaagttgtatgaggaagatcagcataatttttatgagattttgactcaaaaggaagtttttttggaaacaacgggctaaccaattttggttgaaagatggtgataaaaatagtcattattttcatgcggtggctagtgcttgtaaatagaaaaatcatatttccaagtttcaagatgatagtggagcttggttcacttaggatgatggtctctctcaattaataaaagactattttcagaatctttttactgcttctggcgtcgagtggggcaatcttcttgatgatattcaatattcggtctctgtagctcaaaataatgatttggttcgacatgttttggttgaggatgttcgttcggcattatttcaaatgcatcccgataaggcttcgggccctgatggaatgaatttgggcttttattagaaattatggcacattgtgggggaaaacgatgtggagttggcccaataagttttctcttcgagtgatttccacattcgtattaatgatattaatattatttgtattctaaaaaataagaatcatgtgaacatgggtgacttaaggcctatttcctttgtaattttgtctacaagattgcttctaaggttctagacaacctgttcaaagtggtgttgccaaaggtgatttttgatactcaaagtgcctttattccaggtcgtttgatttctgataatatcatgatgtctttcgagattatgcactatttgaagtgtaaggtttttaggaaggaggggatcatgactttaaatcttgacatgagtaaaagttatgatcgggtggagtggagttatctcagaactatgcttgagaaacttggcttttcaaaacattaggtgcaattagtttctggttatttttcctcggtgaaatatcagattgttcatggtggtaatcgaattgggcctattgttccatctcatgggattaggcaaggagattctctatctccttatttgtttttaatttttgctaaaggcttttcgacgtaaattcaaaaatatgagtggaatcaacttatcaaggggtgtcgtgtggctaggggtgctccttgaatttctcatatgctatttgtcaacgatagcttcctttttgtccaagctaatttgggtggggctcaaagggtgatggagattctctatagttttgagaagatgtcaggacacaagattagtttgactaaatctaccactttctttagtaaaaatgttagcggtgctactcaagaggttgtttgtgttattatgtatataaattaagttgatgagagtaacatgtatttgggtcttcctagcacaattggaagaaataaatctattgttttgggtttttttgaaagagaagatgagaaatcgtatacaaagttgggatggtaaacttttgcctcgtgttggtaaggaggttttagtttgaaatgtggctcaaagtcttccaacatattccacggctgtcttctttttacctttggggacgtgtcatgatcttgagtagcttatgactaatttttggtggaaatcgtcaatgattcctatcatggtatttcttggatgagttgggagaagatgtaacgtagcaaggaagttgggggaatgggtttttgttctcttcgagactttaatcttgccatgttcggcaaacaagcttggcactttcttactaagtttgagtcattgatttttagagtgtacaaggctcgttatttcaaaatgagaactttcttcggcacaatttggtcattgatttttagagtgtacaaggctcgttatttcaaaatgagaactttcttcggcgcagtttggaaacaatccaagttatatttggagaagtctcattgttcaggagttggttcgtaagggggcaaggaaaggcattagtaatggggatagactcttttatttcatgaattgtggcttcgtaatggttaaaatctgagtctctttagcttttattcgggtttggctaatgagaaggttagtagactttttgtggtgggagagaaagtttgggatgttgattttattaaagatctatttaatgataggcaacctgtattcctggtattcctctctctaattcaatcttattataggtattgggcttttgactcttctggcgagtattcaattaagaatgcttttaaacttttactggtagcttgagatggtagtgtggatgagggtgtacagtggcattttggaagaagttttagaagttaaggcttcctccaaaggctaagaattttgtgtggaggtcgttaatgggtgcattccaactagagttcaattgaaaactaaacatgtggatgtatctttattgtattcagtttgtcatgtggcaagtgaatcaattttgcattatttggtttcttgtgattttgctcaaaattgttggcgggtgactggtctggctatggttccagttaatgcatggtcgtttggggactgattttttcacctattctcttggctgggtgaagaacaaagtggttaggtgtttatgttggcttaggctatttggttcatgcgaaataagctcttgtgaaaagttaagaaaaatcaagtggagtatgatgttgatatggctagaatcactctttaacaatggaggaaagctcaagaaagatgtttgttttcttcgtttgatacttgatatctctcgaatagggctgagctttggtcaaaattagatttcaaaaaataaggtgaatattgacgctactctaaatgataaggagggaaggcatgactttggtggggtcatttgggatcatcgaggtcgtgttgtacctgggttttaaggctgcggcaggggcgagttctgacagaaattgtaaaaatcgtggcattaaaagaagtgttgtcattccaaggtataagtactgtcggattcaactgtctggtgttggtgcaagttgtgtgtagtccaaatgtaatgaactccatttttggtggtgttgttgaggattgtaaataacttttactttcttttagtgatgtttttttaatttttgtcaaaagatctgctaattgaattgctcaccttgtggctagaaattctcgtttatacgttgattatattttttaaggatctaatctctcatttgatgttgttgttattgttgagaccgaattagtctagttgaatgaaatttctaattaaaaaaacaatactaagtttgttaagaaaaaaatggaaaggtttttcacaaatataattaataagcaattcatattataaatataataataatgttgaatgaaaagttattggatagtacttgctttcagtcactaactatagatattgttcacattatgtatatttatgttaatgggttggaaaatttgaatttttatacttaatatttttatctaattagaaaaaaaaaaattacattatatgcattgaggttgttctattcactaaaaaagattacaaaaaagaaatcggcaaaaaaaaaattgagtttaacttaaatagtttttatataaacatatttttgatatagtgtaaaaatagattttttttttatatttattttaattaagtagcaatattaagcataaaaattaaaaaatttcttctattattcattattggatcaaaattaaattatttaatatttttaaattagtatttataattaaatttatttaacaactattaatgagtaatactcattaaaaaagatgttccatatatgtatatatacatatgggagtacaataaattatttgaattaataattattttggtatctataaaattcttaaaactttttagaaaattattaaaaaaaaaaatgtaacttatccatacaaaaaaataaataaataaataaatagattttgtggcatggctttgttttattgttatttaataacttaacaaagtagtgctaaaaaaactaacttatgttcccctgctttcttatgagataaggagtgttagtgcaatcttaattttaccaaaaaaaaaaaaagaaaagtcagtccataaccataaaaaaaaacacattcatttaataataattaaaaaaaaaaaaaaaccagacagaaagacaaaagcaaatgatggataccagaacctacattagtattgtgggaagcacatgcctagtttgctttgttccttaatttttaagaatgttagtagttgctgtagcctatctaagggccaactccactcaatagagaaaagtttaagaaaaagaaatgatattgataactgaatcttttcatatttagatataaaaaaaaaaaaatatgttagtatttaggggtataaacttataataatcaaaatcattcaaagttgtaacaagttcaacttgtaaaaattaaaagagatgaattgatttaaatcacctagtttggtccccactagaataatgggcactgatggtgcataatgtctcagctctgggatccacttctccaacataattaaaaaaaaaaacataattaaaaaaaaaaaaaacaaaaaacaaaaaacaaaaaatataagaaaacatgaaaaggtcagtatactcttaccagtgtacaatcataaccattcatgaaataaatgaatggttaggattgactgtacaatcttctccaaaatatgattcttaataagaatttaagataattaaacaagagttaaataagcttactttctttgatatgttctcatagcttggcctacttataagggaaaaagcaagaagaaaaacatctgctcctctgtagctaaggggcctcagtctgttatagtcttcttgacctgagtttgttattacataataaaaaaaaataggaataaaataaatattaaaagagaaaaaaaaaagaataagctttatgcactggaaagatacatatatattttgcattttttttaagtaaaaagaaaaaatttaatggaaaatttctttctaggttgtcacatgaattatatattttcaaatatgtatatataaaatgttgttttttctttcgaagtgggaccatattattatttagattgtttttgcatatagtaatattttataccaagtttcatgatgacaacatgacaactcctctttaaggattctatgcactaaatatttattaattcaaatatatccaaaatttattttcttatattagtcacaactactttttgttgagaaaatgctttagtgaatttggatattgagaaaatgattaaaacagactaatattgagaagatgaaaaataatatatatatataaaaaccaattttatcaataaatggaaattcattgttcctaaattggccatgcatctctcttataaacttggttaatttttatgatctaataattaaaaggcatttgtacttttagttgtaagattccaaagggtgaatttttttaacctatcaataatgaactgaaaataaacaaaaccagtactaatatgttgatagaaaacataagaaactagaaatcaaatacatttgtttaattgatttatcttatatatgatgagagaaagttgaaatgagaaactaaattttaagtaacaataaaataccaaaaatctggaaaagaagtaataatattaaagaaaagagaattttcatgattataattaccagcagtatcccacaaacccagatgcactgtctttccatcaactgaaatattggcgctgaaattgtcaaaaacagttggaacataatcctgtcaagaaatatattaaaatcccatctcaaataaatgaaaaccatacataattatagatagagaaagaagaagaagaagaagaaaaaaagtttgtacagttgggaaagtgttgctagtgtaagagattagaagacaagtcttgccaacagcaccatcaccaactgtcacacatttgatgaacttagaattttttgatgatgttgttgttgttgtagtattagtagtagtagtagtattagttctactacaattctgattagccatgtgatttggaaatggaagccctcaatgtgtaaattttatgggaaagtctcggttttttctttctttattctactctctctgctagtctaacaactctgttttggggggccaaaaagactaaaacttgaagagaaagaaagaatggaagattttgattttgatttttttttggtattgaaatgattttgtttttttcttttataaaaataaaaatatatatgtataaacaaaatatttgctgggagcttttggcggggcatagataagattgtggtattagtgaaaccactttaatttgagctgtcaaagagccaaaatttatttataaataaataaaagaataaatatatataggagtcaactatagtaagagggtaatagactttttttttttttgacacttaaaaaaaattataacttaatttttaaaaaaaaaaaaattacgtaaacaacaatttttggtaaaattttacattgggtgtgtttggaagtactatgtaattactaggtagggtaattactagagtattaattacacagtttagtaattacactatattttaaaatgcacggtgtgtttggatatgaggtggta

SEQ ID NO: 26384 - DNA, 1878 bp, Cannabis sativa
aggtagtggccaagccaaccatatttctagtaagggcaaaaaaaaaattagagtactaataataaaaaatataattttaattgagaaaaatataatttttagttggataaaaaatatttaagagtaaaaataagaaatataaattttataaagataaaaataaaatacataaattttatagggacaaaataaaaaatctataaagatataaatataaaatagtaatttttggagagaaaatataaaatattcaaaaatatgattaacaaaaaatcaaggagagcaaatgaccccacatgtcccattggctcacacaacacatgcaccttgtctggtcaagtgcctatatttgcaaaataaaaatttgcagaacaatccaataatcataaaatttacaaaacagcccaaataaaaaagaagaagaatattgatgaaaggtcctgaatcgcttgtttggtaagtcttcttatattattttttatggttattgtttggtaagtcttcttatattattttttatggttatagttttatattttatttttgaaatttgtcatattttaatgttagaataatatataattgaattgctaagctttttctcgtgtctatttttgcaatggttggccataggaaaaagcaaaaatagaacctttgagagtaattggtactaatgataatgtgacttgtgggtaaagtgatgggtggggtctaccttttcttttttctttcttattagtacttattttaatattttattaagtttttaatttattgagacatattgatagcatagccaacttgttgtttttatagtaaagagcatgctccacataataaataaattattaaacacaaagatcctacaatattttaaaaaaattgagcatataaaagaggacatatattaaaattaagaaataccaaatgttatatttgtttcataatgatggattaaacaattaacaaaactattttagtgaaaattaattgtataatttctgagcaattgcgcacaaattaattaatgtaaattagttgtctcatgttataaaatgtggtaaattagaagatagaataattgtggtattgtgaattttgttatattttagaaaaatagaatgaaagttgtattggaattttctttaatttgtgacctctagttattttataatagaacaaaaaattaattagtatttttattttttaaacaaattctttattagcaaacaaaccaactacaacaaaagccaattagcttgaaaggcataagcaaatgaagggaaaaattgtccacccaaactgaatgacaccatgaagttttagctaactgagtaagaaagtgggcagctctatttttacaacaagaagaataaaagattgacacaattacatagcaaaccactgcatacaatatcatatagaatagaactccactccgaccgactagtgcaaggttaagtcaaataattggtagcttgaagacaatctgaagttagctagaacttttgaatctcaaaatggtgcagcaaatctagttccatctaaattgcaaggcattccgccatagggaccaagagaaatcagaccgggaaatagcagtagcaccaaggacgaggccttgttttgatcttattaaagctcccacaccacatctaggaagaccttccgtgatagttgcatcacaattgagaataatagtctcctcttcatcatcaaaccagtaagacttcggggtcccctgcataattatagtcgcttctgccttcataggacctacatgctgaaactcaatttgagacaggaccaaagggatccaaccaaccaacaaagcagtagaaaggtacaagtgtttcttattcctcctagaccacacca

SEQ ID NO: 26385 - DNA, 3175 bp, Cannabis sativa
  modified_base (28)..(59): a, c, t, g, unknown or other
aaaaaaattcatacattatatacatatnnnnnnnnnnnnnnnnnnnnnnnnnnnnnnnnataaaatgttatttctgatcttttatatctaccatagtccagccaatcaccatcttatgtttcttcaatacatcaagcagtaaatggtctgtatcagctcctaacacgactgaaataatcatagggagcatctcatcatctcccaaatacacatattttaagtgactaggcaagggcttcaactctaactttggtggttcttggatagaaggctttggatgcttaaagttaccttctaacaagtctaaagattcaaaaggcttgcagaatttagtaaatggttgatttgattctatccatgtaacttgggactcctcctcttcacttaaatctttaatctcctcaagtgagctcactcccaattctaattttctttgtggaatttttcaactacaagtgattcaatcaaactcaatctagagcattcatcaatatcgtacaaaaacttcattgcattgaatacattaaaagtcacttgttagtcattcaccctcatagtaagttctcaattttgcacatcaatctaaattttgtttgtaggattggtgtcccaaaaattattggcacatttctatccacctcatagtcaagaatgatgaaatcgatcgaaaaaatgaacttgttaactttcaataacacatcccaatctttccctccacatggcccatagatcgatccgccaattgtaaagtgacggtggttgacctggcttctccaattcccaattgcttaaaaattgacacagacattagattgatactagccctcaaatcacataaagctctacccacatctgttccgccaatgaagcatggaattgtaagacttcctagatctttcaactttgaaggaattttacttttcaattgcaaccctctattaaagcaaccatttcaaattcatcaagcctcctcttctttatcaaaatgtccttcaaaaatttcatatagttaagtagttgctccaaagcctccaccaagggaatgtttatctggagctgcttcaaaacatatagaagttttctgaattagtcatcttgatcctactttttaaatcattgaggaaatggcagaggtggcttgtgcaaattcttttctaccgtaggatgctcacctgatggtgtaacattttgggaaaattcaacagttgaatttttggtttttcacccttttctcttctttttttttgattgaagtggggtccttgttgccctttggtttctcctcattcacttcttgattatttccactccataaataaccgccttggaatgttctttgctatctcttcttggattctcagtgtcactaggtaaagtaccttggcacctatttttcaaatcattcaccaaatgctccaatggaatctcaatattttagagagaagcagcttgactttgaactaaaacatcattcttggccatataatctctcattaagatttcaagagaactagattgagacccttgaggagggtgaagttgttgagctcttgattgttgagaaaaccctggtggacatattggtttgccttgaacttgtgctctacttgaagtttctccttgacccgccttgaaatgtttggatgctctctccatgccggattataggagtgtttacatgggttgtaatggttgaagttttgattacccacataacaagtcaaggtgggatttgaagggaaactatcaaaagtacgtccctctctacaatagacacatgataccttggcatttgaactacaacagttggttgtacatttcccccaaagctcatattctttagaatgttattcatggaagccatttgagctgttaaagctgtcaatgcatcaacttcaagcaatcccactaactttctacttgtaggagctctagtattggacaattgatagttgttactagaaatcgtctccaaaatctcaaatgcttcattgtaagacttggaaagaatagctccattggctgaagcatacaataccatatgagtggccgaattgagcccattatagaatatctcaatttgtatgcgatgggggatatcatggtgtggaaactttctcaataactccttgaatctttccaatgtttcataaatagattcatctttcaactgttgaaaagaaataatctcactaggaaactttgcatttttggtgggagggaaatacttccttaaaaaatttttagccaagtcattccaaggggtaagcaaaataggaggaaggatattgagccatgctctagcttgatccctcaaagaaaatgaaaaaacatttaatcttagagccttgtcactcactccttgtagcttgaaggagttgatcacctccaaaaatgagcgaatatggatatgaggatctttcgttggcaacctaataaattgaccaactgtttggagcatttaaaacatgatgggcttgagctcaaattgaggtgcttgaatttccagtctcacaatacatggattgggctcgttgaacataggggcagcatattcccttattgatcttgctttatcatctgccaaagtaatgggataaacaaaattatgggcacccacaacctctccaaactggtcggcaatattgcaacattttttagccctttgttccttcctttctcttttatctaaaagtgcattcaattttgttgtcaataagagcatgttcaaactctttttgttcgttcatacaataatccttaaaaatgcatagcctaaacaagcaaggttagaaccaaaaaagcataaataaattttaagatagttaatgataaaaatttttaatttcaatccccgacaacggtgctaataacttgttgtgaaaattaatatatacaagtatacacagtcacacacgtaatataatgataattaagatcgtgtctcaatagggattgcaagtcaaatttgatgtaaaaccatcttgaaaaatggagaaatattaattggttgagtaatgcaactaaaataaaatagtggaaattaaaatatgcttaaaatatcgctacaaatgctagaaaattaactacaagaaaatgtatcaaagttatgacaaacttgaatagctaaaccccctatgtccaaactacccagttgctacaccatcacttcaga

SEQ ID NO: 26386 - DNA, 2466 bp, Cannabis sativa
catttagagacaaaatatgatccccgtccctacaggattccattcccataagaaaaatgtacatctctagatcctaaccttaagagcaaatttaatctgctcgctactagccttgtccaaaccacaagtagcctaaaaaatgcatctattctgattgcactaaataaaatggataatttcagtaacaactgcgtttataatccaaacactaaagtcttttcttggtttagaacacaagtttttccaatccttgaaagtcatttgccaatttaagtaaccaaacaatccatatacctcttaaatgatactttgggaaaaaacacaatcaaagaataaatgagaaagcggatagtccagagttcataaactcaaaaagcgactaagcaaatcaagagagagcaaattactatttagtgcttgccaaacaataaatttatatttgggaacaataaattactaatttggtgatcttcttattaaacatatttgtaagtactgctggatatttcattttaaacatattttatattatcaattaaaaaccaaatctaacactcttttgtttgattttgattttatttttttgtgttttttaggaaaatttaacataaaatttaggttaaaagtaatttctaacataaactaattcccactaaagaataaaagttatattttaatactaacataagaagaagaagaaatcattcttttaatctatactaattcaagagctattttaataatcccatttgtggcatattaatgaggagcacgaaaaagattctttgaagaaaaaaaaaattaatatacaaaaagagtatatgagagagtgattataaaaatgagaaaaaaaaaatacatttatattgtttgtttttctaagaaatcataaaacatttcattaaaaggaaaacaaaataatggtgagcacatggagactcaccttccaaaagttaaaaaatctaaattaaacctcatttggctagaacatgagctcagttattaagagatctaggctaagggtgtgtataaatttttgtaaaacgtccaatttgaataactccccaaatcaaatcgagataacccgacaaaaaatacaaatctaaaaactcaacaaaaatataacccgactaatctttaatgaaatataacccgacaaaataagagtatagaagttataaaaaattacaatgcaacatttagctccatatactatcatagacaatataatgtgcaataatctttttttttctaaatattagaggagaaaaaattcgaacttgaggcaatataaagtgcaatgtttagaaaaagaacttgacataaaaatcatatctattataaagggaaaaaaaatatgccaaacctctctactttgtaaaaggaaaaaataaataaaagcttgaactttatatattttgaatgaatatgaaggtataaaaatagagtatagaaaagtattaaataaaaggaaagtagatattctctacttcaaaattgcttacttatgtggtccaaaccaaaataggtagagtaattttatactcaaacttgaaaggaggagagtattttgagtcccacagtttatgccaaaatcaattctctctttgaagtttaattttggttagtgagtggggattgagttgactagaaaagcaactagcaccaatataattgtttaaattgatgtctcaaataatatgcaactttttaaaattatgtttttaattttttttttcaactaatatcaaatttctagaaagtcctcttgtgagggttgtgtaggtgaaggcaaatagaggagaagaaagtatcgtggagcaaggagttggcaggtgaaggctattagtaagggtgtttattggatcacaggatttggacccaaccaatttattctaattatttattggatattgaattttgtcatccgatccaatatccaattgaattaagtcattcgatctgatccgatccaataaatgtattgaattagatcggttccaaccattaaatgtattgactgactttttattgaattggattggatccatccaatctattttaactttcatttaagttgatttcattaaaaagaaaaaatatataaaaaaacacaatttaaaacttaataatccaatatacataataaacattagtttagttcaacccaattcatgatctcataataaaattgctaaaaaataatatttattcaatacacattgacaattttattagcgtttaggaagatgagaattaatattttagatttaaagtttttttcattaatctcatgtgttaaatatatattaaatcaattaatatatatatattttaaattggacgtcagggctggggctgcaacgatcaacagctggttgttgggaattttcaccagggggtacgaagttgaaatggaggaagcaacgatggtgagttggactatttggcgtgcgcagaatgact

SEQ ID NO: 26387 - DNA, 1748 bp, Cannabis sativa
  modified_base (27)..(30): a, c, t, g, unknown or other
acaataaaaatgtaaccattgaaaccnnnnccatatatatatatatatttgtgtcaaattcttaatttatcatgcatgatcaaaatgtgctaataattttaattacatgcacaaataaattacccaaacaaaaaataaaagggtatgtaactaatcattaataagtagctatatttttatgtgtatatgattttagtcttggtacgtaacttaattataatctcaaatcagtactttttttttaatgacggtgtcaatttaagatcattcataacatacttcctactaattaattaatacgtgtttttggggttaggttgttgggtggtgtgaaaagaaaagaagaaaaaacatttgaggaaaagggtctcaagtactgactgaagtgatcactttacctttgtccataaggaaaggagctggcattgatatcttctttctataacttcaaatattcaaattcattttattattgatttgatgtcactctttcgttttgtttacgttgtactactactacgtaccacttctacctcttttttttattttttttttatttaagcgtttatatattacaaacatgcataacttggactcgaatccatgaccttcaacacacacgcaccctcttatggccacttgagctagcctcaagtggttgtaccacttctacgtcagaactaagaaaacaaactcttttaatttattttcaaggttaattaggatttttatccgttaaactttgacatgtactaaattatgcccaagatcgttaaaaataccccttgaactattgagatggttgaatttaaggacttttatctaattttaataaaaaaaaagtctaacacaaataaaagttcaggaggcatgatttagtatatgtcaaagttcgaggagcatgatttggtaggtatcaaagtctggctggggagcatgatttagtacataaagaatcattgaaatagtaaaattgaataaaattaaacaaaagtcattaaatttaacaatctcaataactcaggggaaatttttaatagccataaaagtttaaggagcataatttagtacatgttaaagtttggaggtaaaaatcttaattagcttattttcaataataatattaatataggaagataatgagaaatgctaaagggcactattagtgcctagcatcctcttacgttttaatatcgttatttgtgcaattaaatatcgggttccatataatttaatataataatttttatagagtatcgctaacaaatcataaggcaatacatctaggtgctaccattacttgtgcccaatcatatcatcatgttaatgttatgtctagctatatttacatatatataccgttatttcttcccatgtgcccaatctatttgaccaaacaccacttccattattattaatgtatttgttatgggcgtgtttaatactactacatcatattatctaggcatcaccaatttttctttgtggccttgttcatattattttaagatttaggtattataatcaaatgttaaatctaaatatgacttatttattaattgtatcgaaacttaaaactgaaactcgactcgtttataagtaaattgacttgacatgatctatatgatacatttatgaacactttaatatgtttctattctatttaattttaaaaatactattttttttttatgaaagagaagagttttattaacacaaaacccaactacaaagaatgaagcagatca

SEQ ID NO: 26388 - DNA, 1753 bp, Cannabis sativa
tgcgaatagctcagttggagctaagaatgatctgaaaaaaaaaaaaggacgaacaaaagtgcagactatgaagattacgattttttcaaaaaaggaaacaagtgcaatctactaatgaatttgagattgcgatggtgggtaattttgttttggggatctcgactcatggggagcagacaaactcaacgattatgggacaaatgaagaaaatttccataaaaaaaacaaagcaagaaattgtaggccatattgatttgagctctccaggccatattgtagcaggtgtggcaggtaaggattttaggccctggactttaacttgtttttatggtcatcctgatgctagatagcgtaaatttttgtgggaattgcttagaaatattaaaaatgaagttcgtgggccatggttatctgtgggggatttgaatgagatactgagtttagcgaagaaatttggaggtctattaagaggctcagctggcatggaggctttcaaggaagttctggatgattgacaacttattaattttagctctgtcaaaatagagctaacccggtgcaatgagaataaaagagatcaagttatggagtgtatggaccgtggtttgtgtaatttagaatggctacaacagtttgatggtgctgatatacaactacttgattggtgagaatctgatcaccgagcaatgattattgaggtgcctgtgagatttgatggggatagatgcggccaagtaaaaagaaagagttgttttcactttgaggaagcatgtgagaaagaggagtgtaaggaaattgttaaaactatttggagtggggagagtgaagtctgttcaattggtgcttttaaaaggaaaattgtaagggtgggaaaatttttacaaggttgaaaaaaaaaaaaaaaagaagttgttgaatggtgaaattgcaaaaatgaaaaaaatgcttcatgagcttgccttgctacaacaacctggtacctggacaaaagtgaaaaaagcagcaaagttaaatgttcttcttgaaaaggatgaaatgtattggagacgaaaaagtagggctctttggttaaaataggggatcaaaacactaggtatttctatcataaagccttagcaagacggaaaacaaataatattaaagggttggtggacccttaggtttttggcaagatgacaagattcttgtgcagcgcattgtagaagatttttcggcactttgtacacgacttcagaggtgcaatgggaagttgttcatgaggttttggaagtggtaaggccaaaagttactgatgccatgaatgacaattcgatgctggattgcataaaagaggatgtaattcgagtagttaaagaaatgaaccccacaaaagcccctggtttagatgggcgaccagctttattctatcaaaaattttggggggaactcaaaccgaatgtggtagaggtatgtctaaatattctcaatcatgaagttgatcttagttgtttaaataagactgtcattgctttaatttcaaaaacggagaaaccaaaatggatagaagagttctgaccaattagtctttgtaacgttatctaaaaattatttcgaagtgcttggctaataggttaagggcatccttgggtatggttaactctgaatctcaaaaggcttttgtgaaaggaagattaatccatgataatgctattgttggatatgagggattgcattgtatgagaaaaaataggttccaaaatggcacaaaactcgc

SEQ ID NO: 26389 - DNA, 2856 bp, Cannabis sativa
cgtctctaataatacatgttgctcttctgaattggtattattttttcaaccatactattataatgctttgtgaccatcctgttttagttgatggagagctctacatgtggggaaagaacgcaaatggacaacttggccttggaaaaagtaaccaactgaactatttattgttttgattttaaactaaacaattttctctcttttttaattccttgaatcaacaggtttttgtacagaagatatacggttttgtagtttgtcattttagggaataacttgttgtcttagttagagattttgaacttttacaatacctgtatagccgatatgcgaaatcatctgatggaaattattttaagtgaaaactttctgatatacaggggcaccgaaggcggttcctttaccaactaaagttgaaagcttgattggactgaccatcaaaatggcagctttgggttcagagcactcagttgctgttacgggtgtgtgtgtgtgtaaaagtttactagtattccattatactataaataaacttgtttttacttcaaggtacctgttagctaacagttgtcgtataactcaatttttgcttatatatttcttagatggaggtgaggctttgagttggggcggaggagagtatggaagacttggacatgccaatgattcaaccagtttttcgttctttaaaagtaccaggtttttattttttagccatctatgtacatacaactaaatacgtttgcacctatatgttaggatcccacattgactgaagatggtatacaactagacactagttgggcaccctcctctcttaggtagcttttgagagtgacttctacccaagtggctgtatcaaattgtattagagcagagccatgcgcccataggtggtaccgacgtgtcatgggagaggcaacctgcgaaagggcgacctgtggaaaaagcccagagtgggccacggcagagtaggccaccgtagagtgagccgctgttgacctcagctgtaagggggagtgtattgttaggatcccacatcaactaggtatgggattggttagtggtactttggcaccctcctctcttaggctagtttttgggagtgagttttacccaagtggttgtatcactatgttgggtgtaaatatataaactagatattatgttatctgtattattaaatttttattattagaaaataaaaattttcttaaatttcctaattgtgctttattgctgttaggacaggggagtaatagggaattaagaatgataactcagaagtgagagagtgagagttagtgttggggctgttagtaataaaagggagagggagtcagttagggaggcgggtagaagggtgggaaaaagggagaggccaggctctcaaattcctggaggggttctctttgtattttttctactattctataaatatatctatattgttctttgctgtttgctggtttttgtggctgtttagcataagattcaattagaaacatatcagaaggtttatccatttttggacccaagaagaaaattttatgtattaaaacttgcttaatcctctttccttgctaatgttgtattcttttttgtgcttgttttgtatagtctggccagaactttactggtggttgtaaccacaaccatcctctgccataagtgaggactctcaatatacttgggagggggtcacttgtgcatgtgactttgtctcattttcaaagaaaaaaaaaatgaccacaaaatgacttttagtctcaatatatttttggttgtgtgtgttttatttctattgtaatttaatattgacaaaagataatgcatattttggagggtaatttgtgaattttctgtttttatttttctcttatttgtcgatgaaagagaagttgcatatagtggggacagaagaatttcccatccctccaagtcccctctccttcatctttattttgccaatcaaatggatagagatgctctttccctctattgttctccatcctaaatccactcccaaacatgatgttactaacacgtgtttatggagatttgaacccatggccgtgctcacacaccttcccacttacatcacttgacattaccttatggtggcctcattgctgtacaatagggatgcacttgtaccacaaatgtttttggtgttattgactggaaatttcgctgatagatttttgaagctgtaactttcctttttttttttctaattcaatagaagtgtaccacaagagtttgggaatacagctaattgcagtgttggataggattgtgtagattaacacaattcttgttttgctatgggattcatgaatacctgtggagtcttatgatgatttttaaattgcagtgaatacatgccaaggctaataaagaaacttgagggcatcaaggtatatcatctctctgcttcaatttctggtaatgttgttataaatttcatgtttcttatggatatattatttgcatccttttaatcatagtgttttagcttcaaagtcagtagtttattggttataaaagatttcttctggcattttctttcctcgtttttgttttcttcttttttggccctccctaaatatttgtgacaaataattaggtaaaatatgttgctgctggcttgctgcattctgcatgtatagatggtacgtttgggttttgttatggtaatcattttctgtaatgtatctttacgtctttccataataactttaggatactatctttgcatactagttaatttccctcatttttcagaaaatggctcagcttttgtatttggagaacgaccagcagatagattggtaaattttatttcttcatata

SEQ ID NO: 26390 - DNA, 3046 bp, Cannabis sativa
ccttgtccgagtctaggtccaggtgtgggtccaagtccttgtccttgatcaagacactgactacgggccgggtccaagcgccaagtttagattcagatcctagtctcgggtcatggtcctcttccatttcgagtctcaggtctcgatttcggggcatgggtcctgggtttgagtcccccatccaggtctaggtcctagggcccagtttgggatgatgttcggttttgggtttgggtccaggtcctagtctgggtttgggtcttcgtctgggtattgggtcttaggtctgggtcttaggtctcgagtcatagtcctgatctgggtctgggtctaggtctcggttctattactgatcagggttcgggtcccggattctaggtctcggtctgggccaattcctgatctgagttttggtttgagtttggattcgggtttgcgtcttgtttctgtctcatgtccaggccttggtcccagtctgaaatcggttccagtttttattctaggtttgggtctatgtccaagttagtgtctaagtccaggtctgtgtccagatttcagtttgggccgaggtatgggttcgagtcccaagtccaggactggatccaattaattgtctaggccgggtttgggtctgggtccctgcattcgatctcggtctgggtctgggtttgggtttgggtcaaagtgctggtctggattcccatctaagtttgggtttgggtatggctcccaatttcgagtttggatctgggtccaagtcagggtcctaagtctgtgtttgggttcatgtcatgatgcacgtccgggtccgggtctcggtacctattcagatctggggccgagtctgggtttagagttccgatcccaatcttggtttgggtctggggccaggtctgggttcggttctagattttggtatgagtctaattccgagtttaaggtttaggggtttataatttggggtttataatttatggtttgggatctagggtctagggtttagggagtagggtttaggttttagggttaagggtttagcgtttagggtttagggattaaggtttacggtttaggatttaggatttagggtttagcgttcagcgtttagggtttacgatttagggattaaggttcacaatttagggtttaggactagggtttagttaattgaaaataaatctaattatcattacttatcagtactaattatttcttatcattacttatattaactttattattacttattattattacttatgtttactaatcattatttatcattacatatattaattttatcattactaatgataaatatgcttaattttatttaccctgaacccaaaactctaaaccctaaaccctaaactataaccctaaaccttaaaccctaaatagtaaaccctcaccggaaaccctaaaccataaaccctaaaccctaaaccctaaactctggcctgaaactagaatagggacgaggacccgaatcgggcacaggacctaaatagggattgggacccgaacccgcccaaggactcaaatagggaatgggaccggggcctagacccgcacccagaatcggacgtagacccagacttgagacccgaacccgaacctggacgtagaccgagaaagggatctttacccagacccagacccaaaccttaactcggaccaagactcagaccccgacccaaacctagacacagaattggaaacgaaagcagaacaaaacaaggaccgggactaggaccttgacctgggactagaattgtacccaaacccagacaagaactcgaatcgagacctagatatgcactgggacctagaacctgggactggacctggacccaaacccaaagtagggcccgagactcgagacccagattcgagactcaggacctagatttggacccaaacccagaccgagtcctggactcagactaggacctgaacccgaacctgaccctagagttggaccgagatctaggacttggacctggattgggaatcaggactgtgattgaggactcgaccctggacctaggcctagacctacgaccaagaccgggaccagagactcgggacccgaattggaaccagattaggacacgagactaagatcagaatcagtaccatgggattggacccaacaagtggttggtgtctaaatcttggatatggacacaaacctaaactcagagtttgacctggacccgaacccaaacccgaatctagaccaaaacccgaaccctaaaccttaaaccctttaggcgccgtttggaatgcaagttttatttcatgggaatatatttaacattgcttggcaagagtgatgatgaaggagggaaaattatataaacctaggaaagcaacattattgtatttggttgggcgcagtaatattatgatgatgtcttggaatatgaagattagtttgtttggttgacttaggaatggaatgtgagaacttttttttataaaaatgattgtttttttttttgtaaaatactaataatttaatacttttttttttcttttcaagtgtatgaaataatttttatttattatttatgatgatgcccttgggagtgaattgggtcggacaaagacagaagaagtttgccaacttcctaaagtacgggtgcaaaggcaataatgccccttgtttggaatgagcacccgaccaggcacacatccccttctttgggttggaggctcagtttttcgaggcaggaacataacattctagctcgcccagatagccgccctggtcgagatcccgtaagcgtggctcagtgaccttggatggaggactcaccaacctaacacccaaggtactttgtctcctttgaggaactacagcagtaagctcctcattgacgtagtccactccttcaaccaggacatcaccgtccgcgtcaattggctccctgaccttgttctatcccacaaaatttggaggtgcagcttcctcctcttcctccgcctcgcaacgactgccagggtgggcatcgcactgttcctctatctcctagacttg

SEQ ID NO: 26391 - DNA, 4015 bp, Cannabis sativa
attaattggtttatgttcattttactgtcaaagttgtgagttcattgcagattttatgattgaatcctcaaggttatttccgctgaaattacaacagagaatcaagtcatattttgagtataataaatctatgagtgttatttgattttatttttacatgaatggaaattaaataccctaatagaaatttcaaattagttgtaaattgtaacagcagctggaattttttctttctttaggttgatggcaatggttgttgatattgattctagttttaaaattataatctaatttcatatgtggaatgttggatgtgagaaaattataattacataatttttgataatttttctcatccatagactctagaataatcttgtcatttcaagttggggaaagacaaaagattataaatcatcattattcgttgtttactacgaattagtagcttaccctataatcatagttgctaaccctttcttaaaattcaccaattggaccaaatggaatttccgaatagtaaagcaaatcaaaatattatataagtagatttatgataaatgtttgcatctcattaattgaaaaaaccaaaaaattgtttctgtggatgttatgaaatttgtgagctataaaatagtgtgtatcgtgttgaataattgattaacctccaggatgcaattagcaaaaaagaaaaaattaacctccacttataaaaaaaaaaaattgatgaatggtgtttatttgttctcaaataagttattaatcacaattttgtgggatattattaaactgtattatgataatctgtatatcattggtaataagggcgtggttattggtttccgactagaatttttttgaagggttagaaagaaggaaaaattgaatggttggcccaaagcaataccaagtttgcaatgaagtagttttcaagtacaagtgtccctctttttaagccccgtagtaagataattttaaaccaaaaacctttgaattatatcattacgctccatcttatccttataagcctacttttatgctttatagtttgtatgaatttgtgccaaatcatcgctcctttcaaagaggtcattttttttttcaataaaaatgaatagtttttgtgctttaatttatcattaaatatttttttaatttgtgtgtcttatgtttctagttagatttcttagttagtgtataaggtaattggtttttttgcatttaattgttggttttcttattttacataactatgtttcaagttgtattatttgaaatggttatttcacatatttatgtaataagtttccctaagtcagatttttaatagctgataatctaactaatttttctatgttagatttttgtgtattaattttaatttcttcactttacttaattggtttttgtgtttttctataatgtagttgctctattctttgtaatttgtagtgtttagtctatttttcattttaagtttgtcatattattttttttatataatctaaactagttttataggttttgttatggtttcacatgttttgaggatattgtaataaaatttctctacttttatgatgtcattatatatatataatttttatttttttattttgtttctatgtttgaaattagttttgtttttagataattgttgtgtattgtgtgttcttttaattatatttgtgagtttttttagtaatttttgtgtgtgtgtgtgttttcctatttggttgacagataaaatcggtttcagttatcatcattgtttatcattttagttttgttataattttttatagggtcgaaacttgtttcacagggttcacatgttcgaaactagattttgtaatggggttgctctattttataatgtcattgtatattttttattttagtttctttgtattattttatttttaggttcgaaacttattttttgtgttaaatttttaattagttgtttgatgaagccaatttctatgatttaatttcatatagatttgtcaaaaaaaaaaaaattgttgtatatcttattttttttttatttttataactagatgttttaagtaactagtttttataactagtcttttattaaatttttaagcttcagttttttcatttaattatttcaaaaaattagtttttgctttattaattagtttccttatgttataattttaagtagttgataaatgaaattagttcttgtgtgtcagattttaacgttcaactctagtgacaaatccgacgtctaacttcggtgatggcgacaactccaaccacttttcggtgataattctatttttagcaaattttcgagtaactttttcggtgattgtaccaacttcggcaatttttttgacaccaattccaactccgacaacttttttaacgctggtgccaactccgatgactttttcaatgatcattgttctttaaacatcttatgaagtttatttatggtattttattgaagtttccatattttttcttagcaccatattttgtccattatgtttcatgcctatattagctagtttttttctctatatttttgtcaatagccctttaaacttttaacataatatcaacctataagttgaatttagttttcaattaatcccattttttttaaatttaaggagataatactaaaatttcctttttatgttcaaagctgaaaattctactatggaaatcatgtagaatgcttgcttattttaaatagttatggagattcggagaaaactaaaaaaattgaggaaatagtaatcaaattaagagttcaaagtttatatttttaaatatttttttaagtcttgaagttttgataaaaaaattactgattatagatttaaaaaaattacaatataagaaaaagtaagatgtaatactatgttttaatacacaatataagattatgtaacccactaacttagccaataaaatactataaaaaatgctctcactaacattttcctataattataatatataaaattataaaaaaaaaaaaaaatgagataatttttcttggtaccaaaaaaaaaaaggccctagtaagtgtaaaagtggatcctaccaattaataattaaacattttcttcttctcttgaaataaaagtagaaaaaatatgactatactatgcatcatgcatgatcatcactctaaagcaaatttattcagctttcagaatattttaattatcaactatagtttatttgattttactttgcagattgtcattataatcatcgtctgattaccagaaaaaaataataataataagaaaattttgaatttttaaagaaaagataaaagataaatgaaaaaaataaaatattttttctcatctttttatttgttagtaaatttttaaaattcccaaggacgaagaaaaagtattcaaagtcttaatttaattgggaatgcttaaagaacaaatacaaaggcctaagattgttaaaattggtgcacatctggtaatttcaagcaaaacaggcttggttcacgtcatcaagtcaactccacacaagtgtaaagttgatttgggggcacatgttaacccaaaaacattccctggtgatgtggacattaatgtttgacacgtggcatgaagaatgatgtcacggagtttagtagaccaaagtcatagcagtcgacttgggagggaaccttagcactacacctatctccaggatggaagttttaacttgaataacttaaatccaatccattatctttcagtattctttaccatgacgacatggagcaacctaatgaaaggctcaggagctgaaaatatacaaacctacaacccggaagtcaacctaggcacctagggtttcacctgttggaatatattttaccaggatctagatctactaacaagtatatttttaacatcctaatattaattactagaacgatcaaaataaatacataaaaggtatgagaaaccttacactggttgaaacagaattaaatgactccttctgctcagat

SEQ ID NO: 26392 - DNA, 2442 bp, Cannabis sativa
tactgcttattttatttaatttaacctctgtaatacgattatgaatgagttaaggattgcgcgtgttttgattaatgtggtccatgcatgtctccatttgttagaacgcaaaatttgaaagtttaactattagagttgttcgtacgtggccatttatatatttttagtttttagaattattattcgtttttggagtttataattaagtcctagttgattttccatttgaatagttcctattgcaattacgtctctattaacagtcaatgcaaaatacaaaaagaactgaatcacaattaataaaagaaaaaaggactaatattttattaagatcataataagccaagtggggacattattaatcatgtgttaatgtactaataataagttaatatagttgtattaatattagtcttaatccagttcttattattacacgactgcttcatatatatacaaatatataatatataatataaagaagagtgccgaattatataaagagatcattagagagatgatggttaaagatatttatatatatatatatacatttgtatgagtgtgatcataaaggctgatagtgacttggatagttatgttttgacacgttaagcggatggttaaacaaactcattctaacttccaagttttgagagacaataaagtcaatatattttaacctataatatatatgtatacaaacatatatatatatggagtggttagatatgaaaaatgagacggtggtgggactaaataaattactcttcccttagaagcagggtttttcttcccctctcctaatttatatcttataattcgtagatttgattaattaaacacgtatcatatctttaattaacttgagttaagcacctcaaaataaaagtaggtctataattacgaagtcactttcaaattaatcgtagtgactttcttttgatttatttatttatttattttttattttgcaagggattaatctatttattttcttgaaattataagaaaattaatgatgcaaatttaacatcatcattacgtgccttgatatgtgacacgtcgactataagtgcttgcgattaatgtgaatatttctaactaattacagtatttatgtttatttacagaaaaatatatagcattttgctcaaagagagtagataatgtgttatatctaatcaaggaaaaaaaaatgccccaaaaattgactgtttcagattattttcactcaaaataactatatttaaaacttgcacgtatttaacgtgaaattaatttaattaattttcatctttataaaacgttaaccatcaattaatttataatttcaaattaattatatcaaaataatatttttttttttttgccaatactctctttcaagattgtccaaaaaaaaagttttattacatatttattttttaagttttagtttttgtaactctggaaaaaaaaaaattatcaattaataatttaataattcagtatatatagtcaccaaaattgatggctttatagtgttttattttcagcgtgcataatatatatccagcatcagtgtgtaaaaacagtgttggaacttaaatatacataacatatatttaatattttttttatatatacaaaatttatacaggaactttaatttttgatatatattccaactttttttccctacacgtgtataatttttattagtttattatttttaagaaaaacccgtttctgaacgttaaaaaaatagattccttattgatgaattttctgttaatatattgtgtttcataatttatagtgtattaaaccaattttattgtgacacattaattaatgtaagtattttaagaaaaaaactgtataaatagttaattttttaataaataaaaaattaattgacgtgtaaaatttaaattggtttaacacaatatgacatacaatttttaagagaatatcttaattccttattgatttacgaataatgccaacatagattagtgtatgtacacgtaaattacaattgaggcagggcatggcatgtacgtcgactacattgagtaatttgaattatttattcaccaaaaatatatttcttagttcgtttaattaattatagtcatcgaactcatcgaatctaatctattgcgatgattgtagatatatatgactttcttattatcgtataaaatataatttaatataatattacatagtacaataccgtgtaccaaacgaaccgtatacttctaactaatatgtaatttattttacacaccaattataagaactaaaatggtgaaactaatttttgttggatttataagtacgaacatagtatatttgagttatacaatacggtgtaaaacagcataccaaacgaaccttatacttccgacttatatataatttatttaatttacacaccaattataagaacta

SEQ ID NO: 26393 - DNA, 6761 bp, Cannabis sativa
caaaaatataactaatgagtgtacgtttgttcactcattcttagtcaattattagatgaattaatattagtttcttaaagttttgtacagatttgatgtgtttttttctaagtgtttagatttgtgtttaaaatataattttgtcatggactgagactattgacccaattttcgacaatattttcataattttcttgaagagtttatgaaagtcaaaatgatagaactcattctcaatttttcaaaacatgctaaatcatctaatttggagttcagacgcaaaatttatacatgctttaccgagcaagatcgaagcattcgtgttaaaaaaaatgcaaactttagcacgtgcggataaaaatagataggtgaacccctgattaactaagtttaggagacatgttgtgttaacttaggcgacatgtcgccacaattatgaaacagagtgatctttccatgtgacggataaaaaagatagcagatctcgaagatatggtccaggcaacatgtcgcctggccttaggcggcttattgcctgacgtactttttaaatttaaatcctaatttcaaatgacatccttcctatctttttaagtctatataaaaaaatgatataaatcgactttggacaactggaaagataccgaaagcaactttgagattaaaaaacttattgaagagcatgagaaagagatttcaagcttaagcatcatcaactcattagagtcttttttttcttcttctttattcttttatttagtagtttgattatgaacatgattattgttttgactatgttggttattatgaactaaacactttttctatagtgttgatgaaactattttagattatgaattaaagttttcaaattattctcatatttgttcttactatttgtttatgcaattttgtgttaattaccatcttgttaatgctcggtcatcattaattagtatagagattttacgttttacacgtgagaggggtaatctaaaattggacttagaattgcataacataaaaaaagtgtgagattgagagattcccctaattctatgagtttcatttaaggagaataatattgctttattattacttaattgattaacattgagtagacatctcttgctaataaattaagttaattatatcatcactccagaaagattaatatgttacattaagattcttaaaactacaaattatcgaataagatgggataattggtaaattgagatttatagtttgaaatagggaagacaatgctctagatttttactttctcattaaaattggtgtttgtctatttaccttttcagttattttattattttgttcttaatcattatttactttatattgtctaattaaagcataaaattaaaaagtataagggcatttgataatacttttatttttttttattttttaatcacaaaaataaaaataaaatttgtgtttttaaaattttatttttaaaaaacaaaatatgttctataaccacttttgtttttaattttaaaaatagataacaaaagtgtgttcaataattttcactctcattttttattttttgattttattaagtcgggattagggctgaacatttagacccgcaaacccggaaaacccgaccacctgccccgacccaccgaccgaaaaactgaaaacctgaaaacccatgtgtttgggtcgggttcaacccgaaaataccccacatgggtttcgggttcgggtatagtgaattggtttttttattcgggttgtaacccgtaacccgagcaatatttaaagattaaaaaaaaattattttactttattaaaaacttaataatatttactttcagttttcagactttattattaaaaaaatgcctattcgaattctttagtttgccttacgaataaacacagtagtcattacaccaagagtcaccctcaagcttctttttctcaaagggcgacgacggacggacaacgactgcttctcttctccggcgagatcgcatccaagcaatgggctcagcccggtgtccctaacatcgtaatccaagtccaaactcgtcagaaaacttaaagatgaaaatagggaaaggggatttctgggtagcagagacttggacaggtaggcttctattgtatttttacagttttcaaaaaatgagattttgatttttcgaagatgaggaatttgattctgaatgttttaacttctattttgataggccaagattgagggatggatggtgaaggaatctatttggctccattgagtttccagtctactttgacaaaccaaaacggaataatattttgtctcactctttttgtttttataattcatttcagcccataaattaaacattcgggctcagcccaataggaccccgaacccgaccccgcccaacccgactacacccgacccgatacccgatgcacccgaaaactagattcatttatgcacttccaagactcgaagcccaaaaactcgaactcgaccacccgaaaacctgacctgtgtgcacccctatatgagtttggggtcaagattgtggtccgagtccgggattggggtcgtggccggactccaagttgggatcggagtccaaaatattgattaagaaaaaaaaaatatgtttaaaaagttgtgaaagtatttttttcttgttttcaaaattttgattctcaattaaaaaattaaaaagtgaaaacatttttatagaatatgttttcggaaaaaaaaaatcacttttctaattttaaaaatagaaaattaattaaaaaagtgttaccaaacacattcatattaattggtaaaatttaacaattaacctttgtgggtttgataacctttttagaattaaaatattgttacaacaatattgtatgcttgtagtaaaaaaatcgtatatcaataatttatgtattattatcgtcaaaaattaaatttagatatttatttgtaaccggcagtcttaagtattcatgtcacaaattactttttataatttactttcatattttaatctttaaattaatttattcttttccaaataaaaaattatattttataaatttagattttttttaaataaaatataattatatagcttatgtggggtagatatggtaaatattaaaatatatgaggatatattgatagttagataagaaaaaaaatgaattgaataaaatatatttaaaagtataatattttatatggatatggagaaaaataaagaggtgatgtaaggttaaatgtaaaaatttgaggtaaactatagagtagagatcatgagagtactttaaaagggaaaatatgagtgtttatatattttataggaaaacggagtgtttttattagaaaagatataagttttttcaaaatatatgtattttatatgaaaaatcctttaaaaaatattgaaaaaaataaaataaattttcttttcttaatgattatatttgttttttaaagaaataattggctattttaactgttttttttttgcttcatatttttattcttttaattattttataaaataatatatttttttttatatcataatcaattttattattgcgagtctaacaatatattagtcattatacaaaaaataaaatttgtccaaccaagaaacctagtattctattcgtagtgcatatgctaactcatgtgctacagtattaccatttcgcatcatatgttaaaaataaacacacgaaaagataaataacaaagatctaatagatttgaaaaaaaaaaaaattcaaaaaaagaaaatagacagaattgagaacaaattcagtatcactctccacaaaagaaacaaaaagacacagttgcaagcaccactgtaaaacactaaaacataaaaaattgctaaagcttcagcttttttaaggtaaaagaaaccaaccaaatactttgcaacatccacaatatgtaaaccagaattcacctgacgaggcctaacatccacaatgttattcgagatcagcagagttcttgagtgatggaaactggagtgatgacttggacgaggatggtaggcctcttcaggtggttgatggtcgatcgaaggaggactattggtgctgttatgtggttggtcagtcagcaggctttgcggtcttccacaggcatgagtaggtctttgaagactcgtgggtggcagtgggacacaatgatgttgaaggagtattggaaggtgaacttaggggaactgctttggcgttgcaagttattttggacaaaaatgagtctaaagttcgtatcgagacagactccaagactgctgctctcgctttcaaatctggttctattccgtttggatggaatattttccctgttttctctctttgtttgactctttgtaagtcttttgaggatgtggtgatctcctgtgtacctcggatagagaatgtatttgcggactctctagaacgggctagagaggcaaaggttgttttctctggttgtttgagggatgtggcctccttttgtgtcactagttttgtgtttgtttttcaataaaagctttgattaaaaaaaaaaaaaaatccccaacatgtaaaccatgataaaaaaaaaatcatattcaccttaaaaatcataaaaacaccctttattagtcaaaattttatttaatttatatttattacatattttaaacttaaccactatagttgtaaaaatatgtaacccattacgaagaaaataagatattcatgttcatgataaattgagtgttcatgaggaaaataaactatttaatttctacaaagttttttttattagttttttatatttttcatataataacataaaggcacatgtaatgtctctcttgccaaacttgtattattaaagttttggtcggttgttagtgaatgtttccatttttttaaatctatttatgaaataatataactattatattaaggatgaaaaaaaaacttatgaaagaattttactacactaatctcattcccctactcataaaataaaatatacaacaaaataaagattatttttatttgtaacaaattatacttaatgttaatgaatttcatatagaaatgaactaatatgtttgaattagaaataaattatttagttgaattattttataaattccttaaggaactattttacaaaacaccaataaattgaacaatgtaagatgtcccaaaatgaactttttgatagactatgaacaagttacattttattgacataatttttctttgaaaatcagcgttttatagatagaagcactaaaagttagacctcgtggtcattacaagagacaaagtctggtatagaagagagatcaaccataccagtaatattgttagcagacgcccacttagctacattatgggccgtaaaattataaactcttggaataaaaaaaaaaattacagcctaacataaaagtagagagatgtttacaatagtgcacgtagttatcaattccccaactgggataagtttcctttagagtcttgataactgtctcagagtcactctcaaccatcacaaaagggtgttgaaacgaaacggtagtctccatggctaaaagacaggctgcaacttctccaataaggggatcagagaagttaagcatgtttgtagccacccacaaaattgactccgtgtggcccctagccaaagccacaatgcacatatatcaattattgacataattgatacatcaaatattacattttacatagggtaaatactattttagatccagtattttataaaagttaccaattagatcttctgttttgttaaatgataaaatagattatgtattttctaaaatagtaaaaataggacattgatatatgattttttttaattataacatctaaatagcacttttatttattattaaattatatgaattgttataattattcaaatttattagtattttctaaattttatcattaagttttataattttggacttatattcataatatttgtaaattttcatcaaaaaaatgtcgaaaatatttgtgatatttctatggacattgatatttatttatttttttgttgcttaaatctatatctaaattttcatttggatggattaggtaaaaaagaacacatcccatcaattatatctctcttaacttcttccaaatgtactttggcaaaagatagtgactaaagttaattccccaacccctaattatatttttcttacttaattaataattaaaataatatataaaagatgacttttttgaaataaaaaagttaaagaaaaaatattagaaaaggttgaccaattagtcgacaaattttaatggccggttagtgatttgacttggccaccaaatcatacaatttggaagatttcaaatgacattttcgaacacattaataatatggtacaaaactcactcaccacccatgttttttattttctaaataaatatttatatttctactattatgatcacacctcaaattatatattataattattttaagtatgcaaattaaaggataattaaatatcaattcaataatttttttttagagaatatcagtaactaatgaacttttaaattgatatccaataacaatactcaaattaaaagtacaatacatcattactctattagatattacttaaaaataaatagatatacgaagtaacatcaccatggacttttaaacaatgttttttttttttttttaaacgatctgctaatatgactgcgca

SEQ ID NO: 26394 - DNA, 4350 bp, Cannabis sativa
tttgatctctcacaaaatgaagatcaatttctatgtgtttatttttatcatgaaaataaggtcggctgccaatgctaaaacaccttgattgtcaacccagataataggaggcttaggcagcacaacttccagcttagacaatagagaagagatccagttgattttgaagcagcatttgcaagagcatgaaactcactttctgtgcgtgatctggcaaccacttgttgcttctttgcagaccatgagaccagatttcacccaaaaacatcacatattcacaagttgagtgcatatcatgatctatgcaattggccgagtcaacatcactataatcttgtagagataaaatttaatatggtttaagacatagaccatctgagatagaccctttgagataccccattaaccttgttcacgcttcccagtgagaggttgttgggcatgaatgaactaaccaagcttgttgatagtgtaagctacagcaggacaggtaagggtcaaatattgtagagcccccaatgtacttctgtaaagtgttatatctacaaaaggttctccatcaagaagtctgagttttgcaactaaactactaggattaggacaaatcttagctccctccatatgtaatttaataagtctgtaatgtacttagtttaacttaagtacgtgccactttgatctctgaaaatttctacaccaagaaaatagtgtactagtctcttgtctttaagagagaaacattgttcagatcagtgataagcttagagataagattctgattaggtactgtgataagaatgtcatcaacatagaccaataagtacactagagtagatttagagccataaacaaataacactgtatctaattttgatggttgtaatccccaactataaagagagtgattcagcttatcattccaggctcttggtgcttatttcaacccatacagagccttctgtaagagacaaacatgagtagattgtctattctgatcaacaaactcttgaggttgttgcatatattgtttcttataatgtaccattaaggaatgaatcactaacatcaagttgccttacttgccaattaaaaaaaaactgctagggaaagaacaactccaactgtatccagtttgacaataagactaaatgtgtcctcataatcaatccctagagtttgaagatatcctcttgcaactaaccttgacttaaatttttccaaggtgccatcaaaattgagcttcactctatggacccatttgttaataataacatgaatatttggttgataaggtataaaagtccatgttccttatctttcaagagcagtaaattcatgttgcatagtagcatactactttggatcctgaagagcagccttaagaaactttagtttaggaggcaataaggattcagacaatggatgcttggtagctagatatgcctttggcttagttatcccatgttgagacctagttttcatatgatgaacccttggtggttgaggaggagctataggtgtattaggagcaagagaagactgtccaaatggaactggttgatgtagcatcactgtagcatcccctgcaacatttgtgtgaataggttctaatacagcatgtaatgcgttttctagagtgagaataggtgatggtgcttgtatttgtaataatgtagggtgatgggaaactgaatcatggtgacttgaagataggtcattagtgttttgttgttgagcagggtaagaaggagagttttatgggccgtgtgtataaatggttcatgtattggagatggtgcagagtgttaatgtggtgcatggtgaatggatggtttaggtattggaaatggtgcagagtcttgaggtggggtagggctgtgaggtgtgtcagtgtatggataaggtggtgttgttgttgaaggcttaattggtggaggaatgacactagaaatagagtttgtagaggtaacaggtacttgtgtaggatgaaaaatagtatttgaaaaaggaaaagagtgttgtactagtaccagagatgaagatgctgcattttttgtaggatagaaatcctcttgaaaaactgcatttcaagctatatagaccttgtcatccttgttttcacacaaatagcctttgtgatgagcagaataaccaagaaaaatacactgttgggatctaaaatccatttttcgtgaattgtaaagtcttagatggggataacaggcacatccaaatggtttaaggatggtataattaagtgcataatgaaatagagcctcacagggagacatattgttgagcactcctatagggagcctattaattgtaaaaactgcactattaaaagcatgccagagttaagagaactcaagaccagtttcagccaatagtgtaagtccactttcaatagtgtgcctatattttctttgcgagttggacttcttttcaagttgcaaagaaagtttatctcatgaggagttggaataggccagttcttaaggcagtagaatatgaagaaggtgacaataattctatagccatttagatttatctagtaagggtagacaccgaagaaattagctatggatatcaaccatagatgaaagggcaagtaagcacctgcatgcatgtggaatctcgaccaagcactacaacaagtattatgagagcccttgggagcaccatgtcgaggcttccaaacaacaattttaggaagacagtaattatctcgaattgtttgagcttgaagctcagtgagggtgctagacacaagtggtcttagctcaaaggcttgatctctctgatcgtcactctcaatggtagctttaagaagctcaattgccatcaccttcccatcacatgccttgtccaagttcttagacttaggaacagttagcttagctctaatgaactgagccacattgggatcatactcatcaggtaactttctacttatcttcattctatctatctctagctcaacaactcaagttgcttacaactctaggaaagtcaaaattggattgaaaaaaatcaaagtaacttgggaggaaattttcaaggcactaggagagtgttttggatttttgaaggttttagaagaattatttcacgggtttcggggagtttaaaaatccttggagtaagatcaacaaaggaggagaagaagaagaaaaaaaatcagcatgtcccaagaaaaaattgttttttttttttgccttggaatagagaatacttgaaggcttgatgaaaataaaatctcaaagtgttcttataaaaagctataagcatgtgggaatgaagagagaagtgtgaaaatttagttgtcaagtcaactcacttatttatagttgatttcaatttcctaagtctaaaactaatgtgagtcttttaaattaaaactttctaaagaagagacaaatgacgagtaaaagatataattatgccttttcccttttcctttttaagcatattttgaaatttctatacaactaggaataggaatacaaatttaaaaggtaacaacaattcctaatgctattaagattaaggaaaaattagagaatcaaaggaaaaagatatatgataaacaaaaggccaaagtcttttctcttcttcctttctctccctaattttgaatggcatatcctaataggattaggattttaatccaattaatcctaataccataacaaaaatttagaaaatttcaaattttcaaagaaagagataaaagataagtgaaaaaaaagataagttttttttttctctttttctttgttaattaatttttgaaatttccatggactaagaaaaagtgatcaaagtcccatttcaattggtactacttgaagaacatatacaagtgcctaagaatgtcgaaattgatgcccatcaggtagtttcaagcaaaacgggctcggttcacgttatcaagtcaacttcacacaagtgtaaagttgactcgagggaaaatgttaacctagaaactttccctggtgatgtggacatcaatgtttgacacgtggcatgaaggatggaatcacaaagttgagtagacccgagtcataacagtcgacctgggagaggaccctagccctgtgcctaagttagcttcaggatctctaggatggaagctaagccttcaataacttgaattcaacccactatctttcagtattctataccatgaagacatggagcaacctaatctaagcatcaggagctaaaattacgtgaacctacaacctgaaagccaacctgggcacctagggtttcactcaacacccaagttaacatcctcaactagggtttcagttttcaggaccatcttagtgcaaaagggtcaaa

SEQ ID NO: 26395 - DNA, 1448 bp, Cannabis sativa
ggggcggggcggggcgcggcagattcgtacatgatctggatcaggtcggatcatagtcgaatcagatccgacccgccccattgacattcctattttctaccaaaagcttgccataagtttctcaatatcctcacagatgcctaagggaattaagaagacactcatagcataggttggcaaggattgaatcacagttttaaggagaatttttttaccaacacatgataaaaatttgctgtcccaactgttgatgcaagccatgacccaattctttagaaagccgaggatagaagtcttgttctgacctatgatgttaggcaaacctaaatagaggtttccatcagacgcttcaagcatttcaaggacagaacagatatctgatcgagtttgagcaatagtgttaggactaaagaaaacagatgacttggaaaaatttacttactgcccaaatgccagttggaaggtatggaggagagtattgacgctttcagcaacttcttttgtggcctggcaaaagagataaccgtcatctgcaaaaagcatgtgaattatagagggagctccacgagtaaccttacaaccttgaatagtttgatttgcctcaaacttgttgataagcgccgtaagccctttagcacacataataaaaagatatgttgaaagtggatcactttgccgaatatcgcgagacggtatgatatggccaacaacatgaccaccatggattacattgtagcagataaaagtaatacaagacatgacaagatcaatccacgtcgaatgaaaccccatatctgtcataacaatatgaagataatcccactcaacatgattatatgctttgctcatatcaagtttaagagccatgaactcttttttgccttttgttttttgttttaaatagtgcatgactttaaaagttatcatcacattatttgaaataagtctgcttgtaataaaaacactttgattgaatgagataatatgatcaaatttccctttttaaaaagcttggtggaacaattttgtttaaatatttgacttaatgaagtataaatttgtattgttttttgctgaaataaattttgtattgttgattgatttaatagtgtgcaacacccacacctagactggctagagtattctctcacaagtcttaataccatatatcatatcataaagcctttaaaagaaaaaaagaaaagaaaaatacccataaagcataataactccttccctaatatgcatacttcctagcttttaataaaaaataaaaaaaccaaaccacaattgagttgtaattgagtactgaaggccacattccacggccatggacttccgcaactcaccttcttcctccaccacttcttccacaaccaccacacctaaccccgccatcactactgccaccggcgccggccccgcctcttccgacgcccctatgcact

SEQ ID NO: 26396 - DNA, 3056 bp, Cannabis sativa
gtcggggcaacaagtaaataagcttaaaactactattttcttcagtgagaacactccggttcacatgacagaggatgtcaaatcggccctaggtatcggtggccctgtgggcgtccttaaatacttaggactccccatattttgctttagaggcaaggatgcggattttaactttattgtggagaatctaacgtccaaattacatgggtagaaaagcgaaaactttgtccaaggcgggaagagccacccttattaaatctgtggccttggcaatgcctgtgtatgccatgcagtctaccaagctttttaatcgtttgtgctcaagaattgatggtatgatgcgtgacttttggtggggatttgaaaaaggtaaccatggaattcatttaagggcctgggacaagctatgcctccctaagtctcggggcggtcttggttttagaaaaacaaaggagatgaaccaagcctttctgactaaatggggttggaagttgcttacagggtgtcaatcactatgttgtaaaattcttgaagccaaatatcttaggggccagaatatcctcaaatgcaaggctaagacctcggactcctgattctggaagagtgtgatgaaaactaatgacatccttaggaggaggacctgtaaagttatcactgatggaagggacacgaagatttgggaggacccctggattacacatggaatcgacttctatccataattatctaatactccaacgaattcatacaattcagtgtcaaagcttttgactgagacaggtaactgggacatacccaaactaaataacctctttactcgtgagacagttgcggccattctgaaagggggtaacccatcggaccaagggaaagatcattggatctggactaaggaaggaaatgttcgtttctcatacaaatcggcctacttaatccaggccctgcagcggtaccctcactgtgaggttgccccatcgctttggaataaactttggaacagtagaattcttgagcgccataaagtgatgtggtggagtatcctctcaaatgctattcctgtaagggctgtgttactcaaacattttcatattgtggacagctcttgcccaatatgtggtgttgaggaagaatctattgagcacctgttccttcattgcaacccggcattccacctgtggcgatctatcccatggggtatcttccccgttacgggaacaaggattcgtatgtgggactgggtgaaatttttgttgagtttgaaaagcaggaaccaacaacagaatggataatgtgaatcaatgtattgactacatgtctcattcttatgcaaattacagagattctattattcctacatcttccccgaaccccccgctacctggaaacctccccccaagactggatcaactaaactgtgatgctaaggctggaggggagcatatgtgtgtagcagttgttgctagagactacctatgcagggtggtttgggtgtttacgaccagattggacttttttgatgctctttgtggcgaagcagttgcggtttgcttggcgcttgaggttgcaaaggacaaaggacttcagtttatcttggtggaaatcgtttcaaagatagtgatcaacaccctcaacggtgtggacccccagatgggaaattaaaaactactctttattttgtaagagaattgttccttctttcattacttgtttattttgtttcacggctagatcatgtaactttatgactcataatgtggcaagtgtaattttacccagaatttttatggatcccttgatgttgctactgtttttacaaatatttgttgtaacgactacgaggtctaaggttcttattgttttatgaatgaacgtatcttttctaaaaaaaaatatatatatatatattttctccactcttaaactttttttttagaaatccaagaaggaaagaacctcatattatattactttgcgttgcatccacctaatggtatatatatatatattttttaaaagataatgtaactaaattaagctcaatcttctttttaaactgaaataatgtataaatgaaaaattatgttgagttagtacatatagatttaaaattaaagaaaatcaaacataattagttaaatttgagagataacaatttaatttttgatttattataatatttttaatatattttaagatttattcaatcttatgcaaattattggtcttctggatgcctctgaggaatgctggaagaataagacagtcccatctaatctaacactttataatattggaaataaataataataataataaaaaaaacaaaatagctaaaaatgagaaacaaatgaaaatcaacaaaaatggaaagaaataagaaaaagtcataaaggtcccctcagaacaaaatatcaagggagagccactttaaaaatatcttggaaaaggcatagtgatcgagtggtggagggggtatccacgtgtcaaaagaaaaagcaacctaccatgagtcttcccacgtgtcgacccctagtttggaggtctatctcttatcattgtcgttttccaatttttgtcggtattcgctttaatccccagacaggactggtccacatccgactcactgagtcactgcccttcgagtcagctccataaaaataatctgctgtttccgcgggttcacctactcacctcactcaccaaacacttccattacatttcattttaacaaataatatttatcaataaaatctaataattaattatataagttctcttctcagcatgaaactttaatccaacgtaagttattgtttttttaatagaaaatatcaaaattttgaagttatattattataattcatagggataagatatttttattaaaattgtgttactcatatttatttattttttattacaaattttttgtgtggcatccatcaacaaccaattaagagaattaaacttaaacaactctaacatcatcaactaagagttgcaattaatattcaatacatagaaaaggaagtcacactgaaacaaatatatatata

SEQ ID NO: 26397 - DNA, 2087 bp, Cannabis sativa
tgtaaagggttttatttagggcacaaaacccaacaatcatttatttctattttctaggtacaggtgcacaacattccatttttgtatcttacttctgagaatgctcaaaagcttggcctgtaattaggagaagtacttcagattgacgaggatgcggaggagaagttaaaatggattgaatggctgagatttagagttggggtaaaggcctcgcttcctcatttcactgggtgttattttaaaaagcaaaatggagagaaaatttagatccaattcaaatatgaaaagctgggtgatttttgcttccattgtggtcggcttgaccatacaagaagtgaatgttctcaacactctccgaacacaattattaatccctaggttccccgttccctctttatggactccgactaaagattggtactagatttcgagattgcttctttcgagttgccatcccagtcaatcactctctgctcatcgtgccccagggtgttattgctaatggttcaccaacttctccagtaagaacccctttgaatgtagatggctcgtcgtctaaggttcagtcgctggggaaaaggggacactcccaagaaaaacctcttatcagcatgttaataaaggtgtggtcatacagaacgtagtttgtcctttttggcaccccaaaaccaagagtggtgatgaattgcaacaatagcttggtatttcctcttctaggcttgtccctgatgagcctctataagcaatgataaagcctccaacttgtatacctgatttaaacgatatttaaaaccccatcttagtggataaaggatataaggcgttggtaatgactaaccctatcaagaatgttttgccttcgatcacaattgggcatgccccctctaaacccaaagactagtttcctaactttactattacgttggtgggccccgatgtcaataaggttaataaagcctcaattgagacccatgtttctaccagactctcaaggggccaagaagcgtatttggaagaattaaaaggcctctttaaggtgggcctaaccactgttagggatactcctagtgagatgggtgttaagcacacatttgaagtaaatgaactcaccaccccttttaagaaaagaaatttggctgcttgttttttattctagtcacagacttggtaagttgagtcgtattgaagctataaactgcaacttaaagaaaaaaaaaggtgggcgctccctttgagtttaagcttaaaggaaaaaatttggcattggatactgatcactgctcacagatcatgattcatcccaactgttcccctctaccttccttcatccctcttggctcggagttagaactgaactcttactctattgatgatgaggttgtggaaggcccctctaaaaggaaaagaactaatttgcaccaaagattatctaaatggaaagcctaatccaggttagttccagtcataactcctcctcctagtacgtaatcttgaaaatgaagcttactatggcgacaactttaatgccaatgttttgtttagttagcctgtggagttcgggtcagggcccactccataggagcaatgatcactctatcttggaactgtcaaggattaggccacgccacgacagttcatgaactcaaggccttgtttctcatatccaaaccagattatgtctttttatttgcgactaaaactaactccaaggctatgaagagtgtgttatggaatgctcattcccataacatcttaacggttcctccagcaggctatgcgggggtttcattgtagcttagaaaatgaattcacctttgagcctatcaacttatctaagaaccgaatctctggtttagtgtactcagacccccatcagccacgacttctctcttttgtatatgaccctccttatgcctcttaaaagaaatttttatgtgaagacctcatgattctgtgtaattgcttccctcggccctagctaattttgggtgatctgaatattattttgaaataccttgatcttggaagtaattctcaagacctcatgttgctcttcatgtaatctatccttgctgatcatgctcttc

SEQ ID NO: 26398 - DNA, 2905 bp, Cannabis sativa
tttatttccttaaatagaaacatatttccttaaatagaacaggttcgaatgtcggtaacattggccaatatacctttctttctccctttaaatcttagtgtattgttttaaagaatttacttcatgtgcatgctataatcaaaaatctcttaagtgtctctcaattttctaatgacaaaattgttttcttttaatttcactattcttattgttttgttagagatcaagttactcggaggattttaatatttgagaaacttagacaaaggccattacaagtttgactccactcaacttgacctactttgatcaactccggagctctcttgctcatcaaactctcaaccttctgctatttttccaggtcaatcgttgtcttgtaattctcattctttaaataattcaaatgacgaattttctctatggcacaagagacttggaatcactcttttgtaattgtccaagccactcttgcctcttgtaatatcaagttgaataccaatgaaaacaacttatgatctatgtaatgcttgttgtctttgtaaacatcacaaactccctttcccctttttttttgtagcatttacagtgcacctttacaagccttacactctgatctatggggacctacccctgttacttcatcttatggctacaagtattatatatgttttgttgatgtatataatacacacaactggatctatatgttaagagctaaaaatgaagcctcacctaccctcattagtttcaaatcacatattgaactgcaatcagacgctaagattaaactcattcaatctaactggagaggtaaatatcaagccttcactggttttcttcaagaaaatgtcatcttacattgtgtgtcttgtccccatactcatgagaaaaatggtatagttgagcataaacatagatatattgtttaaataggccttgtctttcttgctcaagcctttttacccttaaaattttgggatgaagcctacaaatcagtagtgtttttaatcaacagaatgctcactcctcagcttggttacatctctcctattgagaaattatttcaggtcaaacctgactatttcactctaaaaatatttggttgcatatgctttccaaatttgaggccccataacaaaaataaaatggaatttaaatcttaaccatgtacttttattggctatagcttggcacaaaaaggctacaaatgtctttctaaagagggtagactttatctttcgagatgttctctttgatgaaaaggtattttcgtactctactaatgtctcatctcgtttatcttctccatctatccctggttcatccacattttgaaaccctccaattgtgtcatctcccaccactacaccaattgtctagcccccattccctaaccttaatcctatcaatcatgctacacctagtatttcctcttaatctgacactaaatctagtttgattgatgttgatattctatctactttacctattattactcatggatctcttgcaagctctagtcatcacaggtttacatcagcaactctagcagccacaataattacaacctcttctctaccaactgttgttcctgttgcagtatcagaagttgttattcaagttgctcccatagttgatcaaaccaccacttttgtacctctagtaggtactagtgctcactcaatgacaaccaaatcaaagttttgaatcagaaaaccaaaggttttgatggcctccatcacacccttcactataaagactgccttgcaagatccaaaatggttttaagccatttaaactaagcatgttgctctcaagaagaacagaacccggaccttggttaaactgtcacctaatcgagttcccattagctacaaataagtctttagagtgaaagaaacccctgatgttactattatcaagaaatccagacttgttaccaaagggtatcaccaataagctagtcttgacttcaatgaaacctttagtccatttgttaagcccatcaccatcagaattgtactcacgttggctatgtctaatggctgaaatgtccatcaacttgatgtggacaatcctctccttaatggtgacctataggaagagatatacatgactcaactagcagactttgttgatcctaatcatccaaacaaagtttgcaaattgtataaggctctttatggactaaagcaagctctgtgagcttggtttgatggttgtctactgccatacacagctttgggttttcctcagccaaaaaagatcactctcgatttgtcaagctctccccttaaagctgtctgtatgtcttagtgtatgccgatgagattcttataacaggaagtgattctcatcatatcactttgatttttgctctaaaggacttggggcatctcaatttttttttgggcattcaaattacttctactatagaaggcctaattttgtcccaatagaaatacattcaagacttattgtgcaaagctgaaatacagggtgttaaaactcaaaattccccaatgaacaatggtctaagactttctaactttggaagtgaccttgtggttgatgcctcagcttgcaaatctattcttgggacccttcaatatgcaaccataactcggcctgacattgcatttggtgtcaacaaggtttgccaatgtaatgaccgcgtagttaaatcatgggaattaacagaaaattaagaagttcaataattattatataattttgtgtttttaagtaggaattagggcttattgtcagaaataagtcttaggaaaatattttctcaatttaagagatatatttgaatactagatgcattaattatgttatatgtcaatttttatgaatttcatgttgtatgctcggcaacagtggaatgcaacgtgcggcc

SEQ ID NO: 26399 - DNA, 2855 bp, Cannabis sativa
atgtatttataaagtgaaaaagataatttagtaaaattaataatttggtatatggacatatatgattaatacatatgtttaaattaatgggagcttattaagttaaattagtttaaatatttttaattaatacttattataataattataataaacccacgagaattataaatataataattgattgttttcttttaattgatatttattataattttccttaactaataaataatatcattaattaaaaaaagtcgaataaaaagtacatagaatagttttgaattttgatagattttatggtgacaccttgagaactataaaataaatcttttggtaaggttgaaaaaaaaaatacttttcaaaatggaatatcttggctaaattcccacattgattgtttatgaacatatcattcttattatataaaacaaaaattatttacacaacataactttcttttaattatcaaatttatattgtttggtatatatttcattctttttaattttaattttgtttgatagaaaatatgaaatctcttatacatggaacaatgttgttgttagacaaatggtcccagatcctttataagaaaataaatgaaaaatgaaaaaaatttaaacaacagatatagcatgagaattgagaatacagattgtgtagatatatacagatcttaataaattaaagattgaagtagagtagagtagtaattataagaattaaaagaaatattatagttaaatattaacctccaaggtacatatgaacaccaacagctaacaagaagatacaaataagaacaaaatagataagagaatgaaccaaaatggaaaccccactggtttgaaaattaccaaattctacaaatttgcttcttcctgggatctgaataagtagccctggtgttagtaatatgaacagtacaactgccacaaaaactggcccccaatcagacatcttcttcttcttcttcacccctaattcactccacttcttctctcttcttcttctctctctatctcaatctctttctttcttttgcacagtttttcttgatgtgggggacatgattataaagttgtggacttactttggtttagaggaagagacaaagtttgatgactaggaaaaaaaaagaaaaatataaggaggagcagggtaatggaatcaagctattcttattcacatttttacacctcatttttccactttttgcaggaagcttcattgggtcatgttcacacctgtacttaccaactgccaaatattaccgttacacacattcttcactttggtttatagtaaattattatagtcttatgttttgtggttacattatataacagtagcagtacaatcgcaaaaaataccatgattattatgttagttgttgcgagataaaatttgtcagcccaattattataaagaagcccaaaaggcccattttaaaataaatattatatattttattaaaaatatatcctaaatgaaataattatacaggtggagggttgcatcctagataaatgatacattttggatgggatgacatatcacggatgagatgacatatctcgaataggatgagataccatgaataggatgacttatctaggatgagatgatgacatatcttagatgggttgacatatctcaaatgggatagaataccacggataagatgacatatcacagataggatgagaaatttcggttgggataacatatctcggatgggatgagataccatggatgagatgacatatcatatctcggatgggatgagataccacgtatgggatgacttaacttggggtgacatattttagatggggtgagataccacagatgggatgagataccatggatgggatgacatatcatatctcagatgggatgagataccacggatgggatgacatacctctgatggaatgacatatctcggatgggatgagatgatataccgcggatgagaaggcatatcttggataacttatcatatctcggatgggataacttagcctagaagggatgacatatctcggatgagatgacatacttctgatgggatgacatatctcgaatgagatgacatacttttgatgggatgacatatctcggatgagatgggatgacatatctcggatgggatgagatgatataccacagatgagatgacatatctcggatgagatgacatacctcggataggatgacaaacctcagatgggatgacataaacataaacaagacgatgacttgcatccgagatgaaagatacatctaaaacagatgacttgtgttcaagataaaagacatatataggatggaatgcttaaatattcttgataaggaagttacacatcttgcataagagagatataaagtatggatactgaaaagagaacaaataacacttatcgaagtatgtaaagacaccgcataaaaagtaatggacacatgtctgaataagaccttgtttggttgacgcctaaaggaaaaagaaaaagataaatagaagagtaagagagaataggaaaggggtcttttgggctaaggagggatcaagaataaacagagagtaaaaaattccaaaaaaaaaaaaaatacacgttcttgactggtttcttactactaaaaaatagtatctcggcgggcctgacctctccagaataatttatttcggtagttttttcccttgaaatagaatggagggtctctcttagcggttcttgcaagtgggcaggcattctttttcaaggttgtcgagataagttcaatcttggcacatttttagacctttcttcatgttttaagatcgtcgagattgattaattcaatttgcg

SEQ ID NO: 26400 - DNA, 3160 bp, Cannabis sativa
acataaaagggtgtttatatgttccaatttatattttatggattgcccagtaaattcttgttccctttaaaatatatatatatgtatatatttatatttgaaaagatgcaagggaaaataaaacactgattaaaaatcagcattcagcacttaccaattagcatagcgataatctggctgaagataaggattttcttttgaagaggttaattatgggcttcttctttggtttttctttgaagggattcagtgacttttccttgatgttgattagttggagagatgatttatgattttgtttggtcttttttctatcatttttcagtgttgcgttttgttgaatctagtatttttatttgtatttcccagaaattttaaaaaagaaggaaataagtgaggtaaaccttgacttttgaaaaataacatgattgtgtaatgctgatggttaacaagccctgtattgtgttctaggtaagagagatcagcaaccaatttgctccagaaatcacacgttggcaggccgaagctttagttgcaattcaggaggtgatatttcatttcccatataatgaaaaaaaaatctgatgcatttcttcctagacactctttaaaatagaaatggatgcacttatttactgtgagttttacatacccaataatatcatctttctgaacctcccttatttaatcatgccttctctattcaggtttgttgatacatggtagctagttgttacattgcttgagatagcatgatttgtctactattatcctattaatcttagctactaattcagactgacattgattgtgtataggattccagttagctttcttaaatttaggttgaaaaaaaatactgctgattaatagcacatgatagctatttttggttgcaattacacatttttcaattcaattttttgtttgtttgtgaatagacattcaataacattcttgtaattcactctgttttgatgacatttagttttccttggaaaggaaattgtatactctctctcttttgaggacaatttttaatatttgcaaatggctagttcactaagactaatattccggaaaacattggttctgtggaatctggaggtaaacttgttcttttgtttactgttgttcaagaaaaccttagacacgaggtgctgatggaaccactgcatgcataacatgaaattcctcatttccttatttgaatttcttttcctaaaacactgattttctttttctcaccatctatatccaatgaagtttcacaatatcaaataataactaagtcaatccatgaaatctctgttactagggacccttttagacttgaaatcattacttactatttaggtatcccttgcaggcagcagaagactttttggttcacttatttgaagattcgatgctatgtgcaattcatgcaaagcgtgtaactcttagtaagttcccaagttcaattttttccttattgtgcttagctttattttaatctccacgtgctatttctattgaggagtattaaattatgaggccttacctattggaatttggatccattagtctttacttgttcttttcctttccttacaaaagtaaatataattttcaatgtaatgtgttggtatttttcttactttcactctaaacatgattatataaatatgagccatattttgtttcttatatgcaaatgctgtaactatccaagcataatatgggctcatcaccattacattttatcgcctttttctgaaactagatagttatgaaaagttaaattcaatggataaaactgggaaagtcctcaatatgttgctgctgtttttgtattggttgattaagcagtctgcgttaagttggtattgcatttgttcaatttactgtttccttatatttctggacttgtttcatcagcctatgggttaagatgaccattgtatttcctactgattctaacaagttgtttcgacatttttgttgcctcagtgaagaaggatttcgagttggcacgtcgacttggagggaaagggaggccttggtaaaaaagcatcaattatttaactaaatgcattccgatttcgataactaccatttttcattcagttgacatttgttgtctaacacaagctaccaatgttcatgcaggtgagattcaccatatacttgtaccaagtattgtatcatgaaaaatagggttcaccaattaaacttgttagattctgctattcgatttaatataaccccgtatgtaattttgtgtaagagggtatgatgcaagattatttcagatttcatattgctttgctgtctttccttatggataaacctacattcacaagtgaagattgcatttacatttgctcatttctggtagggtaatgtttacatatggagtattttatttatttatttatttattttgctattggccaaataaaaagcacaaattggtagttgtcatttgcttgacattataggtactgaaaccgttaattgtgtaagacttaatttcatgcttttaccacaagcaattaaaaagagaaacaagcccatttactacacgcatgctccatggggacaaagctatgattttggttgattgacattgaagttatcgttatggggatactattataataaattatctcttaattaaaccaattatatgtagtaactgttgataatgcacaatgataagaatggagtagtagattgagcattcaaagagataattactgtaaaaaagagtaatgctacacgctttaattcatacaggtttttttagtttcttaaggtttggcagtgcagttctttcataattttttttggacaatcaagtcgtagagtttagaaaaatagaaacaatcattgagcctatttagtttaaaaaaaaaattcaatttctttttatggataatatttgattttttcttctataaatatttgacatgtttgaacatttttcctatagaaaaattcaaaaaaattataaaaaaaaatgaagacttgattgttattgtctatagaacgtaagctattaaaaatagaacgtaagcacttgattaacaagttttttcaaatgctaaattaccaaacaggacaaaactcagggtataatctatcattgttaattattattaataatatattaata

SEQ ID NO: 26401 - DNA, 2068 bp, Cannabis sativa
tatatatatttgtatttgtctttcattctctccatttttgggtggataaattatggtagacttcatcccaattttttatttacatttttgtgttccatccttttttctctcatatcaaacactcatttttacttttctctttacttttctttctacttttctatgttaactttttcttaccaaacatagggtactaaaaataatgaattttaatggtgacaaacaaaataaagatcagtgtggtaaatatggaaggaatgattcttctaggacattataaaattttgtagttttgttaagtgaaaaatgaatttgatctgaagtaatatttatgaaatcatggttcccagaactccatgagcaaagacactgagcaaaatgcaaggaagaaaacattctgtataatgcataataggccatataagagcatttttaatggagtgcattaaagatagtgtatatgtattgtttagtttatctttataaatttaactttaatggtggtgtatacgtcggtaaaatttggtagatgctaaaagttttgttaaatttagcttaaaatataacatggccaaatttacactataataatgttgatcccaaatatttcggcctacttttccttattaaataaggaaggctcaaggcccaagaaggaatagcctagtccaactgcataaaaaatgaaagacttagctcacatgaggttttgctgatcatgacggaggcatgaaattatttttgtcgacgccatcaatcctttgaacaggaaattcgcaaaaccaaattagttagggtagatgcaaagtctggaacccgaaattcaaataaccattaagttggttacattgagctggctaaaaagttttcatgccttcagcagagctctactataaagagcacggaagtgtaacgaaaggggttggattctctctctaaattcaaattttagtttttctgtattttctctctctaagctagaatctcttttgatttagatatcgaagagtttttgctgaaaaactcccaggctctagcaatccaaatagaggatcaccggagaagaaagcataagaagagcttggagaagattcaaagggatctgcagtggattagagaatattcactttctaaatttagcaagtattcatcgatcaaatttttaccaaaacaaataaatatcacaatttttatttactcttttatcactcaatgtaattgataagtttttacattttatttatatgtttaatagtttacagatactttcaataaaatttaatatttttattgactttttaagttatttttaaatctaatgcattgaagctcaattgtaaaatttgagtcaaatataacattaatttagattttgagtcaaatttagtgtaaattttgcaccatctattggagattgtcttctactctcataaacatgaacataaaatcataatattatattgtaacttgctaaaaatattattttttggtcattatctaaaatactcttaattttaataaactattacttaatcaaaattttagttttcacacttaatttgagaaagtttcaaaactgattatttgtttatttattttcatattcaataaatatttttacaacccacatcttcatcaataagacaagtctttctaaatacaataaaaatcgctaaaagactcaaaacattgattctctctctaaaacaaaaatgatttgtcttttctctaggactaggatgctatacttgtgcatctcctctctcttctcgactaaggattgtcgtcagtcgttggtcgtgtgtctggcttccatggctaaggggaggacaacattttcgtgtgggtgctcgtaagcagcatacaagtgttccttaggcagcgcaacttcttctcccttgtggtcgttctagagttccgttagaaatgtaggtcttcgatggatctacccagatctgtcagatcccatgatatccttagtccccttttcgtatctggtattatctccatgtgttttggggctcgaggggttttggagaattcatatatgctatcttttctgtttctt

SEQ ID NO: 26402 - DNA, 1590 bp, Cannabis sativa
ggtgttctttgccgtagagtaattattaacttttcagtcttgttttatattgaatggattgtaaatgacaaataaggcaagaaatttgaatgaaatttgagatggagatttcaattttctatatatgattgatttgtgaccactttgattcattattcattatgaagtttacgttggcatcttctcggaagaactgtgcactattttttttattgactactttgattatgattattcattatttttcattgtggagattgtgttataattagagtgactgagaattatttgattttttttcgtgtactgtagatgtgaacttggttaaatttgagttcttaattgttgaagagatagtacggactacaaagcgaatggtcccctttctctttgttagatgagatggtgttattcttgtgtctcctcctttgaggacatcttgattaattgtgtactcttcacatggaaaacctgtaatgatcgatctagtgaaactgctactatgttaatataatttcttcttcttcttttttattagaaagaacgggttttgtgatattttgtgatactccctattaaggttgagaagttcagttgtacttttaacatggctgaaatgaatgaaattgcttaaattttaaatttgtgagtgacatcttaaatcaagttttcaatggtattatgatgttgggagtaatgtttgggttgatgcatcagtgggcaatgaatacctcttcaaagtctacctatcatgcttcttgtcatgtttgagtaaaatattactctttattggcatgtttatttgttgattttagtgggttataattctgtgtcagtttgaccaatataatatatattattttttttttaattataacctatttctgagttattatttattacttacttttactcattttgttgtcaaaccatttttgttttaacttatgtatcaatatttttaggactaatttactcttttttttttttcaaaattagaaccagtttctgaattattgtgtgttatttatttttattcattatattatagaaccagttctattttaattataatcggtttgagtgattttgtgttaataactcaacctagttataattaaaatagaacctcttctataacaacgttataatgaatagaaacaaataacacgaaataattcaaactggttataactaactagaaccggttatttaacatgatgaatatgttttttagggtagatatgatatgtgtgtaattatttggtgggttggagcatgttgaatgagtggttttgtttaagttattttatttaactggtttttgtgtgtgagtttttatcttagttactttatggaatcattttttttgtctcaaatttttaactagttgataaatataaccgatttctttatattatctttgagctattgtgtgttattatttgtgtttatttattttgttatgaaattgattcttttcatatttatgcctcaatattttttagaattgatctccacttttttttttgaaaaaaaattataatagagtttttgaggtattatgttttatgaggtattttgttgtgg

SEQ ID NO: 26403 - DNA, 4268 bp, Cannabis sativa
agggttgttttgtttgttacaaattaacattacagctgtacatttctgttacagcattggttagtctcaactaaccatttcttgattgtattgagctatgcaaagctcctttcccattctgtaaaatcagttcagtaataataatacctaagctctgattttcctctgtttttctctattctttctcatatccaccgaacccattttgaaaaataacaactttgaatacaatgaatcgaattcaaagacagatcaaaacttgggtttgttgggttgaagaaacccaattcaaaaacttggtttgtggaaaccatagagcacatcaaattttagagaaagaaatgatgaagaaccaagagagagaaactaaccaaacaaaaaatatataaaaaaatcagaaataatataaaaatagagatgctcaataattcagtgtttctcactcaaacaaaacacaacttcatcaaatgagttgtcaacttcttatagactctgagacacaaaatctttttaagggatcgtataaaataatcccataaatatacacattttcatgaaaaaaataattataatttatttacgtgtaacaacagacgctaaaaataaaatatatattatatgcacaaattaatatatgtttcaagtatatgttttaggttagagaagctgaacattggaagatcatcagggaaggctaaggtgttgggatcactagttggaataggtggagcaatgattctaaccttgtacaaaggagtagaaatcaatatttggtcaacacacgttgaccttttaaaacatggtcaacatcaacagagccacgaggcatcaccaaaggatgagtatggtaatcgcatcttggggtgcctattatctgtgggtagtgcaacaagttactctttatggctcatagctcaggtaatttttacttcattttatgtatattgtatgtataaattttctttgggaaaattgagtttgtatatatggttgaaatgacatactctatctataacaaaaatgtatcacataatctttctatcttaaaaatatactaataattcaaattctactcacaatagctctctcacaactaaacattcatatttctcttcaccctctcactctttgtctctctctctctctccctctcttctgctatagaggatgcgcaaccaccatcactacctatctcattcaatttttccttagtttttcttcttccttttttttcattttatttgctctatttttttcccttcaatatctcatctcttaagttatccatgataattggaaaaagaataaaaaaaaaatactagataatagtttctcataatttagaactaagacccacaaaaaaatttaagtaaaacactaatttatatatttcgagcaaatttgagcatgatttttaaagcgatgttgtcatatcaaaaacttgaatttttttaaaaggaaaaaaaaaacaataaatcaaatataacttgatatagcagacaatgctccttgatgccacttggatggagcatttacatatatccacctataagaaaagaaaaattaaaacccaaataattgatgaaatatatttaggagataaataattaaaatctagagcatgagtagtaaatttttaaagaattttgaaaatgaagaaaaaattttatagcatctgatgtaatatgtctttagttttgttgtctaataaatatttttaagaatgtctatattattgttaaagttagtttagtagtttttagcattctgttatttctattattctcattagttgtcattttcttttatttgtttattaacgactggtgtaaacactgttttgtaacaagttgtataaaaagcttaacaactcacatcttacattgagatttcatttcatttcattttgtttcttcttcttctctttctaaatcctatgctcttacatggtatcatacctatggctgatcctgacgatcctcgcaacaacgctccccattgtccactagaagctttgatcgctcctcaggctgccgtaccaccattttaaatttagaataatattttacctctgaatatttgacttgatcgacaaaattactcatactggcgctccttaattcttccctccattcgtgtgcgtggacttgaaggaattcttcttggcaccactccacagctagatcctcttcttgcaggtacaaacacgagaaaccttgcatttgattattggactcattgtgatgctctgctaataagttgagttatgaattctctctctgaggctatacttagacatgttctccaatatgaatccgctattgatatgtggaccatctttgctagcctcttcaccactcaattgaaggattctcagcttcaactttaacttgccattccgaacatcgagaacggatctacgagtgctgatgagtacatcttgaagatgaagaatttggctgattcacttgcagttgtgggtcacaaacttttagatcaagaactggctatgtacattcttagagggccatgaatatgaaatggtggttgtcttacggactgtaagagttgatgcactcaccctccaagaagtccaatacatgctacaaaatcaagaaatgtgcattgaacaagctgggccccagcatttggactcagtataagccaattatggtcaatttagcaagaattcctctggaggtactcgcaacaccaacacaagcagaggttaataaaatggtcgtggaaactcacaggtttgaggctctcaatctggaagtcgtggttactccaatggtcgtcgacgtggctctcgtccagtttgctaaatcttgagtaagattggacatcttgcttacaaatgttatcattgttatgatacggaacctcaaggtagctcctccgattctcagaatcaaggccacaatccacaagctcttttgtctgattccaataccactgctgaagataatggctggtatgtggaaagtggagcaacccaccacatgacctcagatgctcaaaatctcaaaactatcagtgattacaaaggcaaagctaaaataatagttggtaatggttctcaaatttcaatgtctcatataggccaaacaacatttcatacaaattaaataatccaaataagaaattactactcaatgatgtgttacttgctccaactattactaagaatttaatattgagcatctctaaagtaacaactgattataatatcaccttactcttttactctgatgcatgtatgatcaaggataagactacacgccaagtacttctttagggccatcttaaagacggcttataccatctgaatctttcacaagctagagtcaatttacctactgtttacaataaaggagtgactcccatacctgctgctttcaattgtaccaagaataagaatgttgaaaccttctctaaagctcagatttggcaccatcgacttggccatgcttcatcaaggatcttgaaaagtgttctctgtagtgccaatttaaaaatgaaatgtaattaacttcctttttgtcaagcatgtaagtatggtaagctacataacatgcattttagtagttcaatacctaaaactacttcttgctttgagtaagttcatacagatgtatggagataataattttatagttcaatggaaggtttcagatattatgttagttttactaatatttttcaaaattcacatggttctatcctatgaaagcgaagttagaagttgctgccattttttgacaatttaaagcttatgttgaattatagtttaatacaaaaatcaaagcagtacaatcggattagggtggtgaatacatgccattacagtccatacttgagcctttgggaatcaattttcaatacccctggccccatactcatctgcagcagggtcgagcaaagaggaagcatcgacatgttgtcgacatgggcctctcattcgagcacatgctaacatgtctctatcacattggttggatgcttttacaacttttgcttacacaatcaatcgtcctcccacaccagtttttcaattcagaaatccttttgaggtactctttcatcaacaacttgactactccttccataggaatttgggttgtttgtgctatcctttactactacctgattagcaaaacaaacttgcttttagaacaacacattgtctatttcttggatatatcccttgtcataatgggtaaaaatgcatgcatccttcatgccaaaattatatagcaagaaca

SEQ ID NO: 26404 - DNA, 3074 bp, Cannabis sativa
ttagctattaatttgagtgctaaagcctttgtgtccacgtgtccttgtctggttagtccacgtatattgggcgaaatcaggggcaacaggtataataccaatataacttattcttttgccattgtgacatccttgaccagtccatcgagtttctactattgctgaactcaaaatattttatttccaaaatggtatatgaaatacccacatgttccgttcaaatctctgtaattaataagttacgcttaattattcatttacccaaaaattactaattagctcataattaacttaagtaagaagataatcctaccctaaaattcatataattatatatttaatcaaatatgttcaatttaacataattataatttttgggatacacacactttatttataaaaataccttcataaggtgtgggcaaaaattttgtctttaataagcttttatttaccaaaataccacttacacatatccattcatgtcagtccaaatatcaacttttccttttttttttctcatttttctttcattttttatttttaaatttagcattcagtttctttttccttttctttcttagttgttcatttcaaaaccaccttccggccattactctttcgaaacccacgttcaaaatccacgaaaaccacttcccagccataacattttccatcttcttcttcaaactgcctccctgatcaattttttttatatatatctttcatttcgtatatataatagctattacctgtaactctgcttctccatctctattgccaaaaaaagcttcaaaaatgggtcataaatcagttgctaacaaggctaaagggaaacgccaagtcatcaatgatgatgactccgattttgctccccccgtggctaatggtgtccgtcatccagtgaagaagaagtcgaaggtgtctttgcctaaaaaaattccgattctgacagccaaaaggggaagaagaagtcaacttccaaacaactgtgatgaaattataatgcaacagttatatctattgcgagccacctaacataaaactacaaaataactaataattctacatattgaatacaaacgaatattacaataatagtgttttatttgttcaggtcgcgtatttgacaatttcgagttctgtttttataatactatgatattgtagtagcgaaactattattcaactaatgtgtaacataattgcaactagaaatgttaaatgtgaatgtgtatctataagaaactatttgtcagtattttttttcattgattgataattaattgtaccttactagtatgtggagatccaattgttagacctctgtaaactaactttatatcaactaatttagtatattaataaatttaaacatgttataaaagtttctttaaagagttttgtattgtattgacgatatgaaacacttgcaaatatgataaaatccattgtatcgttatcagtttgtaataattgatatgtcaagtttcagagagttagcaaaatatttatgtaactgttatgaaacataaaaacttggaacaatgtttatgcgtacgtgactctatctacatgtgaatttactattctattcctgatttaatatgaataaattcaccattggaaatctagaaaacaacgaaaatacattgggataaatatttaactatagtattgatgtaatattttttttttttggattatacccgagttggattgtttgggaacttcagttcaactttttgaaatctatattttatgaatttgaaaattgaagtcaagacattagctttatgcaaattaaaccagatttatagttgaattttagttttgtagtagttttctgtatttttttcatgaattcaaaacaacctttgttttgattgattctggtcgtcttcccaagtgaagtcaccggaattaatggtggttctcttctggttgggtttcgtttcaattatgttgggttgctaggttggtcgatcaaaagttgcgtacataaagttgtttcgttccgtacagctgaagtagtaaaaaaagtgatattttactaatatttaatttataggttgtattaatattcataggaccagtcatataaataaaaaaaaattcctataaatatattattaaaaggcacaccttttatttatgatcacacctttttttttccctactgatcacacatctgaaattgataaattaacgactttgcgaaaaaaaaaaattgataaattaatcattataacaaaagagcgagatagagatcgcagaagagtcggatagaaatttgaaatggagggtgaaatcgaaagcttcatcaaggtatggatcatagccatattatgcttcagttattgttattacatatcatcaagattaccaaaaggaataaccagacttctttctctcctaccggtcttctacctcctcattattctccccttagatcttcattcttttcaccttggtgctcccacaaccttcttcctggtttggcttgctacatttaaactcctacttttctcctttggcaaaggccctctatcctcctcaccctcgaaaaatattttccatttcattgccatagcttcccttcccattaaaatcaggcaaaacccacctcaaaagtttatcaaaaataccataatcaaagagatcaacacaaacccatttgatccaaatggttcaagagtgcctaagtcaatcttagtggccataaaagtcttgcttttagcattgataatcaagacatacgagtatagaacgtatttacatccctacttgactttactcctctactgtttgcatatgtacattggtattgaaaccgttttagccttggttgctctcccggctcgaaccattttcggattcgagctcgaacctcaattcaacgagccatacctcacaacctcgctccaagacttttggggccggagatggaaccttatggtctccagcgtcctacgtgagactgcctatgacccaatacgacgggcctcgcttgagataattgggccgaaatgggcccaatttctgggtgtgatgtcgtccttcgttgtttcggg

SEQ ID NO: 26405 - DNA, 2038 bp, Cannabis sativa
ttaagtgtcaccttttaattatcttctagatatgttatcttccaattaacaagacactactaatattttttttagcatgattcactatatatatatatatatatatattactatatatttagtctcaatagtttttttgataagtctcaagtctcaatagttaatatgtatatgatggatatactcacacaacataccatggatcttcatcacctccaaacttattacaccctatatattatatatatatatatatttagtcaattaatatttatatataaacgtacatacaaaaggatcaaatagtcatagccatagacaaacaatatcaaattatatatatagacgatcgatcagaatattcagaataatcacgagataagatgaagtaggtgctttagacaactagtactactgtgtagttattcatcatgagtaattaatatatatatttgagcaattaatgctctaaattaatttcatacacctctctctctctctctctctccctctgtaaatgtatattaatttatacggtaacataaaacacatacataactaacttatcaagcaagcatacttctctgttactttactttcaaacgtgttttctaataataataataccattaccatgcaattctctccttaattatcatattattttttaatttatttttaaaatgaaagaaaatctaaaaacgttgtttgtgagtatatgtataaaagccacagtagctaggttggtgtctgaaaatgtgatggtagacattaaagctaagcgtatatgaatgtaataaaaaaaataaagagtagtgaaaaattatggtggatgatcagagagaaatataactattactactactattatatatatatatatatattgttattattatgatatgatatataagtaaagagagagtagtagtagtagtacatagaatacagataggcaaatatataaaaggtcgagagtccaaggtgtcccacgttgcttaaatgtgatttaaagaaacataataacaatgggcaccgcttacagtggagacacccatccatcgcacttctcactgcctcctccttctcctcctcattctccttattcttctcctcatcctactaatatatatttataatatatatacataccttaattaagtggtacaggaattgttggctgtcaattaattaatacatgaatatgtgaatgtgaaagtgattattaattaaataataatttatttatttttttgaattttacttttttggtagctacggctccaatcacatgggacttattaagcatgtcagatcgatggagttgggggccgacatctctgttaaactaaagtcatctgacaactatagcatcccaccacccctcccttctcttccccctaatacatacttatatacatatacatttctacattatatattcaaatctacctacctaccttcaaaaaaaaaaaaaagaataaattctacaaattaaaatgtcataattgattacaattttccgcatactttatatatgtacatattgatttttcttaatatatatagtagtgatcatatgataatcttttcatactaaaaacaaaaccaaaaaaaaaaaaaagaattgtatatatggtaaaattgatatatggaattaaatgtaaaaaaaatattgaaacagctaattaatcaattagatatatcaaaatatagaatattacagaatatatatggggggaaggtgggattatataatattattattaaggtaataattataatgatgaaatgagaaaattaaaaatagaagaaagaagtagattaagggaaagatatgggagtgagtttagagattataataatatatagaatatgagttagaggagttaataaggaaactaataagaaaaataagagagctttgtagatgtacccggcccacccccacacactcacactcatcatttcacccatccctcttgcatgttatatattatatgttatgttgtaatgttgtatacatatattttttatt

SEQ ID NO: 26406 - DNA, 2691 bp, Cannabis sativa
  modified_base (1023)..(1025): a, c, t, g, unknown or other
ataagttttgttgtaactaaaagtaaatttttttataattatcgaatctcatataatttaatataataacttttataaaatattattaaccaatcataaaatactatttatacttacatatttttataagaatgctctaacaagaataagataagtccatgtgatatgtgcacatgttttcatatactaccgccacatctttttaatttcttctcacaagacaagagtacatacatgaacctgcaactacacatctttattattatcaaactattttggttgtatttttaattatttaattttcatatattatatttatttatttatgtaagtatttgcataattcagctcgaaaattttctaatagtacatgtatatttctcttttttatataattttggactcttatttcttaaaataatataaaatactctaaatttaatttttaattttttaaatataattaatttgaagataatatttagcatctataaatacaaaaaaaatataatcattcttattgtagcacttctagttcgggttattattagggatttttacaaaaaatactagattttaggtaaaacttttcaattttactgccacacagcagaaattacatttatattgttctttttttttctttcttttatacggtaaacacaaaaaaaataggtctccatcttccatacccacagataaaaccatcacaacacactaggacaactggaaaacaactattaaatattccgatgagattgaacaaaaacagtgaaatcgatgtcaaataaataatcatggtaaaacaactttaaaacaacactaaaataaataaaaaaataaaagataaaaaaagattaaaaaaaactaacaatcttctacacagtctcaacaccagatgcaatagcggctatatttgcaagcccagtcctagaaaattaaaataaaaaaactactaaagcaaaactaaaataacacaaaataaatgtaaaatagtgaagcagatataactacttaaaaaannnaaaagaaccacacacctcaaaactcttttgtcagtgaggtcaaaactcttttctcacaatccaatttaatcttttaataaaatagattgtcaataacaactttaataaaatagagagtctaaaataatatttatcctaattaaaacatatttaaatctatacacataaatgtaatggagaaataataaagttatacttattaaaaacattattacacatttgtaattggtatagttcctctaaataaaaaggtctcaagtcgagtcttcaagaaagctagtcgtcgtttggaaaggagtttcagaatgctagcttgaccatccgaaagaagtcttgtggagagctggtctggagagttagtcatcctccagaaaggagttccgattgggtaggtgtttcctctaggaaaaggttctggatagtctgttctagtaggctttgtgcctatctaggacgtctttccatattgtgcttcattagtttgggacgtccgtccaagaagtgtgatacttgtcctgagagatcttgatgccaagagttgacttggagatctcactataaggagcctgttaagtcagttaagtattaaccgaattaacattcatatcctcagtctataaatatagccatcctcttcatttgatacacggcacactagaagcatagtatgattgagaggtaaagaaaaaaaagaggattgggttttggattttgtaaagaggaagcttctgtagatgaagaagcttctttgggttttgcaaagtcagttatgctttaatggaaacatgcccgtgaaaagcttttcaatcctcttttagtgccacgtgtagatgtcactggtggtgtgaactagtctaaactagaagttggttttattaaaattaatgttgacggtgccttatttgccgctgggggtgcttacgatggtggtgctcttacccgaggtgttaatggccacatcattgaagaatttgtaacgtataggattggtacggttcaaccaattcttgctgaaattatgagtatcaaggaggcctttagttgggtggagattaagcaatggagcaatgttattgtggagacggataacttaacttcaatccaggtgcttaatatttcaatataaatgccttctccttttgatttacttgttaaagattgcaagctcttattaaactcttttgttaatgttgtttgttcttttgttccgctgttaacagagttgttcactttattgctaggagctctcgttctttgtcaggttatcaaattaatgctagttaatgctccgatattacttcatgatattataatggctgatttagcttgaataaagattacttcttttcaataatttatgaaattgtatgattaccaagtgaaattgacaagtaatttaattaatgataaattgttgtaaaaattatttgaacataattgaaattttttctataaaaactgaacctaataaatccaaataaaagtacagaaagtaaaattgcagaaattaaaatgacacacgatattttatatgtggtatcagtaatccatgcagattactactagtccatgagatcacgcttaaaattaagattcattagttaaatttcaacaagtacaaagtcataatgacttaaacaaaacatagactccttctaatgatttt

SEQ ID NO: 26407 - DNA, 5496 bp, Cannabis sativa
ttaacaaaagtacgacctatgtaccacatgcactatatactgctactgtactagtgttggtagggttgaactgaaccccgtgtaccgctgaccctgagtgttgtaccacatgcactacgtacttaaccgtactagtgttggtaacaccaaattgtaccattaaacatcatgtgttgtatcaatgcacttagtacctctaccatactaatgttgatagcatataaatcatataaataacatacatataatacacatatacaaatacattttatgctaatcttatctcgtttttgagttcaagtaagttggtcgacctgaatggaaaattatgcactaaacgaaggccctatatcacaatcatgtacaacgaaataacattctaagacttttctgaggatctaaactcaaaagtagaagtttccctattgataaatagtatggcaaagccctaaatatcacgagaaaaatgacttagcaggaaaatttcccgaaaaacggcaagccatttctataaaaacggcgagctatttttctggttctgcactatttttgatgaaatggtctgccatttttcactgtagaaaaataatgagtcccaaaacaaccccatgtcgaccttaaacattattacaagctccagatcacctgtagacatcacaatagaccaagaccaagcaatagaacctcaaaatacactgtaaaaataaaactaccattgttgagccaagtttgagttcttgaactcgaacttgctcaactcaacaaataaccaccaaaaccacttgaataaagcttaaaacatcacaactaaactatagaaaataacctagaacaaccctaactcggaaaaaagcaaaatcactatttttgcatgcttaaactataaaagaaacttgaaagctaacaagaagagattagggttcttaccttgggttacaccttctgaattcaactagaaatcacccaaaaatagagaaggaaatcttgattcaactagtttcttgtagggtttaaatagagagagagagagagagaggacttcaattttaattttttctcttttttgactagtaaatataaacttaggttttttctattatacacaatcagaaatgaaattccaacaaaatccactaaaggacaaaatctcactaaatggtaaaattctaattttgccccttgcttcacacttaagcaacttataagtctatgggtaaaatggtctgaaaccataaccctgcctaatcccaataatccaaatatcaacatatgaatactccactaaatgaaaggttctaaactcacccatgtaactttattggccatccgtcacattttccattatcaacaagtcaaaatcataaaaattattataaattttacatatgacataaataatacacttagagtttaataagatctctgaaattgagaaattataattctaatgtccattttctgaagacaggacccacaacatataaaatcattcataatcataaaatatcaaaaattaatgcttaatcgcctttactaatctatatctaatcatgtggtcattataattatcctcccgttaaaaggatttcgtcctcaaaatctaacctgaataactctggatattgagtcttcatgtcaaactctagttcccaggtggcttcctctaccttgctattcctgtagagtactttgactgatgttatgacattgttttgaagaaccttttccttcctactgaagatttgaactggttattcttcataggatagatcttattttggttcttaggcttcgtaactcaagacatgagtcaggtctgacacatattttcttaacattaaaatataaaatacattatgtacagccgataacgctggtggtaaggctagtgaatacgctacctgcctgaccttctcaagtatcttgaatgaccctatgaacctagggctcaacttgcccttcttcccaaaatgttttatacacttcatatgtgaaactctcaagaaaacatattctcccacctgaaattcaatatctctacgtttaggatatgaataacttttctgcctactttgcgaagcgagcattcgagccttgatcttgtctattgcctcattggtcctctgaactaactcaagacctaaatactttatttcctcggtctcatcccagtgaattggggaacaatattttctactgtccaacatctcatagggagtcatccctattgtgctttgacagttattgttgtaggaaaattctatcaaaggcaagtacttgctccatgaaccctaaaagtctgtaacacatgctcgtagtaaatcttctagtatttgtattgtcctctcggactatccatctatctgagggtgaaaagttgtgctaaacttcagctttgtacccatagctttatgaagactcacctaaaatttcgatgtgaatttcaaatctttgtttgaaatgatggattttggagctccatggagacttactatctcttttacctacaactctgcatacttatccacaatataagtttttttactgacaaaaagtgtgttgactttgtgaaacaatccactatgacccatatttggaatcatatattcccgtggtcctaggtaagccaacaacaaagtctattgtgacatcttcccatttccactcaggaagcgttaatggttgcaataaccctatccgtttttgatgttctgtcttgatctgttgacaagttaagcacctcgacatgtattctactatgtctttcttcatttcacacaaccaatagcagggtttcaagtccttgtacattttggtggtacccgtgtgcagtgaataaggtgtaatatgagcctcatcaagtattcctttactgagttcaccagtactaggaacacaaacctgagccttgtaaagtaacattccattattcgagattgagaagtccttaggctgactcgccaatacctcttcttgaatcttaactagctctgagtcttcaaattatgtctttcaattctttccaacaaatatgactgaagtgtcagattatgtagttttccaaccacaaactcaagtctaactttaaccatgtctgaagccaacttaggtgatatcattatggtactaaaaacttacccataaccttttctgctcaaaacgtcaaccactacattggctttccctagatgatataaaatctcacaatcataatctttcaatagctctaaccaccgtctctatctcatatttaaatctttccgagtaaagaagtatggtctgtataaatctcatacttctctttgtagagataatgttgccatatctttagggcaaacacaacaacagtaagttataagtcatgtgtcgaataacgcttctcatattccttcaattgatgggaagcataggctatgactctgtcagcttgcatcagaacacaccccagaccctgtctagatgcatcacaataaacaacaaacttttaagggatttttgatgcacttttcctattttaaaactattaaactattaaattttgatccaatgacgaataataaatgataaatttgagaatctatacttaattgaactatttaattttaaaatatatattaaaaatatttcttttaacactatatcaaaaaatgtatttatatataaaaataaataagtcaaaatcaacattttttttaattattatttatttcagctgatggtacaattccaacccatacaaaaaaagagattttttaacttagataaataaattaaacataaaaaatcaaattttcctaataataccctttaagagtgctgcactcgtatatatatatatatacatatactgaaattgagattgctcgtgcccacctcctggtaattgtcatccctcaatcactaccttttccactaagtgattccttagggaccttagcgtacctgttgtgatcattggttcacatagaaaccatgtcttaggtgcattaaaaaacactttttgggaagtgtaaggagactatggctcaatgaaacttctttgccttcgagttttctaattcaaaatttacttagatatttttttaaagcaatttctcttactagtagaaattagagagtttttttaggggagagtgacccagcaattacaaagaacaagggcagaggtcacttctagaccaactccaagtgtcaactaacccaatagacacttgggcaagattgtgcgcaattgtattcctttttcgactaacgtgtgaaaggaaaacaatggggaaggaagctaacacttctttaagagcatcaataagagctccatattttgataagatgttgtcttgagatttgatgtctttgacaaggttcaaacagtcggtctccacatggtgaattaaaatgtgattattttaacaccagagtaggccttgcaatgcttttgcactttttgattgcatcattccatgattgcttttggcaaaagcagctatgatccgtcctaccaagttacaaaccagagcacctgcatttgttttctcatcttttgctgaaaccgccccatccacatttagctgaaactaacttgcttcagggggtccaagtgatgacaatggtgtcttcctgggcatgtttaggctgaatgctttgtgcctgcttatatgaatgaagatagtctgaagccttttgataggttgtaaatagttgtccttgcaagtgtctaaacacaaaagagttcctgctattccaaattttctagagcatacagagaaatgcttcgaattcattgttagttaactgagacttattattaatcaaagtatcaataacatttctctttttttatgtttttactatagagaagtgaaaggtgtacctatccaagccttttggatacccctacattcaaataaagcatgttgaggagtttcatacatcaagggcataagggagtggggctacttttcctaaagtgcaaattttgcgtgtgttggaagagtgttattacagagtttgtgagtgaaatgcttaatttttaaggggagattaaggttacaaaggaacttccaccagcttgcatttgagtcaggattggaggttgctggtttactagctctctttagtctctgtgctaaatggttgcttaggttgacagtatagtgccctgagttagtaaattgccaaaagaggcaataaggtctttgaatgttaggggatgataaggagagaatgtcatgtgcaatgtccttagtaaataggtggttgattatgtcgacattctagtttttagagtcaaggatgaggctggagacacaagtctgattagagtattgggaaggggaataaagtggtagttcgggatctaagtgtcatagtagattcaaacaatttccctgattagtggtcaaaaatatcattttattgatgttaaagtttaaattaaattaagttttgattaatattttcatgaaattaatatgatatattatataattgaaaata

SEQ ID NO: 26408 - DNA, 1342 bp, Cannabis sativa
caatagggacacatgtttttcgtcgaaattattgattccagctcatcgatatgtaattattttcctgttccaactgttcgtgggaggttgtcttagttgattttaactgatgtagggccccttttctttcttttcatattctcaaaaatatattaattattaaataatataaaaagactaattatacattaattatcagtaatcttcctcacacgaaggaagcaaaatcgaaccagattcgttgcactgtttctatcatatgtatagaagtatgtcaatgatgttgagcttactggtcttcagctcttgacccggtcttttctttaaattcagattttgtatcagttgaccccatataagtttgacatatacttactcatatatcatttaatggtattgtttgacccacctcaatgttgatacatcacatctggggttgaagaatggggggaaaatgtcagaaccctttaactaatatgttatatatctatgatttgcataaagagagggattggaggatcatgtgttgtgtatcttgagccgtgggagacgcttgggttgcatataagggtgctttttaacttcattcattttattggtttgtggttttttttgttaggtaggatcaatataatccctctcctttcaattgaggttattcttcattttttttttttgttgccaatattagggttggttatgatagaaccctagcagttgataaacgctcaacacaacgagtcagactaaaattcatttccatttaattggatgaatgaacagagctgttatggaaaacaacatgtttagttactttgagagggacgggcgtcttgtacaatctgataaacaacctgaaccgaaaccccaaacaagcaagttggggacaactggggttaagacggagaggaacttgggatttatggattattaaataaaataatatatataataagcctccaacagaaacgggctttcgctgtgttgttgttatgcctttcaatttgcaattgttaccgttattgtacgtttgtcatcgagaacttgattgagataattactaattccttgattccctagtattgtacttttgcagtaaccttcaatgaacaccacatttgcagagctattaaagcttaccttttgttttggagctgatttcaaattcctatttatgtgtttcaggacttgaaccagtcttctatgtagacgaggagcaaccaattggcttggaaagtggtgaaaagtccatatttcagtcaatgaacggttcatctttgaaagaggtatcgaagagggaaccatacttggttttctctatattgttcctctgtttcagggt

SEQ ID NO: 26409 - DNA, 2109 bp, Cannabis sativa
  modified_base (1821)..(1821): a, c, t, g, unknown or other
cagccagattgacgtactcgtgtataagagtcattcattccgtgggtgtaaggacccaatgaaggcttgaagcggggacgttacaaatatttaggtttacttacaaattttttaagaatttcgaatagtttacataagatttaaacattttattgtgcagataactattttttcttatgcgtgtggtgaataattgtttaaatcttatttttgatagtgtaaactaatgataaatttttaaaaatttaaagatagtcctcaataactaaaaaatattaatatataggatcataaaataaaattaactaaaaaactcttgcaaatactgaaagagatagaaattttctcaaaactaacacccatattatagcttcttctaatatttttttttctcttaaaaaaaatagaaaatgaaaagagtttttttttctttttttcaatttggctcaatatatagactattttgtcaggtatttgaataattatgttataataaatgagttgaaagttaaatatatataaatatagtaatgtggttgtatggagaaacgataaaattaaaagcagtaaacagttgagtttcacctgaagaatagtgtagttttgtcaatgagatttcaagtcagtagtcacttcttctcttttatgggtcaatttcagtttcagatacattagttcttattctcaacaacaaaacaatcatcacaccaattaaaatcacctttctattaaatttatattaattgtagtttaatgaggttttaatgattatccattccatttacttacctaaatctaaaaccatgtaggattggatagaaccaaaaccttatttatatatttataaatggatttttgttttatgttttattaaataacaataatgtttctttatggaaacataaataagatcttaaaaataattttaaaaaatttacagtgttaaaaattagatttaaatggttacttaccatacgtataagaaaaaacagttacgggtaaactattcaaaaaattttgtaatgtaaactactcaaaatatgtaatattatttttggcattgtaaactactcaaaaaattttaaaattttacaagtagtcctaaataattataacgaaaatgattatgaaaaaaattgactaaaaagatcttatgtatgccaaaacaaatagggataccgaaatacccctttatggggtgtactgtagacttaccctaactttattacacttaaaacttttatgtaaatttttttaaaacatttgtagtacaccctcctaaagagttattttggtagacctcctatctgttttaacatttggaagagatttttagtttttttttaatgatcgtgtatgttatagttatttagaatcacctgtaaatttttaaaaagttctgaatagtttacagtgctaaaaataaagtttaaacagttgattaccacacgtataagacaaaacagtcacatatgtaacaaaatatttgaatcttattttcggtactgtaaattatttaaaaatatataattgcaacgtactcgatcataaaaaaaaaattggactaaaaatttctcctaaatggcgaaacagatagaaatctatcgaaataagtgtattatagacttaccctaaattttttaatggtaaacatatctataaagtcattttattcagtaaaatctctatataaatagtttagccataaaaatttagggacacgattttgttccgtgatgtactttcacggaatgtacgacagccgttagatgggggagttttttagtctgagggttgggattgatctaggggtaattaggnttaaaaaatagtaacgtaccctgagacccgtctaatgtaccctgagacctatctaatgtaccacggaatacattctgtgaaagtacatcatggaacaaaatcgtgtccctaaaaatttgtatgtaatcattttattacattattaaccagtttaatattgttactagctcatagactaatgttgcatttaaactaaactaggtgattgttacgtgcgaagccacgtagtgttagttttatttaatattttagttttttattttaattaataattaaaatagtataatt

SEQ ID NO: 26410 - DNA, 1940 bp, Cannabis sativa
gttaagtttttaatattatcacggtttttaataattaattattctattagtattaaactagtttataaaattacacatgtggcgtccctatagatgagggcgttacactcgagtactcctctgacaacatcattaatgaggggctctgtcgaaaaggcaggaatcgaatcgttacctaccaaaaataaggcaaaatgattataaataataaatagcccacgcgcatgcacactactggattcgtcactccctgagataaaaggcgagtctcaagtcttattttacaaagttataaaataagactaggggtaaatattgcccctctgttgtcccaatatacatggcaaccccatggttggccatgtggcgaatgagtcttaagatcaggaagcacttaggataaatgctaagtaaacttatctaaattgaatggacgtgtccaagaggtccatttgggagcttcacccgtatctggatggagagatgttttgttcttctccaggagctacacaaagtcttttgggtctgactcaaggtctcagagatgacttagataaacgcattaaatgcgacatggaggaagcgtctatagatggatctgaaaagacatgtcaactgcattaaactcattctttggcgattacaccttaataattgagattagtgatgactacataatgaactatcacgtcaattaagaaaggataagggcttgtcttacctaacacctagcaaaaccttatgtaacctattatgcagacatgcatgtgtgtcctattatttgaatctaggaacttgtacaagtcaaggtttaagacttgcggcaatagaaattttttggctctcttcataaagctataaatacctttaactatattaaagaagggggccggattggaaaaaatagtgtaaacattccttgtaaaaaacttctatattaaattgcagtgattcgtggactaaggttcattaatgtcctaactacataaaaatacttgcattaaatctcttttaatcatgtacgtagctttcattaattagttgctgaaatctcggttaatagtaggaaagtaagtcatcgcagtagaattagtgacactagacatagtgaaatacttcaaatttcaagtctagcaaactaattaatgaatgttaccaaattatttttaaaattttgagagattaatttggatggtgtgatatgtgagtacaattaatatgatttaatcattatggaggttcataattttttaaggaagatgtaagagaatgttaatacaaattgcaatagtaaacatagtcaaatatttcagatcttacacctagcaattttaattagtggatggttacggttgactaagattttcggaactagaataaaatatgaatatataaatatttagactttagtagaattagatgaaaatttttacgcggttaaaatattaataaattttattccatgagttaatattgagggttgttgtatgtgcacaaagaggtggttttcaaatatcaatctagtccgatataaacttatatatcttattcaagtctattttactaatgctttgaaaaagacatacaactttttcttagcgtaaataaaccgtattgtcgattattatgtcattgtaaattcagtgttctgataaatctcagtaaataaatattcgaatcctatattataattattttctactgcaatacatcacacaataattgtaaataattttatgttctagatttaatagattttatatattacacatataatcacattaaataaaacctgtgaatcaagcaattgatagtcataaaatattttctattgtctttttaaataaataataggctaattagtaatttttctcctgaactttgacatgaaccaaatcgtgcccccttaacttttttggccgttaaaaattcccatcgaa

SEQ ID NO: 26411 - DNA, 3753 bp, Cannabis sativa
  modified_base (681)..(690): a, c, t, g, unknown or other
  modified_base (2357)..(2358): a, c, t, g, unknown or other
  modified_base (2924)..(2933): a, c, t, g, unknown or other
  modified_base (3319)..(3320): a, c, t, g, unknown or other
acacgaaaaggttatgaccttttaattttgatttcataaatattaattaaattaatattataactaataaatacaaacaactttatagaattgattattatactaattacttattaatttaaacctattgtatgtgtcaattttttataattttattagtttttttttctttttgtcattttatttttattgaaatacttaaataaataagtactccataaatgtgcaagtaaataaaaaaaaaatactgtattattttatcgattatattaaaactttttcttaatttattacataaatttgtattttttaatttttttaaaaaaatttaataatgctttaatttattttattacatgcatttatatatacatgtgtatttatgtactaatttatttatatatgtttttcaacaattacaaagctataaataaataaaaagtataataatacgttaataaaaattaataatataaatcaataaagtaattttgttgaatattgtttccttcactattatgttattattttatttattcttgcatttatatttttgtttaaatttaatttttttataattaatttttatttgtgttatttttatggggaattattctatatattattttttttaaccttttttctttttcaaatttacggtttggatttctaaagtggttnnnnnnnnnnttgcaataggggtttctgtacgattttttgttgtaatttaagttgcagcgctagttgcaataggggtttctatgcctaattccataaaaatgcaaaaaaaattgttttgaagtgtaaaaatgaaaaaacccttttcattatgccttattattttgtattgctaaaaaatattaccttattctatttattttattgactttaatacttgatgttgacccattttttttcaaccaatattttttattttgtcaataaaaaacatacaacatttattaacaattatattagtgcataatggatagtgtataatcatatttgattattatataattatggttttattctaattgtattgttgaaaaataattttgaattattatttgtattaaagttgatattacctcataattttttgtaacttttattatcaatttatcaatatatgtttatataaaatctattaataattatgtttaaagtaagacttgaaacaataataaagttcatttcacattaaaaaaattattaaatgggtaacacatcaaaatatcaagactaagaaaaagaaaccaacattttctgtgcatttttagtaattgtgaataatattactgtaataattcatctatataattttttattttttttacatatgtatatttgtagatttcaatatcttatggaagtacttgcaacacccataatgtttttagtatttttctaaatgattagacatgttatgactttaaacaattactctcttctttagaaagaacatgagtaatgtatggatttttttttatctttttagtctttatgaatttttctttttttagtcttttatttagttaaattgttttcaattataagaaagaaaaaaaattcaaactcgaactcaagactttctctttgtgatgagaaagttatattgtatcgatatagaagagagagcctagagaaagtgatgcggtatccttttctaatattctctaccttctttaatttttagtcttcccttattttttctattcaacatttattaataacaaaatttaatgaaaaaaatatgaaattctaataggcaaattgtgttaatcaaaatttctattatttaacttgtaattatagagtatgtcataaatgataatccatacttataaaaaagattaaaaagcttgataacgaatccttatcatgcgataatatttttgtccacatgtattttattgtgaattgtatagtttttttatcctttatgtgttctatatgtatcatttataataatttatatgatttttatttttgtatttttcgattttatttttacagaaatgcatgattttgagaaaataatataaattgtatattatacaacttatttactacaaatattttgcaaccacaaaaaaaaaaaattacaagaccgcgctttgtgcggcttaattacctagttaattaaataattaattaacccaaaaagacaaactccatagggataaggacaagcataggcgcctaccattgtctttagaacaaggttggtgtttttgtcttgacaaatcttgtctcaacaaatttcgccttaacaatttttgtctttttcctatttaattaatttgaaaaaattatttatttttgtaataaataaataattactattttgccanntcaaaatagatttttttgaacatctttatacaactctttatctctacccttgacagtgttttaaggtgacaattcatggaccgtggacctataattctaagctctaataaactaaattatttattgagtctcatcaaccaaataatctcttgtttattaattctatgattactccactataaatatgaaattgcactcttagtaattataaaattatatttactgagttgaactacagtgtccattgatataatcattctagtgattagctcttcacgtgttggttcgtaattagttttggtcaaaatactattttacttttctaattacttctttatcctttagttccattaattcacaagtagaagtataattcaagatctcatttgaatttgcgcgtaactttccagtactggaattaacacataaagggaaccaacatttgatccgttagaaaattcaaggttccataattgtacatcatgttctcagccatccatgttattaaattcccataatagaagttgtaagaatcatcttctctgagaaactttaacgagagaatnnnnnnnnnnaataacatgaacatgagttcatgataactcaagatttaggtcgatctactattgatcatcgttatgatatgaattaggtctttatgataaatgacatgttgataaagataactttattcataccagtcattgtcatatataatctctattatatacaacacctcactgtgatgtcacactacatccgtatccgaaccaagattacttacaccgaagaataggcatcaatgaatcgtatactagcaaccattgattaaagatttcataactttaatatgtttctgaatattttattcatagttaagtggtcttagttctctgtacagctacaagccacaacctcatatatgaataagaaatttttcgatatttaatataaattattnntaataaatattaataatttaacaatcaagcatatataaaaatgttcaactctttattaataataaaaaatgtctttataggcttttcaaggcataaacccaacaatctcccatttgctctaaaagcaaactgggtatctcccttagtttatatgacccataaaagattttacttgtagcgactttgtgaatggatttgctaggttatgttctgacacaatctccaagatcgtcacatcacctccctctactatatcttttagtagatgatactttctcttaatatgtttgcctctcttgtggctccttggagttagccaccacgccactatttgtcacaataaagcactagtggttttttttacttttggaactacttccagagcaatgtagaatttcttcaaccaaactgatgttgggttttgtaccctaaa

SEQ ID NO: 26412 - DNA, 3597 bp, Cannabis sativa
atatatatatatttatataaactttatatgtgtgtgagtggggctggggctggggttgaaagaaacgagtgatggactaaataagaagatattaaatgaagatcttcatcaaaaatatacatcatgaccatgcaaatggcaaagaataatgttatatttatgagaattcctaaaagttattattaatgtctagtactttcttttatatcgctattggtatagttatgaatcatgtttcatagttatgcaagtgtctagtactattacacttggagcaataagcaattttgaaatgatcgaattttttctaagattgatcggttgcttgctaatcaagagtggttagccaaatatccttttgctgaggttgtgttcatgaatgaggggatttttgatcactcttcggctgttctaatggtacacaacaaagtgacgaatggtaggaagccgttcaaatactataggatgtgggaaaaccatcctacctacttagaattagtgaagaaaacatggcagcatggacactttccaggaaccaaaatgtatcgtgttatcaccaagttgaaggctttgaagaaggctttcaaggagttaaattctcaatttttttgtgatatccaagctcaagagactcaagcaaggaatacactggatgaatgtcaagataaactacaccagcaaccgtttgatattgatttacagcttttagagcaagcagctagagacgattttgtctctaaacacaaaagctatcttgcttttttgcaccaaaaagcgaagctaacttgggtaaaggatggtgatgagaattctacattatttcacaccagtattcgtgaaagaagaagacacaaccaggtcttatctatatcactaatgctgatgggaaaagggtggatgaaccaagtgaagtcaaagatgcttttatcaactattacataggacttcttggcacctgtatgcagaaccaaatgaaggttaagcagggtattattgatgaaggacctgccttgacaggggctcaaattgatctccttatggccacggttacaagagatgaggtcaagaaaatggtgctagcaatcccatgggtcaaagctcctggtccgaacggctttggaagctacttttttcaaaaaaaaaaaactgggatattattggtgttgaggtatctgatgccattatttcctttcttgagacaggtagcttactgaaagaaattaacaacacagtcttaacacttgtgctgaagcttaaatgcccaaacacagtgaaggactacaggctaatagcgtgctgcaatgttatatataaagtggccaccaaactgctttgttcacggctcaactgcttgcttcctaatttagtgtcgcaaaaccaaggggggtttgtacaagggcgattcattgctcacaacattatgatttgtcgggatctagtgcgccattatagaaggaaaatgacaaaagctagctgcataatcaagttggatttacagaaagattatgacacggtagaatgagacttcattgaagaaatgctacatggattgaatttcccgaaagcattcattcagctaatcatggtatgcattcgatctcccagattctcacttatgattaatggttcacttcatggctattttagtgcaaggagaggattgagacaaggtgacccaatgtccccattaatctttgtgcttggcatggaataccttaccagaatcatgaagaaagtgggtcgcaaaccagatttcagctttcatgacagatgcaaggatctgaagctgaatcacctcatttttgtagatgatgtccttctcttctgcaatggagattataaaagtatctattatctcttacagggactcaaactgttttcacaaacattgggattgcaacctaatccaaacaagtcagctatctactgcaatggaatgtcaaattctgaggtacaacgtataattgatgcatcggacttccagagaggtgttgttccatttacctacctgtgaatccctatcagtcctaaaaggctctccccaagagagtgtgatgtcctagtagacaagatgactcacataattcgaacttggagcacccagcatatttcttttgctggtagagcagttttagtcaactcagttctcctcaccatacacacatactggagtcacatcatgctccttccaaagaaggttatcaaagaaatagaaaccatatgcagagccttcttatggaaagggcagcagctgatggaaggtccgggccaaattgcttgggaaaacatttgtcaatctaaaggatctggaggaattggctttaggagagttgctgattggaacaaggcagcgatgttcaaatatgtttgggaaattgcaaccaaggaagacaatctatgggttaaatggatccatagtgtgtatatcaaagaaactgaatggtggagttactttgctccacaacaaggtagctggtactggaggaagatagttgcattgaaaggtatcatcctaactctaactactccctcttcttttatacaaagtcgatgcaaaatagctgaaggatacaaatttttatgccccaatgagaatcgggttaagtggagcaaggaggtttggggtagacttaacacacccaaacataagtttgttatgtggcttgcaattcaaagaaggttgaagacaaaagataggctatttcgattcaatattgtagcagatatgcagtgtcttttctgtaatacaggtgctgaaacaagtgatcacctcttttttgaatgcacctttgctttgagctgcctaccacaaacaaaagtgtggctggggtggaaggtcacagccacacggctggacagcttggtgagatctattgggcgaaagaagtgctctggcttccgaaagaaggttctggcagctgcaatggcagccttggtgtaccttatttggaaggctaggaataggaaatattggcagcaaagtgatgagaacctgaattctattgtacaataattaaaaaatacttgtaaagcagaatacatagtgtatggcctaacaaagtctctttagaagattcagcttggtttaatacattgtaaataagcatagaatcatcatcaggcccgatttgggtgctgttagacttgtaattgttcaaaaaattattagagtaatgaagaacactactgatttttcaaaaaaaaatattttaaaaaatatcattaactaattatatataaagcgtacctattgaagatattgcacactacaagtatctaatagtaatgttctatatttatataccaatctcactcaaattaatattaataatgaagattcactgttgacggcacttataaggtccaacaccatactaaattactaatgtgatatttaataattagttaccgatttctcatattttttaattaaaaatatttgtattggccaaatattaaaatactctaataaaaatataccacttcaaaagatacttcacactctcttaacatttttctcactactgatacatttattcaacaacaataattaatacatttatatatactaggtgattgttacgtgccaagccacgt

SEQ ID NO: 26413 - DNA, 5071 bp, Cannabis sativa
cagaatttattccattagccatttacaatcttattgtagtagttggaaagtcttcaatgggctcattgttaagatgaaactttatgaatttatccaatacatgaccatattataaaaaacttgtaatttacaacacttagtatttcatagtcttgtgctttgtcatgaagaaaagaaaagagaaggccaaactagcatcacatttgtgaaactagctaagagcaattaccccatgtgtgtgcttgttataattgatgatcaaactgtttataacaaacaattaattatttacaatttatgtacgtagttaataccatacatcattgaatttaatcgtcaaataatactagcagtcactcactccccaagtggcataacaaagatgtacaaacacgattatatatacaaattcccttcaacccccacacgttagaaaacttgacaaggataaatccataaccaacctctcatgagtcttcggcatcagaagagagaaatcattcaccaaccagatcattgactttaaacatggttgtctccagcagccgacagcgtattcagtttgatcacaggagttgcaggttctctggacacaacaaaatttccttcagcatctgttctgccatagtctaccaaaccatgatccatcacaattctacaggatcgccatgcggagccctttaaatccacaccaaaataattcacatggtctatgacactgttcccgctaactgacctgtacaggttcccataaaattgaagcatgttttcagataaaattgttatgtgaacttatattcaagtttggcttttttctctagcaaatcccaatattgaaagatttaaagatgttgggtataagttgaaacttcagatctatattagaaaccattgcataaaatttgtggagtctaccaactaatactaatagaaagaaaaaaagaaaaatatatataaagaagtagagaagtttacctgctacaggttgggtcttctccagaactatcacagactttctcaactggataaataagactttccagtccaacgttatgaagccacacctaaacacaattaaatacgtcattaaataaaagtgtactatttctggcctagaagaaaagagctttctcatcataatgataaaaaggctgttattgatgagcactagtgtgatgcataaatactagacattttctataatgatgttgtagaagtatttgttctgcatgttaataaacacattagagaatttaaaactacgctaccaagacctaattcaccaactaaccaccatgctgcaactgcactgcatagacaaactttacttctcaagacaaaccattacctctgttggatagtgatggtaggttttctgggggaaataataatagtaaggaggtaaatgaggcacaatatcatgtccatttgtcactcgtattgtgtttggtaaaaatttactgtagtatgtagcaaaaactgcattcccaatgcgaggttgtccaaatgtggtaacctggaccttctgagctttacaattgacctgataataaaggaattcactcatcagaaaattagcataaaccaaaaagttccagatgaacaaaaatgctggaacatagctctaatgattgtagacatagataagtcatcatactataagatcaagtccacaaaaggcagccatggctcctcccattgaatgcccagttacataaatgttaatatctccataataatcctgtgctcttttaacggcatttaggattgcaggccgtatgcttgtattgtggtaagcatgataaaatccatggtgcacctaaaacaatgagactatgaattaatgcaccattaagtccaggaaaaacttaaaaacatgagaaatttcatgtaaaccacaccattgcatcaggcatgccggggtaatcaatatcaagctgtttccaaaataagtcttcaatccaattctgtatgctgtaatacacagtcaaccaataaaccgaacacaagctaagatgagattcaaaaccaaacttattaaaaatatttactaattttcatacatatcaaatttctattaatctcaatgagaaatcaagctctctatgcattcattgaacaagagacaaaagaaccaaaattgtaacagatatcagtatgtctcccactgtccttcaaaggcgtagctcagaaggaatggaatttgtatttgcagcatataaaattctacctgttctcctgcgttcctctgaatgcaattacgatagagttaagatcttctgccactccaacgaacgcctgtagaagatactcagaacaaatatcagagcatgaagtgtgagagtgttttttaacagataaaagaactctaagtacagtacagcattaaaccaggtaagccttctaatcaaaagaaacaaaaaaggttaagtcagcgataacacacctgtaagcagttctggatgtcaacaaccagttcaatcatttgaaatccctgttttcagtggaatgacaattagacaaacaaatttggaataagacatgttttggcaccctcttcaagctaaggatgagagaagtattaaccttagatttcactaccttacatataagcaaacaaaaagttacagtataaatccaagtacctcagttaccccgtcacatctttcgcaagtccaagaaaaaagttctgtcagatcggaaacatacacctgtaagaacaaagcatgttcttagtcattaaaatctgatggaattgatgacctgctaaatcaaactaaaattcttcaaaccaaatatcaagcacgcctagtttcaaatgaacccagcaactaaaccagaatgatttatcacattttgcattttgactcttgtcttctaagcttacaaaaatacaagcagaccatcaatggagttgtcctacccatgataaatgacatgataattctaaagcagcataaaggaaccgactacgtcagaaacctactttctatgttacttgaaagttgaaacaacatcaaaaaaaactccatggcgctgcttctatccacgtcaagtatggcaatttaaaaggtgaatgatagggagtaggtatttaaggacactcaatttggaaactaaaccccccagatgcattggaaaacaattaacttaaagaaagaagaacaaaaaattaccgcagaagcataatgcactaatatagtagtaagggtatgattatagactggagtatgatgcgtatgcttgaccttgaattctgcaattcaaacataaaatctttgttataaaacgaatcacaacaaactaaaaagactaagctaaaccagtaatatatagattactcgaactcaaagatacccatagtgggtgtaaatgttctgtaaaaatacagtacaaaagtaagaaaagcaatcagataaagcaaaacctcaacattttcttcacctacccaacaatatcaaaatgatcgaatataagttcctccaataatactggaaataccaataatctgcacccaactttttaaaaatccctaataaataagttcaactaaaaaaatgaaattccacaggtaaatgcagaatagagaaaacaatcactacccattcgagtaatccaggatagaagtcaggaaacattgttcaccaaactaaaaactatattaaatttataaatatacagtagatataagcacttcttataaagctttttacatcgttaaaagaaaaaaataaacagtgatgaaattctacccaaaaattacctcttccttctgaaaaaacaaataaacatgtaaatatcaccaatataagccatctacttctttccatactctgctccaccaacaaaaacaaaaattcagtcaaagaaaaacctaattgatgaaaatagggctgaattagcaataaatgacatatataactgtaccaagatgacccaaattgcgcgattactccagagctccttcgaattcttccctgtactacctcgttttgatggggtttaaggtccgattcctgagctcggtgagtcgattatgaagaatcgtttgaaaaaaaaaatgaataaataaatgaaaaataagaagaagacgaaagaaggaaaagcttcaaataagtatataggatgggcttagaagatatagattagagaaagtgagacgaaaacgtgaaaaaaacaaatatactagtcgttcggttcatttgaattgactaaattaccctggatattgtcaggtattaattgtttgttgtttatgggtattttcggaaagtggttgttattcctgacgtgtcgggttatcacgagctgaggtggagcatttatttggaattagatcataagattatatgggtcccacttttggttgttttcttttttttaaagatgatggatgaacgctatttcctacccaattcctttttcaattattatttataataataatttcaaaaaaaaaatatatattatttataaataaaaaataataatttacatcataaatatttaattttaactgttaattataaataaatatttaagtttaatttttaaataatagtaattaaattatatttttaaaacttctatgattatctgttaaataaattgtcaagtgacaattttaattattttacattattaaattttttatttttttaaaaaaaataatttaaatatattaataagaaaataataatatgatattcttacttctaaaaattaaactatttatttataattaaaagttaaatttaagtatttacactataaattactttaaataaaaaaatatattcagtcatttattttcaacaatgcacatcataaacattacctgcacttttttgggtcaagtatatgctacgaggaatatgcttcttcgttttcaagggttccaaaaaagaaacagtcacaatttctttttaaatatattttgttttatttgagtcacacatcacaatttaaaaaaataaataaaaaaacaccaaaacttaagtacatgtttgacatcataactaaaaaaaattgttttttgtttttaaaaatagaaaattattttttgaaaaca

SEQ ID NO: 26414 - DNA, 7615 bp, Cannabis sativa
ttagttgcttgtggtagtttagttgatatttaatttactaattacaaagtgtttgataaatgtcctattttggacatataatgagaaaatatattgtaattatctgcaataggttttccccaacaacacctaccatagaaaaagagaattttgttgttaattgtggcccatttcatttatagttccacaaccaaaaccagtataggtaatcagtggtagcagttgaaagtactatataatatccattcattcccttccataatccatgcccacttcagtctctaaattcaacacttttcttttattttttcattaaataaaatcataaatatataaatatatatatagctcaactctttattattacaccgacgtggaatttagatcctcctctttcctcagatctcatctacacagacagagactcagagagagagagagagagagagagtgtgtgttactttatgtcgttttgcttttgtgctcatacaacttgatacccaatactctttttcattttcagattggttaaaaagattcttggcttacaaggtctctcttctccaatggcggtggccgttcgaggaagccgtggtggaggaggtggattgggttttggtggcttcagtttccggagcttcttctcctatcggatctttgtttctgctatgttttcgcttctcttcattgccacgctctctgttcttcttaccacaaatccttcaactccacaccaccgtgattctgtaagttttattctgttttttttttctttaatgatgggaaaaacccattttggaaaattgcgaaattggttattttaggaaaacccaattgaggatttgaaaaatgtagcataacccagattttagttttgaacaattttttttttttggacagacacttccgagtaatggtatacatagaacgtttcttgctttgcaatctgatcctttaaagactagattagatttgatttataagcaagcaagtgatcatatgactttggtgaatgcttatgcggcttatgcaagaaagcttaagcttgatatatctaaacatttgagattgttcaatgatttggcttcggatatttcggatcttcaaatgaaacccacttaccgaacgtccttgtttgaatctgatggtccggttgatgaggatgttttaagacagtttgagaaggaggtgaaagataaggttaaaactgcaagatcaatggttgcggaatcgaaagagaattatgatactcagctaaagattcagaagttgaaggataccatttttgctgtgaatgagttgcttatgaaggcgaaaaagaatggtgctttcgcgagcttgattgctgcaaaatcagtgccgaagagtttgcattgtcttgctatgaggcttgttggggaaagaatttcgaatccagagaagtatagggatgaagggcctaaacctgaatttgaagatccaagtttgtatcattatgcaattttctcagataatgtgattgcagtatcggttgtagttagatctgttgttaagaatgctgcagaaccttggaagcatgtttttcatgtcgttacagacaggatgaaccttgcagcaatgaaagtttggtttaagatgcggccagcggaaggaggtgcctatgtggaggtgaaggcagtggaggactatactttcttgaattcttcttacgtgccggttttgaggcagcttgagtcagcaaatctgcagaagttttactttcagaatcagcaggagaatgcaacgaaggatacaagcaacatgaagttcaggaacccaaagtacttgtcaatgttgaatcaccttcgattttatttgccggagatgtatccaaagctgcacaaaattctttttttggatgatgatgttgttgtgcagaaagacttgacggggttgtggaagattgatttggatggaaaagtgaatggggctgttgaaacttgctttggttctttccatcgatacgcccaatatttgaatttcacacaccctctaatcagagataagtttaatcccaaggcttgtgcttgggcttatgggatgaatatatttgatcttgatgcttggaggcgtgagaaatccacagagcaataccattactggcagaacttggtaagtatatttatgctgtttccataatacttttatgagttttgttcgaaaatttgacttgcatacgactttagatttccaattttctctcaaaagttgaaatattgttgccttttctttcaatcagaatgcagatcgttcgttatggaaacttgggactcttccaccgggtctgatcactttctactcgacaacaaagtcattggacaaatcttggcatgtgcttggacttggatacaatcctagtataagcatggacgaaatcaacaaagctgcagtcattcactacaatggaaacatgaaaccttggctcgacattgctatgaaccagtataagaatctttggaccaaatatgtggataacgacatggagttcgtccaaatgtgcaattttggcttatagacaacactactagcttggttgctctgaatcgttcttcaggtgacataaaatacagtagtagtatcagtagttatctctcatgttttccagtaattacctctcatgcttacttgttctcacatgtttttggacctctttccgagttgcaaccctcagagcgaagctcagtgattctttgtatttggtggaaaatggtgtccgataattctttcttttattgttcattcagtaattcatgtcaactatggatttgtaaacaatgagatcgagtaatgtatacggtgcaatgaatttttggttatttttaccatattgtaatattaagatacagattgcagggtgtgataagacttatcatatctaatttagtgtacttctatattcttttcccatactttgtgtttgatgatattaagttcaactgtaaaatcaagttcttgattcatgcctttctctttcataaagagttaatttagatatgacaacagagaggactttatacttatcataagtgttcaggaacagattcagagtccttgcatgggttgaagatgcctttaatcctatctttcttccctttcttgagtttcttttagatcaaggctttgctgctagttgagatcagaaaagttagctgcattaaattttctttttggtggttgaattcaatattacccttctagcttaataagattgcaaaatttatgtcatgtgagttgtgactataccatatatggatagagaagagagccattggctgagtttcaatgcaggtgtgaaattaatgtttcgagtctgatatgcgattgcgaccccgtgttcttctgatgagaggtccgttcatagcgcctctgatttctcttcatacccccataccccatgggtgaaacactgcaactactccaggtttcgaaggccggtgtacatagcagtaataaacgctgctgtgtatcatatttgggcagctagaaatgaagtcttatgaaattaaaatgtacatatgattcatatagttgtaaagaacattacaaaaagttgttattgatagattttctcaggaaaaaaaaaagagaaaattagtgctgttgatacagattggttgtgccaaattatgacagataggttgtaattgtaaataggtgcaataaaatcatctcacttacaacaacaacaaaaaaaaacatgtcgcctagagcacttttataaactccaaattgctttttgcatgccccatgcaatgtgtttcaggagacatgttctctgggcatacataactatgtaaatatctttttcgacattttcaaacgattctaaacttctctggacatgttctctgggcatacataactttatacactttataagttcattttaaacacaaattaatcatattttacactatattaaagttcaaatacgtgaaactatcaaggtataaagcactataattgtgcttacccttttattatatttaaccaaaatattcattcagccagctcttcttcaggatatccagtcatgaataacgatgcctcctcaaagagttgatttatgtgtggattcttttatagttttggtgttcattcattcattcatttcatacagtttccaacccaacttgattgttctcaactgaagaattatcaattataatatgtttcaagtcttcttttatcatttatatccattgtttcatgacaatgtatcatatatgatttctgttcaaacaaacaaactagtataaaaaaaaagtcactactgctagtttttctaattgtgaattataggtccacggtccctctcctatttgaatctagcaagatatatttctctagaacacactcaaccaccaaattcttcaatattgtgttgattccagaaagtcaggcggcattcaccgcctgaaaaaatcgaaaaatttcacagcttagcaacaatcgttactgaactgaccctggattcaatcagtacttatagagcttcacaggctcttctaattcttagctcagtattattagctgccaatccaattttacatgctcaaagcatatcgaaattgacttgtattttgttcaggataaagtactcaacaaacaaattcttgttcaacaaagccaatagttagttgtcattttccttttcttagagaaaacaatgtgttgcttcttcaaacaaacttaggttactatgagctgtagtttacttattcaagttagttaggattgtgactaatcttattagttgttagtgctgttgtttatttttttttttatctctacactatgaacaacaactttattcaatacttgatttacctttacatattttttgacattcaacagttaatttctgtttaagttaccttacctatatggatgtgacctattcatctaaatagctagttatgaatgtgactgttgtgtactctgcaatctcatcagttttttttttaactctattgtggtaacaatactttaggggaggttttgcataaaaataactcaatgcggggatgataaaaaaattaacatcccaacaattatttcaataattacatatccaatttgaccaaatcataaaaattattgaattgtcttagggaaattcttataaacatgcacgctgcaaagagtgataattcaaatcatgaaacaaggtttgaaatgcttttctcatatagttgaacattttaaggaaaatgcaaaatcaagagaataaacactaaacaagtttaaaacaacacaatccacagtactgtttgagaatgtttttcacaaacaagttacattctcttgtaatagtatggtcaattatcaactagtgctagtatactttctactcttttagtgagccactttcgtcacattggaaaagaaaacttttatatattttcatgaactatccttaaatcaattgtaatacaagtcataactcaaatttaaagacaccatttatagggtgtgttctgtaatgttttattattttttaattaaaaaagtaaaaatattttaaaaaaatatgttcaataaaacatagacccagatctcgacctgcgacccggacttagaccccaaaatccagacttacaaccgaacccgtaaccagacctggaaccaacccgttgtgccgaaccacaaccgaccactttctcttagctcaatttcttataattccttacttaaataaaagcaaaaaataaaagttgttacataatacattttttaaaaaaaaattaaaaggtaaaggtggttataaaacatattttttttaaaaaaaaaaattaaaaattctacttttatttttgtgattaaaaaatttaaaaaataaaagtactaccaaacgctatcaagatttttcttaaataattgttgttccaagagtataaacaccaaacaaacttaaaagagcacacttcacatcaatcaacacactggacacatgtggtttgactctgtggtattgtccctccaaatgaaaaaagtctccaaaagttattcttggaaagttatttatctcctgaaagtatgttctcaacttacttgtccatctggaagaagtctcgtggaatgattgttgccatccaaaaggtagttcccggataactatcatgtccactccgggtgtagacttcaggaaaactagccctcctccaaattggggttcctgatggctagttgtttctcctagaagagactttcaaatagtcaactccaactggctctttcttatccaaggttgttccttcattgagtgccttggtccgtgattctagaagcctacatacatgtttccagatacactcttacttatgttgacgtggagatctcactcataggagagttggttaagttagttattgcctaactaacttaaccatctaacttcttgcagccaccgactttaagatcttgttcctaaacctataactaccaccaacacttatcctgttagatataacgatcagattgagttgagagatagagagagaaaagattgagaggtagagagagaaaggtacagagaaaagagagagagattgggtttggattttgtatgaagaatcttctataaatgcagaaaattcttgtgtaagagtgtgagagttgaaacactttgagagaactcatcagtcaatcttaactgtattgtacatgttcttgctcaatgaataaagaggatttggtggtgttctagatctacagtagagcgatagatcacatcgatctatcaaacttgaaccaatatatatcttggtgttaactttaatgttttactactttaatcatttcttaaatttatactatacgttcatccttattcttctctgagtattggttgtgatttgttaatcttctcactgctgattgtttgattgtttgattgtttaaagtttagttgatttgattttgcaccattagttgtaatttttccacaaatcagagcttggtaatcgatcaacaacgtagaatcaagattcttttcgctgcaattcttgaaggaactttaatgtcatcaatggcaagatctaaattggagaagttcgatggaacaagagacattgcactatggaaagaaagtttgaaaggaatcctagtgcaccagaagttatccaaggttcttggagatgagaaacttttggccgagaagaaacgaggaaatcgcaaaaatggaggagattccatactacacgatcatcatgtatctgttaaacagtgttcgaagaaaacttatcgtagaaaagacaacgaaaggagtttggaacaagctggaagaactatacatataaggccatcaattcctaacaagattaatttgctagaaaggttatacgattttagaatgatttattcattttctttagatgataacattgatagatctaatgagattattgtaggattggctaatataaatcacaaggttgatgaaaaaagcaagaccatcatcttgttgagtttgcttccaattgcatatcaagaagtcaagaaagctatcaagtatggtagagacgtaactgcattggaggatgttcttgccgcacataaatcgaagaatttcgaattacaattggaaaaggaatct

SEQ ID NO: 26415 - DNA, 1695 bp, Cannabis sativa
  modified_base (1348)..(1355): a, c, t, g, unknown or other
aaaaaaaaaaaaaaaacaacctcataaaactcatactcgtgagaattaatatgtctcctcttcaattcgggtactacaagtgcttaaagcaatgatcagtcgcattaagaaaaaaaacaaaaaacaattataaatttggagatactattactagctacccatgtcataattttgagcagtatttataaatacttggtactttataccatcatatatatatatataaaagctccttgtataaatttgatatagacatttgattatgtacctttgaccatttattattattttcaagtggaaaacgtcccacagtgtaattatattatttgtaacatatatgcagatatattcagcacttacctaaaattggtacaaactatatgatctgtcaaaacaagcacaatcaaactctacatatatattgatcccaatccaaattcccatggaatcactgaaccgaagttagggacagtatttatatatattaatatataaaataaaataagttgttgacaattgatattcaggttttgatattaactaggatattgatataataatgatattattatatgtataaggaatattgagcaaatccaaatgcaaaagtctcgatcgatggtgagcatgagtcactacttatctgttgtttgatatcgatttttcactttgtatatattgtcatctttataacaaattatcacagaacacaagaaaaaagaaaagaataataataaaaaaaaagatttgttgtaatattgaatattatgttaggtatagtggtatatgaagagaacaaaatgtgaaacaaaatagattcacatgtaagcatatgtaaaaatgagaagcatcatcatctatcatcttctttaatatattcagcctttttggtcaaaatggttgagtatttcatgcacgtggtgtggtgtggtggcctattaattaatatattgtatttatttttgttttgcttacaaaaagctgttaagcttgcatggcatgatgactcaccttctcaataaatatgtaataaaaaaaaatgagttcacataaatatctcaaattttttattgaaggctaaagttggtaaatatttaatttaattttaagttaattatatggagaattttatttccatccacaacatgataagtatattctaatatttaaacaagaagagaattttaatttgtgtaaaaagaagtctaatttttgtaaaaaaaaaaaattattgtaaatattataattaaatggcttaacggttaaaataattatagtagggatttatatgagaaattatttaattattaattgctaaaaaatgtcttgttaaatattcaattaattnnnnnnnnaaaataattaattataattaattgattctaaataaagaagttttacttattgataacctgctattataggtaaaagaaaaatgtaaggttacaataaaaatgtaaccattgagtagtcacccaaaataaaaattattaaaataggtgcacttataagtttttggagtacaaataaaatttccctaattataaataaccaattttatttgcaccttataaaggggcatgtaaggtcatttgcccccgctaattttttataatataaaggaaaattttatttacatcccaaaaatttctaaaaacaccctattttaataaattttattttatataaaattta

SEQ ID NO: 26416 - DNA, 1351 bp, Cannabis sativa
  modified_base (276)..(278): a, c, t, g, unknown or other
gtggaggctgaaacaaatcttcctgcaccaactctgcagatcttggaacaggggcctcatcttcctccttttctgagaactccataggttcgattcccaagacttcctccattgtcttggttttcctcacattagcagtggatgtaggacctttcttctttggctttttacgtttttttgtatcagatttaagcttcccttgcacctttgtccttgtctttgccatagcaccaacttaagaacatgctgcgagaagagagatagagagagagagannnagagagagagagagagaaagctcattcagcacatgttcctcaagttattgttatttcgtgtgttgtcagttatctcaggacctagcatgtcaagaacagggtccctaggccttggaacaacttattcttggatactctggagagagggtcatagtgttggccgaccagggcctgaccagcatgtaccacctcctcttcagggttgctttttggtcattcaatacctcttggtgccaggaactgactgtttgtgccatacgatctatctggcaagatttgaccgtcgtcaggcagggaagggtgtgtccttgtgttcgaggaacctggttagactttttgtccactatctacatgtctacagaccctacataatctatctatgagcctcccttgcaaaggctctcttatgagatcctgaccttttctaagagttctctcattaaactgcctagtcaggtcattggcctctcgcttaaggttgttcaactctgcctaacaggctcggaggatggcctcctattcatccatccaccttaggaattcgcatctctactaggtgaaagcatcacaaccaacaatgcatggttcttcttatcctctaaggaatttgtgtctcaggtgggcaaaagcatcgcagccggtagcgcgtggttcttcttgtcctatttgagtgacttggcctatagcttctaaaggcctggctagctcaatatcatctcccagtgccaagtgaagctcaccaataactattttgccaatttgtggccctatttctcctgcgtagcactgtggaacagccccaattgtgctttgtggaggttgttccatgttgatatgctcttctatatgagatttttggggatgttccagccgtggaggaatggcaagatcaacaagattcacatgattaattggattgacagtgttatctagatcagtaggaccctctctggtgggaagaacactagcattgggatttcccatcataggatcctgaggaggatccaaggggaagttcttctatttagaaccatggtgattgatcagaaaaaggctctcaatgaaagcaccaa

SEQ ID NO: 26417 - DNA, 2276 bp, Cannabis sativa
ctatcccactttgattcaaacactgtatactactaaaaaatacaattattttctcccaaaaaaaaacctttttttaagatatatattttattattagaaaaaaagcttaatttattttttataatatcatagtttatatttttaccactatacattagaaaaatacaattttttttctagggtcctattgttatttatgtaaaatatccctaattggcttaggccacccttcctcacaatactataactacacatataataaaataaaaaataaataaataaaagaagaagaagaagaagaagagattagctagctttctatgtatgattatgcataacattattactctatcttaagttgtaattaactattaattaatgataaatgtgtattatatgtatataggtgggtattagatatggaacaacatcagaagacattttgacaagttatcttttacaatgtgagggatggaaaggaattttctgcaatccaaacaaggcagcattttatggtgatgcaccaatcaacctttttgatgtgttgaaccaacaaaaaagatgggccactggtctacttcagattctcttctctaaatattctccattcacatttggtatcaaatatattggtattctcatgggctttacttatggacataatacattatggcccatttggtcaattccaattactatatatgcatttctacctcaacttgctctactcaatggggtctctctctttccaaaggtaaatgtccctaaactattctcattgatatagtgaaaatttataattatttttacaaaatgataattttttagtattgtttttggatatcagtgtgcccagtactttctagaggtgacaccgatctatgtgggctaggacaggcttaaggcccacctagcccagggtcctaaaaaaatttctctttttaaaattactcattttgaaaagtactatatattttttttttttctaaataagagtttaattttttttttttttttttatgacggtctatattttatgatcgaccttaggtgatactctacaattggttaacaatatttcttaaaagttattgcatttaattatatgagacttgatacttaatttcaccaataataatataatacttaagaagttgctaggcaccaatagtatttttttaagcatttctctctttttattttttttaataaagtagttattagaggtaatgtgtgtgtcgagtaatctccacttgttttgggtcaaataaaaaagatgaagaagtaatgcttgtagtgttgattatcaaattaatacaactaatatagagtttgtatagtgtttaaaatcaagatataaaaatgacagcattattattaagcatatttggttaaatagttttctataataatttttaaattaaaaaatattaagtctgatattaaattgtagcaatagcaatacacttgataatatccgaagatggtgctagacaccctttagaataaatagacattatatttgaattgtttacttgcatgtcttaaccacataattatatgtatttttttcttaattacacaattaaaaataatataatcacctacttaatattacatataaaaaatatttgcaatttaagtataaaaaatgtaagataaataaacacaatacatgagaattttctttttgatagcacataatatatttttttttcaggtttttgagccatgttttattttgtatatgttcctattcattggagcatatggtcaagacctattggacttcatcatatatggaggaacatttcaaaaatggtggaacgatcaaagaatgtggttaataagggggctctctagttttctattcggtttagttgaacatatgttaaaatcattaggtttttcttcgatgaactttagcgtaacgagcaaaataatcgacactgaacagagtaagagatacgaaaaatgtgtctttgagtttggacaccattcacctatgttcgtgacattaataatggctgcaataattaattttgtcgctctagtttggggaatcaagcttgctcttttagggggcaaaattgtgtttgaagagattttcatgcaagtgattattgcagcctttggtgtggtgaattgcaagcctatttatagtgccatgttttttagggctagtaataaaggaggaagtcctaccaaaactactttgatttcaacctttttagcctcttgtctctttataataagtttagtcgctttgaaggact

SEQ ID NO: 26418 - DNA, 2525 bp, Cannabis sativa
aataataatgataaaaataataataaaaaaaaaagataattttatcatttttttagttactaagaaatctttaatcctaaggtatttggttaactctgagtgcctcaaaatactccagtaattgtataatcaacttatcttaataatctcatcaatattactaactaaattcgttgtgacatttttggttatcgattgggtctacagggttgctaaatctgaaaatatttttatttcacaaatagcttacattatatctacatattccaaataaatctctataattaataaattacgcttatttatccacttatggtaaaatttataatttatgctaaattaggttagtaagatcataatcatactcattactacctaattaaatcccataatatataataaactccaaattattcataattaagtttctgagatattacatttcgaagcaaaactcaagccagacaaaagatgacataccttggaattgaaagcaaagaccttttagaagtggttgagtgacatcaagttcaattcggacccaaaggtaaggaccccaagattccttcaaagaagcagtgtcaacttcaatgaactgacccaaaatgaccccaagtttgtgggctagcgccttaaagcgatgaagaaatagaatcccatagacttggatccaaaaaagggtagaggttaacatgcctacagattgcagtgacaatggaacctgcttcgagaggagtcatgacaataggtttgtagttaaagtgccacagttggccaatcaagacgcgcctttgatcaccaaaacaaccaaattaattaaacagtgtaaaagtttggagttttttccttaattttaatggaaaaacgttcaagccacatttggtgaaggcgttgtttgaaagcattgacattgaaatggaaactaatgagaagtttgatagcaagaaaggcataaggctcctcctgagattcctcagaggcttcctcaggctggtcagataaggaatgaatttgagtttccatttctgtaaggtttaatgcatcttgcaaggtattagagaggtcgtccatggaatgagaagaaggtaagacagtgacagatgagacaggaaagagaatgtaagaagagacaaagaggaaaaaaaacagtgtgatagtgaaaggtcaaagcaagaaaagaaaatgaatggatgaaacatgaatacatataaacttgttaaataggagtgaataagctcgagtaaaagaagaagacatcgcctagcattgaagaagaagctcctcatgtcagagtaagcaatcatgtacactatatggtctacggttatcctatttcagtttcaataaaacctagatagaggagaaggcaggctatactagtaggtttgatgatgacccaatgaggtgcaggaggataagaagaagtgaatgctaaaaatggacagattcgaataagagaaagggggaataaaaatttgggtggaggattaactgtataaggaaaccaattgcagaaattaaacactgaatagacatatagcaggaagttaatggtgatttgagacttatctgcttggcggcgagacttaatagcaaaagggaaaatctcggcgtgatctacataagagaaagggagaataaaaaattgggtggaggattaactatataaggaaagcaattgcagaaattaaacactgaatagacatattgcaggaagttaatggtgatttgaggcttatctgcttggcgaagagtttaatggcaaaaggagaaatctcgtcgtgagacactgttgaagcaaccgttagaacttttcagatgctaccgccaccagggggaaatgcctaggaaggaaataaatgtcgatgaacggcgacaacaatgacgacaaatgaccccaaggcacaagaaaccctagcatagcgatagttgctggactgtttaaaaggaagtccaaacattcttttctctgctcatccacaatagccataaccaaaaattgtgtttctttttcccaatttaaaatactaaaagaaaagataaaaatatatgattatttatagaaaaaattctcttgaattaataaataaataaaataataaatgaagaattgaattgtcattgtcacatagctagggaggactcccggcctacccagtagcctagtgtattatgtaaattgttatgtaggacagcatctgtacgtagcatgcatctatctccttatctcactcaatccccccttcttcactgaaatccctacctctttccctctctctcatcaatttttttatttttatttttaaaactcctttaagaaaaaatctacgtaaaaaaaataattacttttaatttcatatcataccataggttttatatatgaatacgtagatataatagataagattattattctgcttcatgcatgagtgatgatatttattcaatactaacttatacatcatatgatgtatatatatataggcacattaaaacttcattaaattctcacataataaatctga

SEQ ID NO: 26419 - DNA, 1426 bp, Cannabis sativa
tagaaatcaaattttttgattttctaagtatagaaaatcaaatttcccttctaaattgctaattattattattattattattattattattatttcagccgttgaggagttcaaatcttcaaaattatgtcttattttactgttaactaatgtttaaatttaattttaattttttaattaggagatttaccgttatttaaattaactataataataatgttagatttgtcacttaatttatttttttatcgaatcttattaataaaaattaactaaaataataatatacaattcaattgaaacatttttttctttagagacacgattaagattagaattaaataaaaatgaactaaataattagtcgtctgattctcagatcatttgacaaaaaaaataaaataaaaacagattaaaaaaattgcaacattacagtgaactttaagagcatttatattctgtttcatctaccgctcaaaagacatagagattgttgcagcaagttcaacctcgtagcttgagtctataataatgtgtcaggttcgtaactacactactaacaatactttcagttgtaaaagacctattatttcacaccactaacagcgattaagggcgagccattgatgaataacaaagaaccaacaacaaaacaaaataaaattatattacacagacaagactaaaatactcaaaaccatgccatagagacaagactaatcacaacaccaaaaattgaaaacacaactccaaccaaattgcacataataaactcaaaaataaccggtgagcctgaccaaaaaaaagacaacctttaatatccatccaattataacctttataatttttttaaaatagttttttttttctagggcgtaactaatttatattttatgtcaattaaaagtatacacttaaaataaacagtaataactagttgggcaaactagttttgatgaatatttcttcatcgtttctttttgtattatatttcatgttgattgtaaaaataataattatacacatatacatactgatagcgactacaaaggttctagtccattggattttttatttattaaaaattgaataataataataatattaaaaaaagaccaccgcaaaaagaagtgtatggccatgtaaaatatattattattattatattttaaggagcacttacatttgtgcatctaaaaaatatcttgaattgtattaatacagaaatgttaatgcatctaataatacaccagcttggattgagaactattacataatcaaaatctcattctttgttattttttcagattttattatgaaaaaaagagtgctaacaaattacaataaataagttatcaatatatatttagattttttctgaagaaagttttgatgtgagaattttatgatcttgtttggattttaa

SEQ ID NO: 26420 - DNA, 1853 bp, Cannabis sativa
ttatttcaatgggattacctctccttgtggttacaaccatctgcatgtgtgttgaagagattcaaaacaacgatctaatgaaagcactaaaatattgatctcgctatttgtcaacaactctgagtctttgaagcaatttgaaataatagaatttgaataatgattgagcgaaacaagaacacatatttatcattttccccaatgtggctatacaaataaaattaggaagagctcattataatatttccaagaggaacccactcatctaaccacctgcatctaatttgtcctggataaattttagagggtatgttcgattattgaaggataaacgaaatcatgagtaggggttacaatcattgatggttgttaagaataaatagggaaattggctcaaataagtgtgacttagggaaattactattcaacgggatagcttgaaagattaaatcatccaaaaatgtcctagataatttctaaggtgtaatgctagctacgattttaccttgaggaccacactaaacaactctagtcacataaactttctcaatgtgtcgttattctaggaaactcaaagcaaagttggattatataagcacacacctatttagagaatcacaactagaaagacatttagatatcaagaacactaaaaaacaagcacataagacacaaagagattaggcacatcacaaatggagggaaacaacaatttccatcatcgagcaacatgctaaacatgactaaacaaaccaaaatcctctcaaaacaacaatgaacacacaaaaacaacaacaatactaattcaaacaacaacaaaatacaaaacaatgaacaaaaaaactaagttaaataaactaaaaataaaagttcaaggcaaagaaatccccctcaagttactcagactcttcaccagtagagtccttgtcctcctcaacagtgttactccaaagaaactaaagaggagctcaaaatggtcaagaatggtggctagcactaattctttgggccttcatgaattgctgttatggtgaaagaacactcagagatgagaaaatggtggggacaaagctgctactagggtgggagctcgctggtgaagatgagatggtgttggcgaagcacagagaggcagcttgaggctcagggaagaagatgaaaattgtggatatgggggttagggtgaagaagatggtgcggctaggtgtttactggaaaggaaaattgaaatgagaagaggatatatttgtgaaagggttttacgattaaagatttaggggttttagtttaataagtaaattttatttcagcattttcttttcaaaacccccaaattagtgagaatagatttcgaaaacccccaaaaatttccaacttcacatgctcccagggactacaacattacttcaacatagaattttcttttatctttttgcttcaaaatgttgaaataatgctgaaacattgctgtaaatcctagaacctcctgcttctaaaataaatcctactttcaccacacttaaccaattccctttttttgcaatttcttattttgtacttgcaatgaatcaccacaaccattgcaaaaacattagtaacaacagggaacaaatatatatatgttattatataactatgaatatatgtatttttcttttttttaaggtttttttcttttctttttacaaggggtggcacaccccaaacttattacataatatatattaaacttgatacaatctcgttcttttgctcttaggttgcctaaatgtgatacattaaggccatggcaactcgaagtcctttttcaagcttctttcaaagtgatggaggtattttctcagttgacctca

SEQ ID NO: 26421 - DNA, 1548 bp, Cannabis sativa
atggctatccacaatacctcttggtcctctcttcatatgtcctttgatgaccttcctacttcacctaatcctacaaatcattctcaacatcctgctaaagcacaccctgatcttgcaactccaacaacactctcctatttcactagtcttggtttaggccttgctagggaacaacctcatgattttgaaaattttgataatttccaggtttatgatcaagtctttgaactagccaatgccttttcaagtcagtcacctgttgcttcaacctcttcccaatcatctcagtagcccattcctgctacaatacctattcctatcactcaccctatggtgactcaagcaaaagttggaatatttaatcctcacatactgccaagtcaaataaaagttgatgcattgaacactgcagaactagatagtgttgaagctgctcttcaacatcctggttggaacaaatccatggacactgaaagaaacaaaacttgggatttgcttccaccctctcctctgtaaaatttgattggtaataagtgggtatctagagaaaagctcaatgcagatggaacatttcagaggtttaagacttgtctagtggccaaaggcttccatcagagacccggtattgactatggtgagacttttagtccagtaatcaaagctgccacagttcaaagtgtgctaaaaattacaatttttaaaggttgagaacttagacaattagatataaataatgttttcctcaatggtgtgcttgaggaagatgtgttcgtggtttaatcacaagggtttaaagagaaaggaaaagaagattttttgcgttaactcaacaagtccttatatagcataaaacaagcacatagaacttggtttgaaaggatgaagagcacactacagaggtgagaattcaagaattctatgtttgacacctcgcttattttctacaaatttagaaaagtaattgtcttggtcctaatctatgttgatgatataattgtcacaagaaatgatctaaacaaaatgcaagggtttattatagaagtgaatagacagtttgcattaaaatatttggggcccttacactacttccttggcaatgaggtgtttagagatgagtatggttcttacctaactcaactaaacacattaaggatattctgaagaaagtgaatatgggaaacatgaaattttatccaacaccattgactttaggaaaacctatgtcaatcaaagatggagagcttatgcaaaatccaaccctctaaaggtaattattggtgcattttagtatctatgtcacactaggccaaatatagcctatgatatgaacaaacttagccaattcctacagttacctactacagtacactagagtggagtaaaaagggtcttgagatatttacagggaacaaagcaattaggtttgcatattagctgtagtagtaggttaactatcaacgacttctctaatgcgaattgggcctgttggccagatgacaagtgctctattaaaggtcattgtaattatttttgggatacacttgtgtc

SEQ ID NO: 26422 - DNA, 1830 bp, Cannabis sativa
ataattatattatagttgtcataaatttattttttggtttattttttcgttattttatagttaataattgttgtgattttttatttttatttttcagttattttgctgagaaaaatatactttcgtaatattgtaactttacaagtatatttttgtaaataaaacaaaaatttataacaaattaaagattatttgtgaatagagttatacaagtgacaaagaagtcttgtaaaaaattgttttgtgatgaaattttgttgttattactatgtttttctgcttggaaaattatacagcaatataatagatatataaatatgtaaacaagcaataacatataagtatgatttccttttctttttctgataaaataatataataaaggtggtagaaaatgaagaaaaattaaataaaatcaaaacttagtaagctttcaataactcaatggtgtttctaaataataccaaacataaatccaaaaacaaacatagaaagattttcatatgactaaacaaaaaagactcatcacaaagacaattgaatcctcttcctacattctattattattattattactgttgtttcacttcactcttctttttttgccaaagcctatcaattgcactgtcagcatcaccctgcaacaatcaaatacaatcaatcataaattttaacttaaacaaaacaaacacaaatgtcttttaagtgtgttttctaatctgggaaaatccaaaattattatattgtattaatatatgagttgaattcaccaattaataatgacactctgaaatttaacttagatcaaacaacacaaatcacatcatgtatcattattatatgagtttaaaaaacccaattttgcaaatttgcaattcaatagattaaaaggtcaaaactttttgaacaaataaatcaaatcatacatgttatacaagtatacataaatacaatatatatactcaaacaaccataaaaaaccatatattgcagatttgcaattgaataagcttatggtcactacaaaacatatatatatataattcactgcaaatacattgaattctttcaagtttttctagcttgtaaaggtccaaaatttcaagcagacaaatccaaccatacatcaatatatgatttttacggtacttaacaatcctgatatgatatatactcaaacaaccttaaaaaacccaatattgcaaattttcaattgaataaattcatggccactagcaaacatataattcattgcaaatacattgaattcagatcattcagaagctaactcattgaacagagtgtatctatatatatatatatatatgaatacacaaaattataatgacactccatgaattcaacttaaacaaatacacaccttttaagttttctaagatataaaggtccaaactttcaaacaaactaatcccatctcccctaaaaaatacccaattcactgtatttgcaaagatatataatttcactatgacaaatcattagtatataaaagaaaaagagttgaacctgagcacggacgaagccacagagagcataagtagtgaactggccagtgtagacaccattttcatcaaggtgtccaatgttgacctgtacggacgcatggtccttggaggtgatgagcctgtttgtggccgagctgtagaaccaaaatattaataacaattcgattaaaaccctaatcttacaaatcacatatatatatcgaagaagaagtaatggaatttaccatttacgtggaatgtaaagctctgtgatcactccttcgtcgttctgcatcttgattcggctagagagagagagagagag

SEQ ID NO: 26423 - DNA, 1405 bp, Cannabis sativa
aatttttttttccttttttgtattttctattttttgtccctataaaaaagcctattttttatgtagctatgagttgccagtatatgtaagatgagagtctatttaacaactttaaattacttgatattacaaatattaattttaataatatatatgacatattatcataatttattattataataatttttatatatatattttttaaattattaaactgaattaaattaatatcatattagtggtacattagaaaattgtttaaaacaggacaaatggtattttgtacatattaatattactaatttccgtggaagaaaaagcattggagaaaacccatctttaaaaaatgagataggttggaaaataatttttttttgaacaaaaagaaactttttattcaaaagaacaaacaagatacaaaacaaaggctggagtcaaaaaccaaccgccacataaagggaaggttagctaccaactattcactaccctccaaatataacaatcttttccttttgtattgatacaatgaaacccaataactctagccttaactatacatttaatctctttactaagaaaggaagctgagtgacaaataacattaaagagacaatcatttctatttctctacaattggtagagagtagctgaatagatagcattcaaaatcagatcagccaattcgggtttggctgggcactttctctcctacaactcactgaagcacttcggcttgctcaaacaacctacccatttttccacactatcaacaagttttcttgtaaaaatgcagtccacaaataagtgattatgagattccgaagcattctcacaaaccacacaaagatccgaagggatggcaagaattctgctcaaaagatctcgggtgagcaactgctcattgacgatttgtcagaaaatgaacctgtgtttaggaataataaacttatgccaaatagtagcagcatagtcaatcttcgctgccccaatcagttcaatataaaatctgcaaactttgaacttaccccttttatcgcctggttcagcatgcccatgtttgtcacatttcagatctttaaaagcttcttcaaataccaactgaaatctgattttataggacaagaccaaatattttgagtctttaagtaaatggagttgatccatttaacctaaatgttatcttgtatctattaattaaaaatatttttatatattttataaaaatttattcatttttttttgaataggttacttaatatacttttattctctactttactagtatataatttacatacgtctagtaagaacatcattaaaaatagaagtagaaattaaatcaaataaaaaagtgtataaaatttaatatcatcttaaaaaaatggattaatggagtttctat

SEQ ID NO: 26424 - DNA, 2419 bp, Cannabis sativa
gatagttagggtgttacatatgatgtatcaattatagctatagttggtgtacataagattgcgtctagatatagtaaaaatatatgtttggaaattccagaaagtatgaattagcatcgtagcggtaagaccataattatttggtatattaatgttctggaaagtttggtagcatttgggatttattggaccaagttgtggtggtttgaatattggaaatctcgtgtttcttgctcccatgaaaccggaattttcagaaggtacatggtcgtaccaactagaattctgtttggacaatatttaaaaagtatcaatttttgtattttggccataaatttttactagggtgtccattttggacgttctatatactatttttaagcttatgatgagctctacagtatgatatatatatagatatattagagacaaagtataagttttattttagggtgttttcaccatgtaatttggtagaagaccctaaagtcttttcaggaatcagggagtgttctagagtaaacacttaccagtctttcataaatgtgacataaggcctccgatcatcagacggtatttctattcaggttgaccggcccacttgaatttgaaaatgagctaaaactagtatacaacacacatatgtacatgtttatattttccaattatatgatatatcaattagagcgatagtttgtgtacatgagattgcatctaaatatcgtttgaatatatgtttggcaattctagaaagtatgaattggtatcatagtgatatgtccatagtattgggtcagcagtacgagcatagtactggttatgacttatattcaattctagaaagtataaagtgacactatcatagtggtacaatcatagtacttagtcagcagtacatgcatagtactaattaagagtgaaatatggtcaattgtactttacgatatagattgatgctatcatagcggtacgatcatagtgtcaggttagtagtacagttataatgctgcttgagactgatatcatggtcaatcttaccaaatgcaagaacattcttggattgtctcttaagacttgtaagtaggtgtatggggccctaggtgcaagttggttatatatatttatttttatatttttcttattgagtttgtcgactcacaattactaccacatgtgtgggtaatggcaagactagaactgagtagctgtgagtcaagagctcagtgaagatttcagtaatcttttactattcatgataaattggataaaatcccaacataaaatctcaacatactcccacttgcactaatattatctatccaatttttatgtgtttggatcttcgatgaaaaatgggctcatattttatgacgtacatgtttgaaaaaattagatacgggatccagattttggaaacaaattgtaagtttttatttattataaaagtttaaattaaatcatattttttgaaattctttgatcagcaaagatttcataataattaagaaagtattgtagcacgcctaaaccagtagggtgttacaatcagaatggctagctaagaaaaacatagacatattattaaaaatagcctaactttgcttggtaaagccactatgaccttcaagttccttgatgaagcctttaggacaactgtttatccccatactagacttcttactcatgtgtagcaaaataagtgtcccttggatgttttgtttaatcaaaagtcttattatatttggtttaaaacctttggctgcaaatgttatcccaataataggccatataatgaacacaaactttagtttagatctagcctttgtactttctttgtagcgtctccattgggccttcccccacatactaatgactcttatacacgactatgtcactcttggatgcttcatggaatgatgactgaccctgtagaccaacactagtctttccagcatgctttatcctcagtcgcccacttcttaggagaactttccaggaggtcacccatcttgaaattaccccaggttaaaaacacttaattttggagttctttcatgatgggctaccaaaaagaagatacattttgttgatataggtagtaccgatcaatctatttaatctctttttaacagtgtagtcccatacctacgcagtctcagaatcatcacacttaaccttcccaaggcgatgttgggattgcacagctcccagtctttccccttgcagatcacaagactccgactgtcgtaatcacccccttttagttgtctaacatcctcgtcgaccatacttcaggttgggtcaaggctctaatattctttataacgtccctaattcgagcctccactgggccttcctccacgaactaatgacttttatacatgggtatgtcactcttgcctacttcatggaatgacga

SEQ ID NO: 26425 - DNA, 5069 bp, Cannabis sativa
aaaaatacaacttaggtatttatctgctactcggcataaaacttaggtatttataccgcaaattactctattttatatatatacaccgtttttttttctcttgtatttttcacaactaaagagattgtaataacgtgtcaaataaaatcttaataaatttgtaaaaataaaaaaataacaataaagcatcatctctaatctctaatataaactgaaatgtaaattggtaatgacccttttttttaaaaaaactttgtcccaatatgtgaggtttgtatttgacatttcaaattactacatatattttgagtcaattatgtcttataatatgataaaaatgtgtagtatttttcactatgattccattataaattcttatatttttgcaaagtctttaaatatgtcaaattctcaattgaccacagattcatccaaagaccttcaggatcaagaactctacaacgttcctgtctcctatgctcaagaagcccggattttggaaagagccacaccatttgtagtggggagctgttcgaagaatgtagccaaaaagaatagaaggaaagtagcagtgaaaaaagactcaaaggctaggaaagggaagttggaaaataaaggggctaacatttctcctatgggggatttgattgtcactcagattacagaagaggcgaaccctgataatcagggtcgcctacagccatgaatattctaatttggaacgcccaagggttggggaacccttggacggagcgttctttatcttccctagtgaataaattcagcccttaaatgatcttcattgctgaatctaagattggtaaagtgcgtgcggagtcgttgcgagttaagttgggttttgttgggtgttttgtggttgaagctcgagggaaaagtggggggctccttcttttgtggtccatggatgtggaaacccaagtgctctccttctcccccttccatatcgattctttggttagaattgagaatggtcaatggtggcggtttacggggttttatggcgatccggatcctagtcaacgatgtcattcttggaagctgttgagaagagtaagccgaatgtattcagggccttgggcagttggaggggatttcaatgaaattgtgagccaaagcgaaaaaatgggaggcctccccaagccaaggtacctcatcaacaattttcggaaggccttgcataactgtcatttgcgagatgttgggtatgagggaagtgattacacttggtgcaatgggaggaaaaatgatctcatctttggaaagactcgatcgggtttgcggtaatttagaatggtttgatatgttttgttcaatgaaagttcgtcatttggatcgtataaactcggaccattgtcctttactccttatggaatatgatcctcatgtacagaatcataataagactagatggcgcacgagattccatttcgagagtgcttgggctgaagacaatgagtgttctcatattgtgcagtcagcttggcaacaagataagaaagtttcgaacactagagagctacagattcggctgagaaaatgtgggcaggctcttcaacaatggaacaaaaccaaaaagaaagagatgtcaaggcatttaaaggaatatgaagataaaatttccttacttacccgaagcacaactatacaggattggcaacaaatgcaggaattggaacggaaacaaaatgtttggcttgacaaagaggagaagttttggaagcaacggagtagagcgctttcgttaaaagatggggacaagaacacaaagtttttccataggaaggcgagcaatagaaaagcaaagaataccatccaagggttgatagatgaccagcttcaatggatcacgggaaaccgaaatatgggtcgggtggcgtgtaactacttcaaacaattattcacttccactccagctaatatgaatgagttgcaagagtttcaaagtattatcccgcaccgtatatctcgagcaacaaatgactatttgctggaaccattcaccgaagaggaggtgttcaaggcaatgcgtaatattcatcccttaaaagctcctggcagcgacggattacctgggcttttttacagaaaatattgggcattgattggacttgaagtttccaaagtgtgcttgggaatccttaatgaaggaatgcaagtggatgaaattaatgacactcttatttgccttattcctaagatgccaaagccaacccgaatgtcagattttagaccaataagtctatgtaatgtgatctataaaatcgtggcaaaatgccttgctggccgaatgaagaatagtctgcatcaagtaatttctgaggagcaaagagcctttgtggggggtaggctcatacaagataatgcaataatcgggtttgaaagccttcattgcatgaagactaaaaggtttggaaacggaagaaaaatggctttgaaattggatatgtccaaggcttacgatagagtggaatggaactttttaagaacaatgatgagaggattgagatatgaagaacaatggatccacaagatcatgaagtgtgtggagagtgtctctttctcggtcttcatcaatggggagaaaatcggtaaattccaccctactcggggccttcgccaaagtgactcactatccccatacctctttcttctttgctcggaaggtctttcttgccttattcatgaagccgaaagggctggaagcattaatggaattcaatttgggagagaaagaattaaagtttcgcatttgttctttgccgatgatagctttgtttttcttaatgcaaaggaaaatgaatgtgatactatgaagaggatccttcaccaatactctaggctctcgggtcagcaaataaacctcaagaaatctgaagttagcatgggtaagaggatatcaactagccagggacaggctttagctcaacgattgggggttcgactagtctctcaccatgccaaatacttggggcttccgagttttgtgggaagaaggaaacaagaggtctttgaagttgttaaagagaaagtttggaacaagcttaaagggtggaaagcctcaatgttctctcaagcggggaaggaaatactaatcaaagctgttgtgcaagctatcccgagttataccacgagttgcttccgtctcccaaagaagctcattaaaaatcttcactccttggctgcaaatttctggtggggggatacaaaagatcataagaaactccattggagttcgtgggataaattatgtagacctaaggaggagggaggccttggcttccgtagtctaaccgagttcaaccaagcccttttggccaagcaagggtggagacttcttcataatcctcacgctcttcttacccggattttgaagaatagctactatcctaatacatcttttatggaagcgggttgtcctaatggtgcttcttgtgtttggaaggggatttgttggggaagggaaattatcaaagaaggggctaggtggagagttggtaatggaagaacgataaaggtgtgggaagacaaatggctccttagacctcatgaatctactctctctaaatttcccgacattccacctcaaaccaagcttcataagtttataacttgggatggagagtggaatatggacgagatagctaaacactttcatgagaatgacattccttggattcaaggaattccaatagatttatacatggaagacaatctattttggcctttcacccctaatggtcattataatgttaaaagtgggtatcaggtaagcagagaattaaatcttcatcccacaaggtgttccaacatggctgagattcagaagtggtggaaaatgatatggagcctacaacttccccctcggatgaagctgtttagctggagagtttgccacaactggctgcctgccaaaactaacctgaaacacagaggtatggatattaatacttgctgtgatatgtgtggcaggtacgaggaaacccttacacatgctttatggagctttgaaagagttagaaacgtttggaaactctgttcttggtacaaaaactgctcttgtttaggggaaggatctatgtttgatgttttaatggccataaaacagactaataccaagtacgagtttgaagacactatcaaagtgatgtgggctatatgggaaaaccgaaataggaaatggcagcaattaccaagtatgaatgatcaacaattgatatattgggtcttctctgcctacccaaatgttcttaaagctggaagtgatggaattcagcaagaggccgatatcacaattaacatgaagcagtggaatccccctgctactgaatgcatctgtgtcaactgtgatgcagctgtagttgataaagttgctggtatgggtctcggttatatctggcgcaagactgatggtcaaatccttgctgctgggcagatttacaggaatggcatttgcttagctaagatggctgaggcttgggcgattttggaagctttgaagaatcctccagctgaggcaactaacacgattgaagtccaatctgattgcagggtgctggtggaagaaatcaacaatatggatcaacatcactcggctgaaagcaacctgctgcatcaaattcacaatgtgctggccaattttcagactgtaaaaatcattcatgtaaaaagaactaataatgagtgtgctaacatgttagctaggaaatgtctagttgacaaaaacacacaatttttcactcattctttcccggattggttagccaatttttgtaaggctgattatcccaatatggtgtagtttgttttgttggttctaataaaattctctttcaaaaaaaaaaaaaaacaaaattacatatcatagaatcatcacatttgtaattatagtatatattttacgtgttttcaaatcattcattttttaaaagaataaataaacgtgcattgatatagacttcatgaccatgagaagtttattggagaacatattggcggccaaaccacctgaactttacagtttgtaacacttaaccacaaaaactgaattt

SEQ ID NO: 26426 - DNA, 2083 bp, Cannabis sativa
ttcgggttgtattttttgtcggtttattcggtttggtttgggcggtttattcgggttgagcggtttgtaaattttattgaacacccctaataaacatatatagtttttttaaaacaaacaaataaatataaattcagctacaatatatattaatgtagcaaaatatataaatcatcttcaattttatttacatcataagttatctatcctacacaattctaatttatacagtatactttgttagaccttattaagtcgggttggggtaagggttgggatccaagagtcgggacatatatgggttcgaggttggggccggggttgggattcaagagttgggagctaagtctgggttggggccaaggtcaaagagctagggctcgagtctgtgcggtcgaggccggagttcgagactaatgtcagagctagggtaaagccagggaagtccaggatcggggctttaggctgtggtttgtgttcggggtcgaggcgcaatatcggggccgtggtcggaggtctgaagttggaatcgtggttgaggtgaccggggtctagcgcgctagggttggggtcgaggcccaagtcttgggttgggattagggtctggtgtcgagatccagtgcttgggctggggttcgatgtgaggtccggggctggggccgtcatgacctgtggttcgaggttagggtttggggctcgaggttagggtcggagttaggagttgaaggttaaggccagtactgtcagacctaggagaggattagtattacatatgatataattgaaaatatttattttatttattgattttaaaaaaaaaattaatacagtataatataatattattgtgcaccattcatgctttaatccaatatataatataatacaattcaacacaatattatataacataatataacacaagtgggtgaaccgaacaccctatttgtacattatatttatactacatccttacggtgtgatgaagatacgtaacatgtgaaggcatgtcaattcaatgtaagtaactggcctaataaatttaatgtgatgatttttctttttctctcaacttttaatgggtattatttatgaatgatatttttaataatattaaataatttaatattaaaaaaataactaatctaaattaaccgatttgcgtatattgtattagattagaattattatgtgaattggattgaatccaaaatataaaatctacacttatcaaatgtacttaagcaaaatatacaaattgaattaaatgatcatccctagatatatataaatatgaaacttaatttatttcaataataaattaacaacttagattggaccttaatttgatatgatctatgctattgattagtattaacatttgtgacacaaattattaaaacaggtgaagttaatgagctcaacagacatattggtatccccacatggagctcaactcaccaacctgttgtttttagaccgaaacagtagtgttatggagttctttcccaaaggctggcttaagctagcaggtgtaggccaattcgtgttccaatggatggctagctggtctggcatgcgccacgagggaatgtggcgagaccccgacggagaggcttgtccctacccagaggacgatcgtcgttgcatgtccatcttcaagggcggccgggtcggacacaacgagacctatttctctgagtgggcaataaaggtactcgctcaggtgaaattgaggaagattgaagataacaaggcatcaaaagggtctaaggattctagtggctgttcttgtacctcatgatcttttctatgatcattttttaggttaaaatattttgttaagattaatgatatgtagacatatacaaattatattgaaatattatactgagacccaatttacataaatgtgattagttgaaaattagtcatgttacaatatatcttcactcttaacatctttgttatatatctttatatattaaaagtgcctatgtaacggcaattcttggtttaacagaatatgctttataaataaaagaatattctgttaaatttaaccccaaaaataatcgtccac

SEQ ID NO: 26427 - DNA, 3269 bp, Cannabis sativa
atatataaatatataaaaagatatcgatttcaatatttacccctgagatatcaaatatatgtaattatgattatgaaagtttcattagttcattatattatataataaatgtaaaatcacaaatgatcactcaataatataatattatttatttacccatcaaacttaaattaaattgtatgaataatattgaaggaaccgtctttcgagtttatttatagttggtatatataaaatgaaatgtaggtgctacttaagaatttagagaaacaacagctgatgatcctatgcaattattcttggtgtcatctcccaaaacatctccaccttattattattattattcttcataaaagacaaacttataatatatagtacagtagtctatatatatatagttttattctttttaaaaaaaaaaaaaatagtataattttattcattgaaaaaatataaaagagcatactcagttgttgtgtggtgtactcatgacattcattcttgttttggttaatggttcaaaattcactacaccctttcttcaaagagattatgaaataacttgaaggctaatttactattattttaaattagaatcctccagataagtaaattattataactaacacgtgttttctcatattataaacagattaacgaagggtgggaatattttttacaccacgtaatccattttagttaaaaaagagcataatattgcagaaatataataaatataaatgtatatatgacaaaaatatatgaaatgaaaaatgatgataggggtactttagtcataactcgtatatatatacatacatatattaattacataatgaattctatatatataaattatatatatcagtgatgaaaattgatgtctccttcttatcccatttaaatcgctgaccttcctcttcctattcccatctctattcatttttcatttttattcatcaaaaaaaactcatatactctttctctttctctctgtctaattttcttatattgtatcatcatcatcatcgctattataatacatagatcgatcatatatatatatatgggtcggtcaccatgctgcgacaaagtgggattgaagaaagggccatggacacctgaagaagaccaaaagctcttggcttatatcgaacaacatggccatggaagttggcgagctttacccgctaaagcaggtactactacttctgctttctctttttacctaactaacttctcaaacttaccgattctgttagaaacagatttaagtgtgtttttattatatatttatatattatatatagggcttcaaagatgtggaaagagttgtagactaagatggactaattatttaagacctgatataaagagaggcaagttcagtttgcaagaagaacaaaccattattcaactccatgctttactaggcaacaggtatacatatatatatgtatgaatctatacatttcttcaagctacaatatgttatcaaattcaaatgtgtatatgcatgtatgtacgtgtttggttagttttgtgtactaattaatcaatcatcttaaaacctagctagctttatataatttttcaactaataataataagtttctttgacaaacggggaattattattaatgtggctttacacagactacagcatgtagtgtttataaatatataattaatataaagtttcatatttatttttagaaaaatgaaatttatcatataaatcgagtaacagtactaatacattgaactctactatactccttttcgtgatacgctttaaatgtagtatatatatagtcactctcctctgacctaaaattatataaaattatttattatatatattaattacataattctgaccatcatttttctgccatttttgtttttaaaatatttattatacttctgatcatactctcagaaaattcatcatataataataaacacaataataaatgatcatctttttctttgaaactcatcaacattacttttttttttgcataatcaaatggtccatatatataataataatttacttttattttaacttaaattattattttattttttattttaggtggtcggctatagcaactcatttggcaaaaagaacagataatgaaataaagaattattggaacacacatctaaagaaacgtttagccaaaatgggaattgacccaattacccataaaccaaagaacgacaatcttctctctcaacaagacggtggtcaatccaagaacgccgctaacttaagccacatggctcagtgggaaagcgctcggctcgaagccgaagctcggctcgttagagagtccaagcttcgtaccactaccaacaacaatatcattcatcatcataatcatttcttccttcatcataatctcatcaacaacaacactaccatcggctcggcttcagcttcatcagcttcggcttcaactcaccttattgacaaaacgacgtcgtcttcccatgtgtttattgagtctgccacgtggaacaatactagtggtggtggtggtggggtccgcagtgaccttgagtcacccacatctacattaacattttccgagaacgcgccgccgtccgtggctgccggagatactactaccgccaccgcctcggagagtaatggtgagatctttaaagaagaatatttgggagaacaaaattggaaaggtaataataataataaaaattgtgaagaagaagaagatgaagatgggttagatgataataataattcattaatgttgtcatttaatattaatggagatcatcaagggtttactagtcttttgcttaataataatatctccgaggagcctagctgttccggtggcggtggcggcgaaaatggtagtggtggtggtggaagtagtgaacataataattatggagataatgagaattattggaatagtattctcaatttggtgaattcttctccatcagattctcctatgttctaatatttaagtatgtagtagctatattataagaaccctagttaaattaaagaacactttttctttgtttaattttaattttaatgttaattattatattgtgattaatttgttataatagttagattaattcattaataggtgtgcatataattattaatgataatgctaaccaaatttaatttctatcagctagtttggtacgttttgaaatgagtggagtagcccatgttcttatatatagctcaatacttttatatttaatccatg

SEQ ID NO: 26428 - DNA, 3990 bp, Cannabis sativa
ttattttgacaaaaaaatcagttcagaatcctatttgtaaaattttaaaaaatacaagatccattttctcatttaataaaacaaaaggtccagttaataacatttacaaaatagagtccaaaatagtatttacgcgagtattaccatttaccaccataacaaaaaagattaggggttatgtataaaacttacaaacttttgcctccaattatccacactgttttacatataaaatgaaatttatgtaaaagctgctctctctaaattcatatggagttgtttcgagttttgagtgttctccggaaaacatccaaaaatcacattacttcatttcgacattactataactcttcaatatcaaaccctttatctccacaaattcgtattcttgcttcaactgccacatctgaaaggaaagactatcttccatctggctttatttgcaatcgctgtgtttcctacggaccaaactctagtagtgatttagatcaaacccaagtttctgttaagagtttttcgaataacccagttgccacaatcgataatatagctgaagacgcagagaaaatctgtaaaatattgtcaaacaactccgccaaccctcgggttgaaagcttccttactgataatgttgctagtattgagatgtcaaaggagcttgttttaggggttttgaagaagctaagtaattcgggtgttcttgcccttttgttcttcagatgggccgagaagcgagacgggtttcactatacgactgagacttataatgctctgatcgaagctctgggtaagatcaaacagtttaaaaaggtgtgggaattggtgaacgatatgaagcttaaaggtttgttgagcaaagatacttttgctttgatttcgagaagatacgcgagagccaggaaggtgaaagaggcggtagaaacgtttgagaagatggagaagtttggattaaaggccgaattgtcggatttcaataggttgattgatactataagcaagtcgagaaatgtggagagagcacagcatgtgtttgatcaaatgactgagagaaggttcaaaccggatattaagtcttatacgattttgttggaaggatggggtcaggaacagaatttgctgaggttgaatgaggtttatagagagatgaaggacgaggggtttgagcctgatgttgttacttatggcattatgatcaatgctttttgtaaagctaggaaatatgatgaagcccttgagttttttaatcaaatggaagcaagtaatatcaagcctaaccctcatattttctgtacattgattattggattgggttctgctaagaggttgaatgaagcattaaacttctatagacaatccaaggctagtggttttagccctgaaataccaacctacaatgccttaattggggcttattgctggtcaatgcggatggatgatgcgtatagggtgcttgatgagatgagacaaagtggggttggtcccaattcaagaacttatgacataatcttgcaccatttgataaaatgtagaaaaacaaaagaagctttctctcttttccagagaatgagtgaggatcccaattgtgaaccgactgtgagtacgtatgagatcataattaggatgttctgtaatgaggatcgagtagatatggcgattcgggtttggaatatgatgaagggcaagggagttcttccgggaatgcacatgttctctacattgattaacagtttatgtcttgagaataagttggatgatgcttgtaacttcttcctagagatgatgaatttggggattcgacctccagctcagttgtttagcaatcttaaacaagctcttcttgatgaagggagggaagataaaattcaaactttggttgagaagattgagaatctgaggaaaagctcattaggtggttaatgcattaatagaaccaaaaggttgagagaatagtaaaatttcctatatagaggcctttctgtttttttttttttttttttttaagggaaaaaaaagttttgcttagagctttttaacatgaaatgtttgttttcattggtgaaaggcattgagagttcgttcttgctctgtgacattcttttgatgtatttagagtgaaattaaaagtgtagatctccactagaaattgtttaaaagttttatataacttattctattgcaaaatgaaaacgtagtttacttaatgaagttttttcttgatgtagttgttcagctttaacccaatgtttggtagggctggaagaaatacagtaggaatatagaaaactaaaaagaaagtatcaaaattttatttcttctttagttgtttggtcatagatatgttaaaataggcttgttattttcctttttgtattcagtttttactttttctttttttactaccactggttttatggaatatttgagttgtattctgttatgttagttacagttggttggttgtcttcttgtaactaactttgtaactaattgtctattgtaatcttcttgagcttgagctatgaaaagctcactcccttttttgattcattaatgagaaattcgttctgtttccttcttctctttctttctggttttattttttttagtttgtaatatggtatcaaagctacggctttcgtgagctctttctctggtttctttgttgattgtcattgtggctcatggctcttggaggagccaatactcgaagcacgacaaatcagggagatgaatctcgagctgctaacagattctctgtcctggaaacgaatgatcgaccatcaagagaagatcctagaaatccttcatttcgagtggagatcaatcagttgtgaatcttgttccaaagatcttgactggctgtgagaattacagctcatggaggcgatccatgattgtggctcttgcagcaagaaacaaagtaaagtttgtcgatgggcaattacctgaaccagagattgatgatgacatctatgatgtgtggtttcgatgcaatagcttggtgatttcttggattttacatgccatatcaagtgagattgctgatagcgtgatgtaccttgacaatgctgcaaaaatttggacagaactttaggagagatatcatcagaaaaatgtgccaagggtgttcgaagctaaacgatctatgcatgcattagttcaaggtttgaattctgtaaccacttatttcactcgtctgaaatcattttgggatttgatacaagagtataggccacagcccgtttgcacttgtggtgctatgaagactatccaagaataccaagataaggactgtgttcttgagttcttaatcggtctaaatgagtcctatagtggcgctcgatcccagattttgatgcaagatcccttccctaatatcaacaaggcttttgcctctgttgttcaagaggaaagcagagaggaattaccactaatcaaggtgaaaataatgctcctcccacatcatccaacaatggtccatttgctgaaagtgtccaaccacacaaaccaaagactatctgtcatcactgtggtgtccaaggacatattatggccaaatgttatcgtttacatggatatctcccagaacacaaactgtatgggaagttcccaaacagaaatgctcaaggttctgaaaaatcccctgctgccaactcgactaagctcaaaagaatggtgaggctaatggaaatgacaagaacattgagcaagacttcatggccacctttgctcaatgtcagaagttgataaacatgttgtcacagaaaaattcagaaacaacacaacagtgagcagacaaatcagccctcagtctctcaattttttggtgaaatccttcctaaaaactcttgttggattctcgacactggtgctactcaccatgtgtgtcatagtctttcactttttcaaaatacttatgctaattctaagttttcttgtgtcaatctgcttaatggtaacactgtcaaagttctttgcttaggaactatt

SEQ ID NO: 26429 - DNA, 2285 bp, Cannabis sativa
atatccaatgtttggcggtcggttataattcgatttatgcacacccctaaataaatcattgataatagtactgctacaccatacctgtcataaaaagtgtataccccattatttagctgtaaattcatgtcaaacaacaattttttttaacaacaatttaaatccaagtgttttggaagaaagaagtatatcatcatttagttcgtcgctctagaaccttctagcgggctgcatcccgttccttctgttttctcctgttttctcaaatttctggatctaatcctgtgtatctcatcttagtgatgtcgttttactgcttcaatccagcgttttctctcttttctttatctttgctttggtttgactttctgtttctctgtttgatcatttattgctcttcacatcaactaatcttcatttattgctctggagtttagatatcttttagatctcttttcaggggagtttatttgtcttttgtttccttctttggtttattttttgtttccatttaatgcatgccgtcgttttgagcagcccaaggatggaggcgatcattgctcctaccggctatggcgatactatagggatactgaaaggactggtacgacatcttcaggcaaccttcctctgcaagtctccactctccaggtatttctctaagtttctctatttaaggttttggtatctgttgcgttctcttctcatccaactctttgtccctagttttcttcctgtagctattccttcttctgttttcttgagcctttcaatggattccctagctcttaacatttctgaagttttaaaccttaccgaccgtgaagctgttgttcatgatgttgaggatgatactgggggggttagtcaaactagcagaactttttgccttgtgtttagaatcctttcccctagaaccatcaagcttgagtggtttgaagtggcaatgagaaatgcatggattacccgaggccctttaactttctctgaatatgggtcgggtatgttcatggtggagtttcattatgagggggacatgcgaagagtacttgagggtcagccatggcactttgaccactgtttggtcacttgtgctaatcccacaggtctggacactcttttgcctaaccagcttaggtactcccctttttggatacaagtccactcgattccttttggccagaaatccctgaaacttgccaagttgattggatggagatgaaggaagtgggggggggacttccttcctggaggttgacaagcttactcttttcaaagtctctgagctttttcttcgagtccgtgttctcatcaatatctctaagcccatcactggtggaattatggttgattttaagagtatccaccgtgagaaatggctcactttcaaatatgagaacttgccaaatatctgcttccattgtggcatgtttgatcatactctcacgaagtgcattgtttaccttcaaaagtgcgatgatcgtgcttacccacctgatctcccttataaaatacctctcaaagcccctgccaaatcgacttttaaaagaaacccgtttgatctttcaaattctttacctttggatgaacctcctgctcaacatgaaaatattgaccagtcccttgcagctgctgtgagccaattccttaccactgaagatattggctttggctcttcaggtgctgcttctcgtggtaatgctactaccctgggatctttgggagttgaccatatccaaagctctattagtctgtctcatgagagttcacccttgagccatgagagttttcactctgctgttatttgtgaccttcccttcacaactacccaacatgctacggtcatggccagtgaaggcactgctgtggagggtgttattccaaggaccactgataaagctaaggggaaagctgttgctggggctaaaaggactgctttcctccctcaaacggttgtggttggtgactctctcaggaatattctcaagcgtgctcgagctggtcctactattgccgatgtttctactgccattaatctctctttggaacaggcgggtgttgcagggcaaccccgcccagaaaaatgagtctcatgagttggaatgcccgaggtttggggagctctcgggcattcagaaacctctccctttttgttaagaagcacaaaccaaattttctcttcatcatggagactaaagctgctgctggccgtggaaatagtttatgtcatagtcttccttttgataatgtgtttgaggtgcctagaatatgtttggggggggggg

SEQ ID NO: 26430 - DNA, 3493 bp, Cannabis sativa
  modified_base (1555)..(1563): a, c, t, g, unknown or other
  modified_base (3002)..(3007): a, c, t, g, unknown or other
aacctcgttgattagcaacgagctgtacagtacgttaaaaatcacgctaacacgcctatgctagttagggtgttacagaagcaatccaaaaaactatgcaaggtttgtagtcgacgagatttactcatcaaatgcccttctgaatcttcgtgttcttgcaaaaacccaaagaacaaaaacaagttcaagacattgaagttctcaaagcatacaggacggaaaataaaatttttgtgaaagaagtacgactttcttaaaaaatctgatcgatgttatgtgtgtggaataaaggggcattatgccaaacaatgccctaagggaaaaatagtcaagcttctctcacatatccaacaaacgactgggatgtctcttaaagaaaattacatagagtcaatcttctccacagatgatgaattcaactcagaatctctttatccattcaagcaatggagtgattcggacactccagaatgttatcaaatgtctattattcaaacgatgcaaccatcccctatcatcactgtgcaagttcttccaacaaaatatgccaagccgataaaagtggtaggatttttcgacacgggagcatcgtacaagataatgaaccctgatattcttcctaaagaatattggaagaaagagaaacaataatttaatgctacaaatggaggtattctttgcgcagaactcatcagcaaaccaatacggttgcagttcttccccagatgttttgttactcacaaagtcaatggatcaaaattactcagacaagtgttaattgtttggtttgatctttacacgaagaaaaagggtttgcgtattcttcctagtggacttggttacaaataacatttttctccatgggaagccataccatactatttctcaatgccccatactcatttcaccaaatcaaaaaagggctcatcgaagtcttatgtgtcaaaaattatgtagagttcttgaagaaatgtgaacatcctttatggaaaactcaacaattcttcataagccttccttttaagcttaatgaagatataaaccctacaaaggctagtcaaccaggcgtgaatctagaacaccaaaaaatggcgtccaatgaatgaaaagtgttacaacagtagtgtaactccctgatacttaggcgcactacagtgatttttcaattacagtgccacctttgctatttaaaggatttttcttgaaaatcatgtcacattaaaactttagatttaattgctaaactttataaactttaatacatttatttacaaaagtttggatcccgtatttaaaattttacaacattatcaaaatatattttaatctggtcgcacagtcactacaaaataaaatcccaattgtcccgagaacgaacactccaggtcgcgtcgccatgacatgtacaaacaccatcctagctcgaagctcactcccattcagttttttcctttcctttacctacacatagaaatagcaactgtgagtcgatgaactcattaagaaaagcataccatagataatataatgtcgacttgtatctaggcgcccatannnnnnnnnacaaggcttaacaaatgagtaagaacgttctttactagggtacagccactgttccacatacacgacgtactagtactgtacgagtgtttgtaaggtttatttcgtaccccgagtaccactaagtgctataccacacacagcctgtacctttctgtgcttgtgctggtaacactgtaacgtactctttaaacattgcacactatacctatgcactctgtatcgctaccgtacaagtgttggtactgtacgaatcataacaaggatgcatataaatattagacatacatacattcgtatatatacaatattttctatgctattcttacttcatttttgaattcaagtgagttggccgacctgaacgaaccacaccacataaatgggtaaacgacacgccaaaaccttaatccgagaaatccaaacctccaactaaaggttttcttatggacaactgaaactaaaataccctaagtaacacagaatcaaccaagcaaggctctgaaactaacacaaattgatgaatcgaataattcgggaaacttgcccctattgtagttaatcgattttacaggacctgtcaaactggttaactggtttgcaccaggtttccccaaacacttcaaatttttctcaaaatgtgcccaaaccttacgaaaccttccagaacacctataatgaccataaacaacataattcaagtaatagaatttggaaatacatccagaatcaaaatatgccatggatgaatcaagcttgagtttttaaactaaaacttgtgcgtccaccacaccaaaccaacaaatagaactcaaatctaactcaaattaaacttagaaacccaattacaaacgtacctaaccctaacagccaaaaactcatcaacttgcatacaagaactaaatttgagcttgaacaactaaagaattagagtgctaggacttacctctacttgattcaccctggattccttgttgaattctagaaacaatggtgaagtttgtttgtttcctcttggtctttgtggtggtcgagcaaaggaaagagaaaaaggagagattttcttgatttttcttaatttcctccagaaggataatactcactaattattttacttggcttagtaattcaaaatggccagcttccacgctaagaagaagccacctaatccccataataaaatgaataaaatacccttttagcttatacttaagcaatttaaagcctaagggtaaaatggtcaaaatctataaccccgctcaaactcggtattctatctatctcaaatattaatcccactaagagaaaggttctaaacttacccatgtgactctaacaaccatccatcgcattttccatcgtcgccgagcaaaaatcataaaatttccataattcatatatagcataaataatacctctatagtttaataaaatctccagannnnnnaaattataactctagtgcccacttataataatgggacccataatcaaataaattcatttataattataaaagtattaataattaacgctaataacctttactaatccatattctaaaatgtggtcattacaattatcccccattaaaagtatttcgtccttgaaatctaacctaaattgctctggatattgagtcctcatatcagactctaattcccaagtggcttcctccaagttgttgttcctccagagcactttcaccaaggcatggtcttgtttcaaagaactttttccttcgtatcaaggagctaaactggttgttcctcgtaggaaaagtctgactatagtttaagggcttcctaactcaagacatgagtcgggtctgaaatatatttcttcaatattgaaatatgaaatacattatggacagccgataatgctgatggtatggctagccgatacgctacctgcccgaccttctcaagta

SEQ ID NO: 26431 - DNA, 1125 bp, Cannabis sativa
aacaaattccccaatttccataccaagacccatcagccatttgtgtgtcttcaaggtaattagcagcattggtgatgaatttatcaacctctttctctctatgcccaggatgtgatttcctaaacaaatttaatgcctggattgatgaagaggtgcactctatgtacctgcatattaatatcaataactttaaaaaaattgaaagtcattagtaaaaaaaataacatttttggaatgtttaaaacttttttaagaggtgagaccctaaccacatgtcttggctgcctgagcacagggactatgattatatacatacacaaaacagccataatttttcgtttttaattaattcgtttttctctttttatatgtatacatattgataattcaagttcgataatttcacttactcatattcaataacaaggtcttcaagaaactccacagggttgaggaactgaaaaaagaaaaaaataaataatcaattgttactaactaaaactattattacctgtaagatgaagattgatgaatttatataaaattatgaaagttctttttttttttttttgaaataatttaattacctccaaccattttggagctcctgttggctcccaagctgaaacaccgccatttggactctattaattttgttgaaataaagacgtaattaatagttaatattatgttagtttaataacacaacacattctataatacattatcgcacctgtaatgacattatgacattaacagcatcatacatgttctctgcttccattggctcacccacaagttccgatggcatcattcctaacaaaagacaacactaaactttgcaacaagtttttgttaataataatttaaataatgaaaaaatttataaattgatgtaataatagtactggcaatggtaaggttaggttggttctcagggcttcacacaaagagggctcaaaatttacaaaaaatattatatttcttaaacacagaaactctctcgaaaatttaaaattacctcttcttatataaaaaattgcaaaataacatatttttgagccttattccactatagtttgataagtggcataagtaaattacctttaaagcttcagcagtaca

SEQ ID NO: 26432 - DNA, 2474 bp, Cannabis sativa
ttctattataggtaaaaaaaaatgtaactggttataataaaaatgtaaccattgaatagtcacccatattttgtgttttctaaaaagtagtgtgtgaatcctttattttgttaaataactcaaaatagattctaaattcaattcttgctaatatttttttcaatataactaatttaaagtcagtgtttagcacgattatatatataaaaaaaaaatcataacacttcctaattatattattgttagatattttattgcaataaaaaagaattcaagaatttacaattcaattgtaatattataataaaggattcacacaatactttttagaaaacacaaaatagttaccctttacaatatgctaaagaattatccaaaacaatttatttatttttttgaaagcattacccaaaacaatttttgtagagaaagtcgttttacttgctgttgctgcaataaaataggataaagttgaagcacaaaataaaaataattttgatcaattttgacttcaaataacatctctccaatcttagagacacaattaacgtccataccttgaggtgaatgaggtgaatgaggattctccgtagcaaccttttcacgaattcctttgcttcgggtgtgaggttttttacgactctccgattttttggggttgtttgctttggacgccggagatgaagaccccaaggagaaagagcctcccatcccgcctgtcttagaagcatcttcgttgccaggggaaggcttggatgtcaggaaaacaatgggggatacattacccactgcttttctcttctttgaattagagtccttgaaaatgggcacttcataagagtggaaccattttggatcatttggaatggacttgtcttcaagctgaagggggttgggctcctggctcagcgtatcaagagacggcccagagattataatgggctcgggatgaatgtgtggggttctggacttgcatatctcatgatggggtagatcaaccatttgggctgcaacagggcccacgttaggcatcatacttaagatgaccctattatcatcagggttcaagcccaaattgttcattgggtggaccacgttttccatattcattccaccaaccaccttaacaggtgtctccttcaccaatttgccaggtgtcctgacagtcgtaccctttccattcgtaccagtagtggccgcacaaccttcagcagtaccatgcacgtccctcgctttcgtactcacggcctgaatattcgaatttccaggcagtgacgtcggccggccaccaagttggcggatgagagtcgggcccctagtatcaaagcagtttcgaatcggaatggatgcctttatccagggtccatagagggggacggcatccccaatcggaggatacgcatacgctcgatcctttgtacacccattactatcatgagaaagatatccacagttgaagcacaccttgggcaacttacgatacttgaattgaatccattcacgtcttcctctggtgatgctgagataaaacccggccgggagttgaaggtcgattctaatgtcgaccttaagtttcagaaagccccgcctagctattactctgttatcagccccgtctcctataatgaactctcctaccttagccccaataaccgccgagtactgagctgccaggaaaggggttggaagcccatgtatctcaatccagaaaacggccttgttcatagacacaccttgccagtacccatccgccggccattcacggatgtttaagagttgccccgccactatccacggtctcctgttcagtatttcttccttatcagacaagttgtcgaaaaagaacccccacaaaccctgttctaaggatttgattctccattttcctgccgtcgaccaaatacccgataatatctgtttcacccggcctttagagaggttacgagacccaaccagggaggcaaggacccctgtttttgaaacttcctcattgatctcaatatccgcctctagctccaacgaagcatcttcgatgaactgtagccggagttcttcaatgttgtccctagccatagagctctcgccagaatccatagagctatactctagccaaacactctagccaaacagaaaataagcaagcaaaagaagcttacagttggaaaaccaacacctcactcatgggagtatttttgtaattttgttcaagttatttgggcgagtccctagtcaaagtgattgaagaactaattccagccccaaaaccaagctccaacgacccaagaaatctttttatttatatatacatattcaaagggatattaaaatttttggtggccatggccaccttttctttcggtgtggacttatatttcgaaagtccaataaataattgattattatcgatctctcatttattggataatttagtctgttaattttattattactcactataaatataaaattgcact

SEQ ID NO: 26433 - DNA, 2739 bp, Cannabis sativa
acaaatgagtgataaatacttctgtttctttattgatatttaaaagaatagagattacattgaaatggagttttatttagggcgtaaaacccaacagatgattggatttataagatcactaagttctttgatcttcatcgagtcaatccagcaatgtgattatgtgtcgtggctttcacttagatggtgctccatctacttagtttcaatggatggaaaagggtggaggttttgtggatttgggattcatttatccaagcattgcaagcgagattcggagccgccatttatgatgatcttctgggtcgtattgcgaagctaatgcaaacagggtgggtttctcaataccgagcagattttgaagaattaatgacacggattaacagtgtccctgagcagatgttcttgcattttttgtatggggtttgaaggtggaaattcatagggaacttttgattgctactccctccaatctggcagatgccatggcttaggcacaactgtacgaagatcctaatgatgatatgctcctgcgttctcaaggatcaaatcaacgagctgcttggggttctaaatcggctcagagttcatcgccaatgcttcagggggctagtgcagctattggtgttggctctccatcgattaattccagttctaattccactaaaataggtaactcccttcctgttaaacgtctctcacctactgaactacgtgaaaagagagataagggcccgtgttttacttgtgatgagaaatatagctttggccataaatgcaaaaattgggttctagttttatgtggcacagaggaagaataggagggattattcttttcggatggtggggaatctaatgaattagatgacaatccagttgatgaggttagcttgaatgctttgtcaaattcctctaatcctcaaatttttcatattttggctaaacatggtgcgaaatcattggaagtcttgattgacacgggcagcaacaacaattttattcaagaaacacttgcgactcagttgtaattaccttgggaagaaactaaaaggttcaaggtatatatgggcaatggccattctctactatgttcaaaaatttgcaaagaagtggaattaattttacagagtcataattttgtggtggattttaatatgcttcctatttcagggtttgatgtggtacttggaatgcagtggctgcagaccttgggcccttgcatccatgatcataaaagaattgaccacggagttctcttggtaggagagtatagtcaaattagcagcctctaaggatgtttccacacattagttgtcttatagccattttgtgacgctgctagggtgaggtttgttgtttgttttgtttaatgactgtcatggatagttgtgagtctcaatcggttccattacctcaaatggaagctaattttcccagggcatgttgactgaatattatgatgtgtttgtcgaaccaaaggggctgccaccatacagagaagttgatcatcgcatccatttacaactgggttcaacacctgttaatgttcacccctacaggtaaccctattttcagaaggacattattgagcaaatggtcaaagagatgggagaatgtggtattattcaatcgagtaccagcccatattcgtctccggtgctactggtaaaaaaaagatgggacatggcatttttgtgttgactatagagcgctaaatggaatcaccatcaaggatcggttccctattccaacaattgatgagcttttggatgagttgggtacaacagcggtattttccaagcttgacttgtgggccagatgtcatcagattataatggattcgagagacatacacaaaatggcttttcgcactcacgagggccactacgaattcttagtcatgccatttggtctgacaaatgtgccctcaactttgcaagcagccatgaatcaggcctttaggccacttttaaggggatgtgttattgtatttttaatgatattcttgtctatagctccaatgaggatacacatgtggaacatttgaggcaagtactgcagttgctacgacaacacaaattctttgcaaaggcaagtaagtatttgggatatttggtatctgctcagggggttcaagccgatccttcgaagattacagccatggttcaatggccgcaacctcaatctatgaaacaactacatggttttcttagtttgacagggtattaccgcctttttgtgcaacattacactaccattgctgcctctttgacggagctattgaaaaaggataattttcaatggtgatttgttgcagccatgacctttaaaaaactcaagaaagctagagtgaatggagtttgcctagtggtcgtcttctaggtagtcataccataggacctctgggagcaatttaagccagttgccttttgcttcctcaaggtgcttctttaaggtgtccttagatggatgctttaaaattctctgcagctaaaacatgaaactcaaccccctcaaatgttcttttagagtaggctttaaaaagttcctcggcttaaaagcaaatccagacaagatccaagccattttggacataaagttgcccacaactatcaatgaagtacaaagcttaacatgacacattgctgcactaagcagatttatgtttaagtctacagacaaatgtgtacccttcttcaacattctcagaggcaacaaaaaatttgagtggacagagga

SEQ ID NO: 26434 - DNA, 3277 bp, Cannabis sativa
aacagataagtccagagagaaaaggttgaggttgctgggaaaaagaaatgtaataaactttgtttgttgcattatggaaagaaaagaagaaagaagcaactttagctcagcatggcaaaattatgtcaagactcataaagaaacacactaaaagaaaagtcattaactacatgaaggaagaaaagggataagcaacaatacaatagcttatgcattttccatttattgtctgtaagtcctttcttacaaactatttattttaccaatacctaggttgaaaactagtaccatagtaaatatggtgacaaaccgagatccaagatcatccgttagaaaaatgcattaggtgggtccaaaatcaagtggaagatcttatagtttctaagacatagcactctagaaaccagtgcaaaaccaggaaattaatcataatcaggaatagcttatagtttccaatctatgacttatatcactctagcaacaagtgtgaaatcagttatcaatatgactctagcaacaagtgtaaaatcagttatcagtatgactagcaaaaagtgtaaaaccagttaccaatataactctagcaacaagtgtaaactcagttatcaatatgattatcgatagaatgtgaagccaaacatagtggacatcacgaaacaagggttacaaacaagtgactgttttagttgtgcacttggcactgggttaaaatagtcaaacgaagctcaatttgaaggctaagcaattcttgtgatgttgtttcacaaacactctctgataaggacgtacaattcacccaactcataataacacctatactaccaccaagtaaggagagacattgccatttgcataaataaaccgtagcacatgctaaaggaatgccattatattttattgctttagcagacttagattatgtatttatttttatcaaaatttagattatgcaggataaacaaaattggttaaagattggagatcttaccatatgccgacagggcaatacagctacattcttcggctcagtcatgcatattatacattctttccctagctcacccgattcatctgaatttccaaatccataaagttcgtgtagctcataacgaactccatcaatccacaggatctgattgattactttgaccagcaactggccctctccattatgctcaattaatgcttgagtaatctgtgaatggggaggtgcagcagaaagtggctgaatggactctaaatttgtcaagagagatgggaagtctgtttccacgtaaataacaagcgggagaatgtctttggccaaagatgaatttgcaagctcacccattccaaacaaaacatagtcaataaaacctatctcaataccagttccggaaggctgaaaaaatttctgacctagacctttctggaagggaattctcaatggcatataatattgagggtatagtggagcgaatgtgcaatccgatccttccttggcaaagtaaaatatggtgatactgttccccatgattatataacataaataaaagagaaatgcatcagaatatcagatacataaagtatacaaaatttacatacataaaaaaaggttattgcaatttgcaactcaagttttaaattctacatcccactgagtcaaagcagaacaaaattacatattggaagaattcagtagctcccatacatagtacacatgactatgataaagccaactcatgttgatcaagtagttcgcttaatccacacttatcattagattagtctatcaatgaggtgaaaatagtcatacaactgacagtaccttcagagaaaacttacagtaaacaacagtctacagctataaataatgtaaaaaaactatctgcaaaaaataatgtaaaaaaactatctgcaatctcagaaccctaaacaaaaacaagtttcaaacaatttgttatgtggaaagccattttcacctttcgaacccctactgcagtcttattttttcccgcgtaccattgagtccttatcagcaaatctactcaaagactcctatgggacgttaagatgaggtttagacttgatgggaatagaaatgtaaaatttaaattaaatttgaatgacaatgagtttgtgtttcctagtaggcctcactttttaaattaaaatagtggtaatgttaatcccctcaaacgcatggtgtttcatatttcctccaagtctactgcctccaactcttactctctccaactcaaactcacataacaaacaggtagcgtttagttagaaagaatgaaaacatagttagaataagaatgacattccaatacgttaaaataaaaccaaacaaatgaatagaataacagttgtttcctttccattccattccatttcattccctccaaccaaacgctagcctagtgatcttaattgccgggtgattgtaaacgtgatgattaagtggacactagctttaccatatttagcaaaattttccagtgaaaatcaacttaatctataattcaacaaaaatcatagcaaaaccaaaccaaactggttaagaaaacgatcaacaatggctcaacatacatgattacattccaccaactcgtttaaattttcagtttcacacctttaaaatggaggaataattgaagctgaaaaattaactgcataacataattgttccatggcaacagttcaataattcaatctaaatcaccaaaagtggcattccaatctgtcattaattactcaagaacctagcagcagacccatttaattatatttatagttttttgaccgaataacgaaattgaattccacatagtagtaacattattacataaaaaaaggcatacacattcattgtttacctgccatcaacgagagcatcaaaagtgaaagagagcaaaaatgagtgagaatgatggacatcggtaaaaagcttgatggtacccttgtgcacattcacattgttttgtattcttttagcactcgcaaaaggaggcggcagcacagggggattgatcctgggttgagcgttatttgacggaaatggattagggatgtggtggttgggataaggagcaccaaaaacataagttgatagtggtggtggaggcagaatcggagtacgaggaggagaagaagaagattgcgaatttaaggaagggaacgaaaaatcaaccggggcagctgcagaggttgtcgtattagtgaaattcgttgtcgtttgatgatggaatgaagagttgggatgaggaggaagaggagtggcggaaggagatga

SEQ ID NO: 26435 - DNA, 4097 bp, Cannabis sativa
aagcgttgttttgcatattgtgctatattccctaaaggttatgaatttggaagaaaagaactgattttgctgtggatggctgaaggctttttgcaatttggtgagaaaagcaaaaagctggaggagcaaggggaagaataccttgaagaccttttatcgaggtcattgtttcaacgttcaaagaacacgaaaaaatcattcctccaaatgcatgacctggtacatgatttagcgatgtttgtatctaatgatttttgctttaggtgggattggagatatgacttaatcaaactttcaagtaaaactcgtcatttgtcatatttgatgcggaaatacgtcgtgggcttgcataaagccaagaacttgcgtacctttctagaattgtcaaccaacccaatgtttccctatgacaagacgtacatcaagtttgatatgttgcttagaagaggaagttgtctaagagtactttctttaattagatgttctatgaagaagctacctcattcaattggcaatctaaagcatctaaggtatttagatttatctctctgttgtattaaggaattacctggttcagtttgtgatttgtacaatttacagactttattattaattgggtgtaaagagcttcgtcagttaccaaataagatgggaaggttaatcaacttgcgatatctagatattacggatgtacctctagaagagcttcccaatgaacttggtactataaaacacttgtatttcttatctgatgtaattttgagtagtggaggatttaatatgaaaaaggtaggagagcttcagaactcacgtagtatttctagattggaaaatatcaaggatgcaagagaagcttcagaggcgaatatgaaggataaaaagagtctttcgaaactgactttgaggtgggatgtttccagtgtaactaataattcacagaaaggaaaagaagaggatatacttgatgcacttcgtccacatacaagcttggagcatcttgtgattcaaagttacagaggtagaacattgtcgaagtggattggagactctgcattttgtaagttagtatcaatccagcttatgggttgtgttggttgttgcattttacccactcttgggcagctaccacttctcaaagatctctcaatcggatgctgtagtagtgtgatctcaataggtgatgatgatgacaattacaaaggccctctattcaaatgtctacaagtgttgaggatttcagagatgtatgggatgatagattggtcatttagtagtgaagctaatttccctcttcttaaagcactaaaactgagttggtgtccaaagcttaaagttgggttaccgggttgttatcttccatccttggaatctgtggaaatcagcaactgtgaacaaatgacgggtttggtcccgaggaggacagaaactcaacagacggttacaagcacagctccctctcttgcctccatatgtatagagaaatgcccagtgttggtatcgcttctagagtgtggatccaaagaatgggaaagactccttcctaccactctgaaagaacttcacattaaggattctagtatgcttgaaagcctaaacggcaaggcctttcaacaactcacatctcttgctaaattatctattgaactgtgtcatagtctgaggtgcttgccatcagaagggctgcctacttctcttacttatctatatatatacggagcccatttgttagaacaaaggtgtaagagaggaggagaagattggcctaagattccaaagggctcaacagtgcggttggacaatacatggtacgttcacattttcttaggtttgtttttatattatttgatcagtttaatgtaaaacaaactaatatctttaatttgttttgctgtttcacaactatgaaggacaacaagatgattcttttctcaattgtgcggttggaaaatgaaaggtatatactaattattattctcttttcttgtttaatttgcttaatcaatcaaatcagcacctgcttaattcaacttctgtttcaatatgtagcaacacaacaaagcaactccaatgagataataatgaagctgaagatggagtagtagtactactggcgttattattgctttgattcttaatcaaactaaactaaattcagtatctttttctctacttaacaaaacagtaaacagaaccaatttttatcaacaaacaaaatagtcaaaaagttaaaccattttgaaagatgagaagaaagagtaccgaaatcccaagtgatcagagaggagagtggatgacttgttttcttcgtcccataatggcgattgaagctccatgtttaccgagctgagttgatatctcgaagctcttgatcctgttatgagagccaccttaccatttgctatgtcagctctgaaagaatctgtctattggttcatgcatgtgccttgttgttgttgttttttgacttcaaatgaaaatagtactcagttttcttatttttcaatgactatggattcaaaataaggtcatttcattatttcaaatacaatatcataatttaatcaagtatgaaataagtgccaaattcatgataaaatatcataagattaagatgttataatcatatagattagtataaaatcatagagaaaatttgcctcagttagcagcaccaaattagcagtagacgacaataaccaacacaactgtatttattaaatcattggttttacaagatcaagtcaagtgtactatctatctgtgatttagatcaaaaggtaacaatcacaaagaatcccaaaaaatattaccgggtctgggatctgaggtccaggggcagggttggggtccagggccaaagtttaaggtcagggctcggggtttgtatccgaggtcgaggccagaaacgagttctaagtttgggttcgactctgggtcaatggcggagtctgggtccggtttaatggtaaagatagtataattttacacctatttaatacaagttaatatgaaacatagtattgcattaaattatattgtacaatacaacccaacaataccaaacaaacccaagttttattatgttctttagatactttagtgccccaagcatgcattaggggacaactagtcttctgaaaggtgattccatattctttttctcttgttttttctaagtaataagaatctaagaatacaagaacaacaatcaacaatttaacaatttgaggagattcctgcatttcattgtaatctttattctgaagcaaagcaagcaattatattaaaaggaaaagaacgttttagacttctaaagaaggtccaaccaacgatcacaaagccttgtgtttatttttgaagtatggaataaataaagatgacaattatatttatgccttaccttaatatatacttttgcaatgtgccaaagaaaagaaaagaaaagaaaagaaaagaaaggaaagaaagacaaagtttatgccttattcatcatcatatatattctaacttcactttctttctttctatctatcttcttccttattcatcattttcatccctaatccctacacagattcaacacacttgctcttgcttttgtcattgatcaataatatggctactgaattggttgctggtgctttgctctctgcttcacttcaagttctgttcgagagattggcctctaaggagatacccaagctgttccaaggaaagaaatccactctgaagctgctggacaagttgaaaactaggctgttatcagctaacaaactgctcaatgatgctgaggaaaagcaacttcgagatgacaatgtcagggagtggcttttcaagcttcaagatgccatctatcaagctgatgacttggtggacatgatggattatgaagctctacgatccaagcttaaagatcacgatcaatctaccagctgctgctcgaccaaggtgttttgccgactgagatccatgccaccttttgcgtttaactttcataaagctgtacagagtgatgccactgagattcttggtacactagatgatcttcttgctcaaaaggatgctcttggcttgagagaaggccttcaaaacacttc

SEQ ID NO: 26436 - DNA, 3835 bp, Cannabis sativa
caatacaatacaatacggcgtaccgaacaagccttgagtttctcgggatgtgctcaaccaaacacggaaacactccaataaaccatactgtcttcacaaagacatagtcacgaaaaagatgaagatagttttcttcatggtttgcacaaaaaatacattctttatgtaaaattaatgggagtctagagttagtaggaagagtctcattcaaaactctccacaacattactgcaattcttggatgaatttcaggactccatatctatttcctaatctcttttttagggcccaactgttgctcttggtcaatttggtgagcatatatgacaaagaataccctattcttcctatcttttgaaataagttgattagtatggggaagaggaattctagaaatagaaataattcttctcccaagagactcccccaaaaatttataaataccatcgattcagctcctcccatttccacctaccaaaatggtcaaagaaatgtcagtcaacataatgcctagcattgaggattgaaagccgctctatattactcctagctcaaccaaggaatccaggcagtcttcgaaggatcaacaacagtcccagaacccaccaaaaaataagcattatctcatagacaccttacaaaaaataaaagtatcgtcagcatatagttagtgaaatatttcaaggggtattatttacaaatatgtaaagttacgatttaattgtataaaaagttcacgaagcataattagtaattattctttattttatcaaagcgggttgttctgcaaatagcctataatttgggaattgataataattttgacatagattaagagatgtttatttttggggagttctatttgcaccctataaaatgataaatacatcccattattaaaaaaaatatatataaacttaaataatttttaaaaattactctcaatattttttttttaattttttactcacattattttatgttaatttcaataattattttgatttttttttaaaaaaaaaattcctcacattattgtatttctaattataattttgaaagtttgttactttaccatcaatttttttttttgatcaagaagaagaaaaacttcattaatctaccagcaaatacaagcaaaatcacttcttacaaagaagcaacaccaacaccaactaattacaaatcaacttgtgaattaaattattctcctccctagaacaattcttatctttaatcaataagagcctatacttaatttcacatttgattttatttacaatacaattcacagtattagagtataaggaaaacaagcaagtgttgcggttgctccacacgtgatagttcactgccacaaggattaaaactcttatcctgtccgccactttcggtcttgaactactcagccaaacagtccaccgatcatagtccatagaccacccagccatgcccatccaaccaaatactctgtacagcacctgaagagaaagagtacacttgaaaaatatatggttgtggctctcaatttcaaggtcacagaccacacagttcatattagctataggtatgttcaacttgcttaattggtccctagttaacagcttgttttgagctgcttgccacaattggaaagcatgttttgagctgcttgcttaattgttattatatatattttttatatatatataaaagaaacttaattatttaaaatgtgttttccacacctaccctttttgataatcttaatgccataatctttcaaaaaaaaaaaattaaaaaaaaaaaacacaaatatcatgcaaaactttttttttaaggaaatttactatacatatatatcattgtagttgataaaattatatattccaaagtctcaatcaatcaaaagcacatcgcacatcaatctaaaagcacattagaagaacctttaataaaacacaattaaactcaagcgtatggactcctatgctagtatgttgggctttccttttattgtacgtggttattgtttgtatgggttcgatccaaataggattctcggtacgactatcaactcaattacttttattatttccttaaagtttttttttttcgaaactaaaattaaatgttaatgcccgctagctagttttattttttcgactctgcaaaaacttttggcggcattagtggagctggagtattaatctacgggctcgcttgcaactgatttggaagaatactgatttgtatatttattttatattctttgtgtattaatgtgttgttacgatttacagttgcttactattgctgcagttacaaattttgttggatgttgtattgtctcattgtttgatctaaagtaataaattttcaaaaatacaattagaaatataattataacctacatagataacactttaagtgtttctaaactatgtgggactttaaatttgtatttgtagtagcttatttttaaacaaaatatgaaaatgtcacaaattttaaaaaatacaatgtgaaaaaatctaaaatatcacctaaacttttttatgctttcttttatatttatatgtaaatttagcgcactggcttcttaactatgtttttcattatttttctaattatgactcttgtattcttcactacaaaagataaaacacaataatggaatttgtatgcatttataatttagtaactactaatagtctaataccaataatttattagttcagataatgcactacttatttgaatattgatttttagtattatgattttggagtttagaattacagtttttatggttataaaactttaagttatcaatcaattttgtgaaatgaattagaaaagtaaacaaaaaaaaaagaacattaggtgatcaaaatgctattaataaataataatgattttttaaaattcaaaataaatataaaatcgtattttttttggcgtaaataagaaaaaatgtttcaggctgtattgagaagacaatcatacactaaaaaatgctatatagtaaaagaatgtttccttttatttaaccaaataaagtgatgatatagaacaaaataatgaagctatgatcgatcaatttgtaactaagtaaaataatacacatcctatatcaacatcagggtgctctccactctaaagatcaaaaattgttgtagtaaaagtcacatacaatatcaaagcaccaaaaagtatcatacttgtacaaacacaatctatagagtatagtgtgtaacaatgtaactgttttaatctcgagtctgtttgagagactggaagaaagcagtaaaagcatcagagtcaggaagcttaggaaaaacgagagaggctgtgaaagaagacgacggcgaggccttgcgaccggggttctaagtctgtgtattcgacggtagggattctgggtcggagagtgggagagttagagagaatttttttgaaatataagggtatttttgggaggaaagatgttaaaagtatatactatttctaattaggtggtatattaaaacaacatgttttacatttaaacacactaagttaaatttcccatcttttaatccgaaggaggatgtataagatctaaccaaaagtattggaagattggaagacatgattcatgaacataaactatttcaagtgttaactagattgaagaattcaagaactaaaatataacgccaaatctgtagataggcaagagaaaatattttagacaccaattcaaagtgatatcgacactaaaatatgtacaaagtatacaatttcaagctgcaaaagggtagcagattgccaaatacatgatgcaacggcaacacatgtcgacaaagagaga

SEQ ID NO: 26437 - DNA, 1344 bp, Cannabis sativa
gaccgtcgtctttcctgtagggggtctgtctctactacaggtttggaagctattttattagctgatttgcattaataaagttgcaatctttgtttcaaaaaaaaaaaaaaaccaactaaatttaaaattaacataattaaatgtatattaataagtaatttttttaaatatgttaacaagaaattagtaaatatattaatctatcatatatgttaagttagtaaatataactatttaaatggttacattaaaaatataattataattatgatgattatattattatatgacttattatagcaagttactaataataagtaaaaatttattttttaaacttaaaataattataattaattatataattaaaataaattatttttttaattaaaatatttaataagacatttttcacaaaattgaataataataatttatatttatatttttattttttaatcattaagtaaaaattgtgataggtatttgatttgaatttatttatcaattattatttactgttttataaaattaaataaaatatgatgaaatgactaattattatataagggcacaacttggtagcctaaaaaatttagaggacaaaaatattaattattttaaaattatttaagcaattttctaaataaaaaagcaaattatggttaagcttcccatctccaactacatgtcgtttttactattaaacgacaggaaacagttggtctaactagaaagaagcgaagatggacgaaacggtgcgttttgtgcgtgagcgagtacagttgaatcttgactggtttttcctcgaacgaacgaagacttcgagtcagagagatcttagcgagaatttatggccttcaagattcttcccttttcacccaagttacctttaatttttctctaaggttgccctaatatcagttaactataactaacctttcaatttggatttgggatttttctccttctcttctcagagtgattgaattttttatttcatggatttccagaatagaaggctacatgttttgctattcatcgcaggcatcattgttctcagcattacaggtacatatttagaaatttatgtatgtgtttatgtattatatgagatcttgcttttgccgcctctgtttggttggtgagaaaatttaggaaagaacagagtttgaaattgaaatctaacaaatatacatgtattgattttttttttgggaaattagtgttttgctctgattatttagaaatatgaccttttagatgtattgggtatttttactgtgtcaatttttgttgctaaaaaatcgcaaaataaatctgatttgagaaaatatactataa

SEQ ID NO: 26438 - DNA, 1216 bp, Cannabis sativa
tacttttttgctaatttttcaaaagatgttctcaaatcagtttcttcttttatttcatatttacctcctcttttaggtgaagtatttgctctagacctaggcccagaataattccattgttgtgaattaacagacaattcttcaagagcttcccaagcctcttgcccttgtaatttcaaaaaaaaaaaaaaatcggtatgcatagattgaatcatttgtcggtttgaaggggttaaaccatcataaaaatattttacaagtctccatttttcaaaaccataatgggggcattttaataataaatctttaaatcttcccaacataaataaatttagtttattggaacttagaattataggttcatggtccctgagtgaccaccttaaaacactatcaatggatgggataaaaattatatatgaaagttcagaaaaattatttttgaatcatcaaaatagtaattatttattttttaaaattaattaaataggaaaaagacaaaaattgcctaacaaaagacacatcccttgtcttaatttagacaaaggaatgcgtcacatgcactgtgtccaaacacaagcgccctgttattgtaaaaaataaatatttataattgaattcggttatataatttattcaaataattaaatatagtttaataaatagatttaaatctaaataattaattaagtaaaaactttattgagtttctttaaatatactgtataacaaagttttgaaaagttttttatatagattttttcgtaccttttgtgaaagtttaaaaagggttatcctaaactttttctctctatcacagaagtatttcttgctcatgtgttgagatttaatcaagaacttcatacgcactattatcctactagcccacactagtatttgtgtgtggtgaaaggtctgaaagattatggtgtcagttttgaatcaatccaaaatgatacaacttgcgaaaagaatctaagataccttgataagcaaagaggtaaatattttttttttcatctatttaacttttgtataatatatatacatgtggtgattttgggcatatggtacaatgataattagaaaaactctttcgttgcaaacttaatttagtaccataaaaccaacacttttttgaacgaattaacctttgtataagtcgcatcctgccaatggcaaaagacatctctcttctacaaaaaaaaaaaaaaaa

SEQ ID NO: 26439 - DNA, 1070 bp, Cannabis sativa
tatatatatatattatttattatatgagtcatgtggcactatagtaaggggctaatgctttgctatctttggtccttaattggtgtgttgactgacaaagtaaaggctacctacaaaggatatatataaaagaagaacccaccactatactctcataataataatcatccaatttttgattttaccacattgattaattcacacttaaatataagagattccacctacaaattaagggttttaaacaagatgaaaataccacttgctaacaaaaatacacatttaaatttgttttattaatttatactatgttttggtatacttaagagattaaaaaaatatatatttgaattaagcaaaaaaagttcaatttatggaatttgcaaaagaagctatgtatctttgttggggaaggaaggttcgggatggggtttctggttcgatatgtcaatggtttcatgatggcaagtcaggcgaggcattttgaggggaaggtggcggcagaagtggttgaggcaatggggattaagaaggctttgagttggttgaagtttcatcattatttttcatgtcatgattgaaactggcagtttagtaagagtggaagctgttcgtagtaagctaaaaatgtgttctttttttagtcttttgattaatgattgtaaacactttttgacatgttttaataatgttgatttattatttgttaagtgatttgtaaattgagttatgcttgttgctaaaaattctaatttattagctaatggtatagttttggaaactgttgctcctaagttaatgaagttgcaattttaattaaaaaaaaaactatataaattatttatatgaatgaataaatatattaatatatttcaaataacattaattttgtccttttaaaataaaaaagaaaagagagcttaattaatttcttaaaatctaagtgaaggagtcattttatactacttaaaataataaaaagtaatgttatttttagctatttttgaaaaacacaagattaaatttaggcaaccaaaataataatttgccctaaaaaaacaaaattacta

SEQ ID NO: 26440 - DNA, 2462 bp, Cannabis sativa
tcgattgtgcgtaattgcatatattatatccatagttggtaataggactattacaagcataactttttatccaacaatcaaaatttgtgccttataataatcttgaatcttgattggttactgtggctagacccactcataaattgtaatcgttcattgtggtccctaacttgacaattacaactcttaaacgatagtgaggagagaggaggctcttttaagagatcagctattgagtattaggtacagtggtatcctaacactttctataggtagtttttatcgattggttaacgatattctattaaagttattttcttaaattatagtaatgtcttttaaaatgtttctcttaggaaattgtctattacaaaagattatggcatgtactcttatgaattttggaaagaagaagggaaacatcaagcttagcctaggtggtgtgtgaacgtgtttcgaggtttggcttgtacagttgacgatgcatgtgatgtgttctattctgattccaaatatgtgtgttttttttcttttatcaaaagtatggtccacgctggaaaaggtatttctaaaaaggtggtccaaacactagacaattgagttttaaaagttggctgtgtttgactccttataattgaattagtcaaaagggtgagccccactggtttctagacttctttcttcgtttgacacgtgtaggtaccagatctcattctttctgaataaaaattcctggttcttttcatgggcactttgaggaagacttcacttgaatgttaactgtaactatgaatcaagatctcccttaaaaagttatgtgtgtcaaaccattaagttttacacgttaattaattttttatttattaaaaaattaactatttgtactgtttttttttccttaaaatgtttaaattgatgtgttacaataacattaattgaatacactatgaaacacaatcttttaaccgaaaatgtcgtaactatatacccattagaatatatagcaaactagttatccacatggctataatatatattttagatatatattgtgtaattgtgttatacgagatgatgaagaagttaaagaataatctttttcttatacattaattaaatttaatttaaatatactttttttttttaataaaagtaaatttttattaaccggtaaaatcaaccaatacaatattacgcaattcaggacttaactgataattttgaaaagtacgatctggagaaaaataagagctacgcgccaaacaatggacggctttgttcacagatcgttcaacaaactgaatagcaacatgactcaaagaagataaagcaattctgcaatcattaactagtaaaccaaactcagatggcatatacaactcactctggatagcctgaacacagaccaaactatcggtttccaatagaacattttgccaattatgacgtcggatccagcttaaggcctctttgatcccgatgatttcgacaatctctggcctaacaattccctcctcgctactagtgaaggcctcgagaacttgaccagcatggttacgggctaagcaacccatcccaaaacggctaacatcattaaatagagcaccgtcaacattgaccttgatccgatcagaaattggtatagtccaatgcacacgcgaagacagtcctatcgaactgttagacaacgaacttgtcgtccgtgactgtgcaaaacgaaattgatcaaggaacgatcttgccgacaaaaccactgatgcagcagtaggagatttttgttgccaaacaacctcattacaggccttccagatactccatgtaaccatcgccgcttcttccaatgcttgagaactgatccttgccgaaagagcttgaaaccaagccaaaactattcgctgaccaactacaaatactaaccaaagatctattccaacgggctcgagcaaaagaacaacccactagagcatgaaaagtagattcctcagcctcctcaactacaaatatacttttttcatataagtattgtattcaaattattctcacacacataattaagacacaattttaaatataatagattgtgttttttagagaaaaataaggtaaaattttgattagataaaaatagaaaatatcgtaaattaatagggataaaattaatagaataattgaaaaaatataaaagaaaatttatcttcaaaaagaattccaatatatattagtacaattttacaactaaaataaaaatgtgatgtaaggtgatgccaaggcggctattgtattttagaagggaaagataaacgcaaaataaatgtttggaaaaattttatgatttataatagaatttttatataggaataattacataagacactattttttgtaaaatatttacatttttacgttcaaagaatttttttttacatttttacagttttctaaaaaataacatgaaaacaaca

SEQ ID NO: 26441 - DNA, 2643 bp, Cannabis sativa
gtgcctaatagcaatgctcttaaagaaagtgtattgaagaaccaaataaaagagttgccttaattgtgtactagatcaacacaatatttaccaaattcgacacaaattttaacacactattaaataagctaactacagttaacttaggctctaaattaaacaccaacagatggtactatcactatgtgatgtttagagaatggttagtgatattctattataattattattagaataaatatgattccaaatacttaattatagttagtagtgcctattagtatttaagaccatatacttaattataattagtggtgcctattggtagttgggtaaataattacttgaaaaatgaaaagaaattttaccactgcatcaaaatcaaactacaacatttaacttaggcttataattttgtttagtaaatcacattaaacataacatttatctaattattaagtttaatataaacactacaaattacttaaacataagatttaattatatggtgggattaacttagacttatagttactatcaaaacagatgtaagacccgatacttaattataattagcggtgtctatgaggggcattttggtaaattaattactaacctgagtaagcttggcattaagtaaaccttcactataagcaccctcagcaggagacctattttcaatagcaaacaactgatttttataccacaaaagaagaatggtctctccatcttgaataatcactcttctctctcctttaggcagagcagagagtggaaccacagggatccaattctctcctctcccacctgaggatgaagattcctctgcaactgaaacctcagcagccttacatgtgagttgtcttggtgattttactaaaatacccctcttggagtttttgagtgtgaagacatgggaaatggttttttgaacaaccccaaatgataaagattggatctttggtggggttttgatgttgttgtgtctgttgaaagtgggcgtgtatgaagaagatgagcttgctgcaactatggctgaggaagacattgtttggtatagaaagtagaagaagaagaaagagttttaagtgtaaagtttgggttttgaaagtgtggacatgattccatagctactaagatacagatagagtctttattggcttgtttttacttatgatggacttgcatttgccacgtcacctctttaccttctagccactaattaaaagttttttttttaaaaaaaaataaaaataaatagaaatatgtatataaattagtagtagaatttgaggttaaaattgatagatagttcattttgttatatttaactttttttttgaaaatacgagtgattaaataaaagggaaaattagatttcatggtcattataaaggagttcagtaggaatggcggatggattcacaatacctgttaagttctggacaaacgcccatttagccgcattatgtgccgcaaattacacaaacgaggaataaacgaaaaattataagataaaaagttttcatgtatccatgtaatgtctttgggtcaaaaattattgtgtagtttgtttaattgcacttattaagtttctatataaattttttagctgtaaaattttttatatagttattttgttataatattaatttgtttactaactcattaattgtgtataaaatgtgtaacaattgagattattacactaattatgaattacataagtatttttgttgcttaaaatttttacataaaaatttaaatgtaataaaataaactagaatttttgtcaccaaacctttttatagtttttttaaggatcctttttatagttacataattaaaaaaaggattgttataaatagatatgattttgggtgatttaattttttcctacataaaaaacctccactccaaataagtttattgagacatcatttttatagttttgaaatatttctaattaggattttttttttttttgtgtactaaatcatacgtttggattcaaaaaatttcattcaattctatttgattttacattaaatttaacgtgacgattatttacatactaaatcaggggcaaacccatatgaaggcgagacgagacaatcgtctcttaaaaaaattggaaaaaaaaatgtatatataatttagttaattacgagatatatttgtaataaaaaagatatttataacataatattagttttagtgtaatgattaaattagattacatatacaatagaggccaatggttcaattccataaagagcattttgtccttcctcactttaaatcgtaagcccaccactatactaaattgtagctctaaattttcatctatgtcacacatccagtcttaataattttttttaaaaaattaataatttaaaagttcataagcacaaaaaaattataattgtcctaaaaataatattataatagaatctaaattattcaaaaataataatatatatttttcaaacaattttttgtaatatacaattactaaaataataatatattttttttagtaaatagcaacataagaacccaaaatgttaagtttgtaagcgtcataaatataatggttatttttagcggtataagtagcaaatatttgtaaaactgtaattt

SEQ ID NO: 26442 - DNA, 1336 bp, Cannabis sativa
gtctctccctgtagagagtgttttgtctctccctgtagagtgaagtttgttttgtttattggtggtgattgtttattggtatttcgtactctgtgatggcctcttccagtaatgaaggttcttctctgtcgaaaaggtgggcagatatatgcttagaagatgaggaagaacatgtggtatcattggctgacgattgtgaagaagtagaagacctgaactttgatgatagatggtgcctagtaggccgtttgttgtctggaaaagtatctgatttccagatatttcaaaacataatggctgatctatggaagcctgctaaagggatttttattaagagattggagcagaataggttcctctttcagttctaccatgagatagacatccaaagagtgcttgatggtagcccatggacgtacgatcgtaaacaacttcttattgagaggcttaaaccaggtgaaaatccaagggcgatcaatataaatacccttgacatgtgggttcaaatccatgaattaagaactggttttaaaactgaatgggcgattcgtgaagctgctcgctatattggacaatatgttgagtccgatcccaataatttccaaggtgtgtggcgtgattatctgagggttcgtgttcgagtcaacgtatatgattctctgaaaaggcgaatgaaattccgcagtcgaagtggagaagccttttatgcttatttcaaatacgaaagagttccgaccttttgtttcatttgtggcgttatgggacatgctgaaagattctgtgaaaggatatacgatactcccatcgagaaaattgtcaaaccttacagcatagagatgaaggctccgacaaagcggcaaagcttcttgacagcctctccatggttgcgttcaggcaaggaaggagcaactccagcgagacaatcggcatcagaatctcctacagttaatgcttcatcagaaatcaggggaatgaatgttgctaattgtgatcctcacggatgtccacaaatctctcatattaattccccatcccgtgctattgggaatcagcaatcaactataaaggagcatgttatcttggtcaatgacacctcagttgaatttaatagtgaagagattgttgaaatctctgatttaaaaaggaaacgtctgatgactctctcacgtgctgagcctgatactttgacaaaagatttaatggaaacagaggatggtaaaaagcttgatcattcaaattcagtggtaatttcaaaaaacgcagatatggtgggtcttggtttccaagcccaccaagagccatgagtaccattagttggaattgccgtgggcttggg

SEQ ID NO: 26443 - DNA, 1832 bp, Cannabis sativa
tgcgggttggtttcaaaaaatagttaaaaaccgcaccacccgcactgcgaacacccctagtatttgtaaaaccaataaaaataaataataagccctgttaattaaatttacaagtggaataacttgcatataaatttgtattttacttgcccgcctaatcactatcattttcaatttatttgtctctactgtatttttgtaaataagaaattttaaagataatattttagtatacattaaatgtagtagagtataaaagaaagtttattttgtttgagtaagtaattaattaattttaggttaaaatagaaaaaatcccttttaaatcatattcttgacatttaacgctcaagtgatgattaggttttctgataagtaagtgatgatgacgtttggtgaatacgagaggccaaaaatatccaaagttgtcaagtaataaaattattgaaatctcttcgatgtgaccgctaaagcctctcgggaaaatgattaagatgtttactcttatgcgctccagttgttataacttcatcacataatcctaatttttacccttaactacctcttcttttttattttgttcattcttttgggccaaaactttatcttctaaagttactgtttctagatacagtcacttgttcatgctctgtatagttcctcaatggtatcatttaaaataatggggaaaaaaatgcccaagccttgtagaaaggtaatgtcattttttcactgaattcagccacttaccctcacacaaacttttacatgaggattagaaaagatgtttggaaatttggattactcttaacaaaagaaaagctacacaagatgaatagtgaagaaagtataaacttaggcatcctcttgttgttcttggttttggtttgtttagtccctggctgttaagcctctgatcttaacatcatagtgaacttcttcaactctttttaggtcatatttcatccctacagtagatggcaaaagattgaatgaatgtaagtataaatacaagtgaacatttatgggaaagaggatataaaatgaatagcttaccatcaaactttttccgcaagaaatcgttccgaagattaagcatacggaaggctgcatggagttctgttaagaatttcaacacctttcttggacaatcatagtcccctgctgtcacttgattcaccacatatcttggctgcaaagattaccacattttacggcatagagtgccttcttacataccagttaagaagaataacttaaatgcagagttgtaacatgctaaggtgcataaccataaaaacactcaaagccaaaggtgtgcaattaaagttgcatatgaacaacagaaattataattcttcttagttcttaccagttcatttgacatgaaacaaaggcctgaaatatgaaaaaggtataagcatcagttactcaagttgatatatgaaaaaaaagagcaactaaactaaaaaaggcacacatgagatagttaagaagaaacataaattaaaactaaaactaaaactaacaaaaaaaaaaagtcaaatccttattgctttaggaaccacttgcaggcatactgtaatacttctgttgtgtgtgtatgcagaacacacttacatataatataagaatgtcatggcaacaacaaaatgagctttgttgtgaatgcagtactatgatagtgatccacacatacatacatacatgagatttgcgtatgcagttagtactcatttccaggacaaagagaattaaaactaatacaattatattcaaaagattcacttcaggactattccaataattaatcacttgggtaagcttgtaga

SEQ ID NO: 26444 - DNA, 8074 bp, Cannabis sativa
  modified_base (4315)..(4319): a, c, t, g, unknown or other
  modified_base (4725)..(4727): a, c, t, g, unknown or other
  modified_base (4779)..(4790): a, c, t, g, unknown or other
attcaaataattaattttggaaaaagtaataaatgtcattctataggtacaatactttctcatttcaagagaatatatatatgtatatacagtgcaatgattaatgcttaatgatttgtttgatcaagaatcacaccttagggtctggagttttgggtccttcttgctccgaactcgatgtgggaccttttctattattaccctctcgctgaatcaaaacaaacttcacacgtttaatacatatttatgttaattattttagtcaattgagacaaaatgttatatataataagtagtttgaattaataatattcaattgattgattaattaatgtcaacatgctaattcaataaacatagaggttcttgatcctgcatatatataattatataattagttacatgagattatagctggggaccattcaaggtcatttcacatatatatatgtacggtatatgtatatatatattgtaccttgataactttattggcagcagaatcaggcagagatggagcaggagtagaattattgtcattgcgtgtactgttggccaactccatagccgatggatcagacggtctttttgaattatgaatacttccactcattggaggagaacccttcaccaaataataattacaaattaattcaacaacccagtttagtattattatttttaattttagtgcattataataatatataacgtaacgctattatttttaatggaaaataaatttaatgaaatgatgataaagtaagtagcattttatggcacttactttggttgaagaagcaggctctactgcgtgcataggctgagatgggaaaatattcaaagttggaggcctcattccagtacccccactgctctctgtacccatatacatataattatgaaacatttttttcaaaacttaatatgtgagtgtatatcaaattcagtacataaggggttttaaaaagagagagagaaaagtaaatgaacgttaaagagaatagtagtacaactctttatagagtactggtctggcatataataccgacggaaaagaaaaggttgagagagaagtcccataccataatttttgagaacaatatatgcgtgggatttgttacataaaaatttaaaaagagacaaataattctctactctcttttttatttttatttttaaatccaacagcctgagaaatttattaaaaaagattttgatacttttcgtacatttatttaaaaaaataaaaaagtttactttctggctataggatccggtcaaagtaaaaagtactgcagcagattttgatctgttgaacatacttttcctgtgaccatccccaacgacagttttcagagtagaatctctccatatcatgtaaagaaagagagatggaagctcaaaaaaaccctaaattattttctcttaaaattaatgataaaagtaataatgatatgttaacaagggagagaaggagggagagagtagtaattagttacgtctttggtgatgatgatgttgatcttgaaaattattagaagggtgatgatcttgaccgtccaaatagagaaatagagcttgatccaactcccccaaatcataagcgccactagtactattactgtctttgcttctgataataaaaaaaaaccgaaaaaagaagaagaaaacataccaaatattactaatacgaatcatagacaagaaataaccataaattaagacgagaaatggtaaatatatatataattgaaagaagaagacaaactattagtttaaatatacacaaaagaaaaaaaattacatgaaatttccaagggaagaggaagatgacgattgattaatcatgttgtaaggaatctgattaggatgttgatgatgatggccttgaatctgatgatgatggtgttggtgttggaatagtagtggtgtttcgtcagaagtactattacttgtttggttgttgttgtttcctttaatgctggaagccatgaaagaggttcccaaaagctttgttgcctctgcagcttggtctactaaaaatttctcttctttaaaacaattattattaccagctcttgaaaaccccattaatatctccaaaccgtcttttgactttagtctatatattttttaatatatatatatacttatcttcttcttcttcttctttcaagatgatcatatttcagctccatgatcatcctcatctcactcacataaagagagagagagaaagagaaagacaaataagttatttgaaaaggagagagagaggagataaaggggtcggttataatcttaacaagagcttgacagagagaaagataagagtggaaactcaatgcaaaacaacaaaaggatttaagcttttttatttttctttctttcttttccttttatgtttctcttcaattagtcttctcttctttatttccttattttcttccggaagaaaaacaaaaataataagcgcgcagactaattaatttatttatttaattttttttttttcaagaaaaagtgctttgaatttaatatttaaaaaccagtgagatgaaagaaaaactggttatgttttgggttttccttacaaacctgtttttttctattacagtggaaatgacaaaattgccttcctatttcgatttaaacttcactattgacattttcatgcaaactctaacacgtagatatacgggtaataataaggcggctctgattaatttacagtttttattttttattatttttattagtagttttaaaaataaataataaatttgtttatgaataacaatcatttaatttaatgatctgcaccagaaattaaataattagttgatgttaccgttttggcaagttgtcaacactctagtagctcccttataattaagttatatataaatatacatattatttaaatctaaatgaaatgtgctttatttatttatttatttttgagttgcagagtagctgaagagaagtactgaaacaaaaagattttgttttatgtttattttcttaaaatgaaaactgttaagtgtgattgttttttttttttttttatgtaattcttgaaaatgttttccattaaaaatattgttagaataaatttggtcaattacgtattaaacatagcgcatctaatttattgaattatagagtatttaagccattttcattatttgagttttgacgtgcatatatatttttatatatattattttcgatatgtattatttcccctaaaacaaaacatataaactatttcgctaattaaaaaatgtatttctctaaaaatatctaaactattttttattgcattaacaagcgttgaagagttctagatatagacatcaacgttgaatgtataaaaactaaaagattgcaatacaagggacgtttcagtatattaaaaaagaagttggagaaattataattattttttagatatatatatatctatacttatgatggtgtatattataaattataattatttgagtcattctaataattttagttttagtttaaaataaaattcaatctctcaattacaagcataagtatatgtattagagtgaatctcatcacattgtttatgtgtggaaataaattatcatatataagataaatgggctactctcccattagcaattggttttgagatggaacctcattcacctcatcccaaattctaacatgtatgagagccacttgtgattcgttgtgagtccaaagtgccaccggtctagaaagccgtttgtgatccgagtatccaaaaagatacttccactgtctcccctagcttgaacctccatttgggacctttcggccaatgtgtgccaatttccagtgttggggtctttgacctgtttcaaaaatctacaaattttccaacgtgtacgcccacaaatttcccaatatttggccatcaattggttttgagatggaacctcattcactttatcctaaatcctaagaatatatgcgttctttttatatatatggatgcaattaattattttgataccgcaaattatttaaatgaaaattaaaaactaatatattaatagttaagacaaattataactattatagttctatcatataagaaaaagaaaaagaatttacacaaaatacataaaattacactttttcttatgttcttacaattttttatatatattttttttacggatgtgtttttctaaaaggaaaacaatgttgtttttatgttactacaacgttatactatatttgtgcaatataaacataacgtgtcaataatgtttttttttttaatttnnnnnttatttttacactttaaaacagttatttttgcctttttaaggaaattcacaaaagaactcacatgcaactaacagaacaacttacattacaaccaaaattcatggcaatccacataaaaaccaccgatgtaaccaaactataaaatttaaaaataaaattaaaaaatagtatatgagataattctaaaaaaagaacttaaaaacaatggtctataaaaaaaattgatagtaaaagatgaaaaaaaattcttaaaaatgtaaacttttctctatttttgagtatttatgaaataatgcttaaaaaaaaattaacccaaaattctaaaaactcaagacgcttgtacactattttagtgacaattttttagtcacaacaaaaaaattttgtgattaaatgtgacttttnnncacaacaaaaaaattacttgtgactaaacataatatttagttacaagttgtnnnnnnnnnnnntttagtcacaacaagtattatgataaaaacacatttagtcagaacaaattgtaatttttgtgactaatacttttagccatgaattttttagtcataacgtaggaataataatttataattagtcaccactttcttacttttagtcacaaattttgttgtgactaaaagtgaaattttttgtagtggtataagctttctttttttttttttttttgttcttcttttcattttttttttcttaattgttttgaactcaagcaaatataacatagagaaaattaatatataattctcaaagaaattaaattgtatggagttttagtaaagatgtaagaaaaattggttatactatatacttaaacaagtggagacagaaaatcacataaataatatttgaaaacacctaataatataatgggcttatcttatgtcattccacaataaaaaattgtaacatactaaacttgtattaattagggaaaaaaaggaacggcatgcgttatactagaaagcaaaacatgtagaaatgcataaatattaaatttttgtagtaaataatgaaaaatgtaaaaattatgtaatatttggcaaataaataaataagttcgtgatataattgtatcaaattttatcaatgtgcttcagtatacaattgtaaatttgatgttttcattaaattataaaaaaataataacttattattaatttattgttaagtattttattatataatacaaaagtaaatacttatttattatttgttttgctaaaatacaaatttgatatcttttattttggataataattaattagtactatttatttataaaaattacccactttagtactcttaggataattaaaacctttatttaagtcttaaattatccctaattttaatagttgtgtttactcaaaaatttgacccaatgacatgaacattatttttgacacgtggcaagaaggaaataaccttaggccctacctctcaagaatagggtgttcaacttgggtattgggaactgtgttggtgccctagttgacatcaagggatgccccgaggggcaccaagatccaacaaagtcgttcctaggtgttatccttcgataaagtttaagtggagaggtcctagtgaccctaaaacgatgaaccatgaagctgagaatgtcatgtggacatcccagggctcaaactgggtctagtactagcgttgggcgcccaggttgacatcatgagtgtcatcttgcataagttttggttcctagcaacttcctatgggtgatttgcatagccattgtcctaggatacatgagacatatggccctaactaagtttcaaactttggaggtaggtgtacggcacccgggcactatgaagccctaatgggcgcccagttgcacctattcgatttgggcatacaacgaccagggtttaggcttttggggacattcttggaccccaattccttaaatttatcaaggaacaatcctagaatgtgatattttatcaactacatcctgaaagagcctattcccaactatgggcactaaagtttacatttcaacctgggcaccgatttcgtttcatcgagtaatgcgtgtgaaaatttgattaaactaaaattcgtggagtacttttccccaaatagaagattgaacattaaaaacacaaatttcaaagatgtttcccccacctgggcacccagcgcatgcccccaggccattatggacgcccatgttgacgtattttaatctggggcactctaacacatctttctggagaagtctttcaggcattttccttattttcatccacaataaagataaaaatgcttttggaaaaaaacgaagcaatttggagcccagatgagaagttaggcactcaagttgacatgttctacacgaacatgtagttccattgatccgatttcaaatttgtctcaaaatttattcattttttgctcccaaaacaagatatgagacttggaattaggagaaaatatcatccaagtggttgtttagctcccagacaccacctaacaccacactaggcgcctaagctgacatttggcttgaggctcagtgtttcgtccatcaaacaataggtctgttccgagcatctatcttatttttctgctaaaataagatttggatgcttccataagtcactatcttatgtacatgtgtgaactagggatcattcagttgtcacctagccatcactagtgattacatgagcatcacccgtgcatatcaagtaaaattgcaaagaaaacttaaccagattaaaaaaaaaattaactaaagatagctatcacatcattcaagtatctcaaaatatgcctaaagtaaaagaaacaaagttatgggccctcatgttgacattttatgtcaatctgaccgcccaaaggtcgacttaacctcgtagtcactttcaacagtgcacaccgcttactaaaataaccataactctctcactttttatccagatgatacattaaagtgtcatatgaaagtgcatttcaagacagagctaagtgtgtctcacatccttgccactattttgatgtttcaggcctccaaattgactcacgagttagtgtataatttcccagcgaattttgtgcaattttttttattattttattgtaacttaattggacctccttccctataaagaagagctcccttagctcattttaagcattcctcattctttctaaatggtcaaagtttttctctctctaaaaattatgaagtgaagctagagttagtcattttttcttgagttctcttgtaaggcaattatctattgtgataataaaatctctaagtagacgtagctccattaccgtgacaacatgaggagtgaactactataactatggtgttctcttttatttttttgttcatacatttgttgattgctacctcttatcaaacagtatggagttgatcacttttcagcgtcagcattttgctactttcattgagagcaccgctcgagtctcgtggttgcctttaactttttatcatttgactacgtacttcattctaaaaaggaattcataagtacgagaacctaaggacttgcaaaataatagtgacaacgagatccactagtgtggactgagatgtacagttggtgccacctcaataggtggatcgagagcacttggctgacgaccaccgcctaggctgccaactgttggaattattttaccaggatcttatatttactaacaattatgttgtttaacatcttaaatatgaacttctaaaacg

SEQ ID NO: 26445 - DNA, 1872 bp, Cannabis sativa
  modified_base (1476)..(1477): a, c, t, g, unknown or other
aaatatgatatataatccaattcagtataatacaatacgacgttccaaacgagcttttagtttatatcaggatgccaccaaataagcatagggcaaaggcttaaattgctaaaagtatctattatgagttgcaagggtcttttagtatttttattctgtaaattgtttagttgtgttagtggctgttgtaataagaagacatgagttgtaattttatcttcagtcaaagcctataaataaaatgatgataatttattttgggtagttgggatttagatgagtattgactcacttggaagagacaatcctctcgaatagttaaattggagagactagtctcttgaaagttaggtttgctttggccactaatactaataaagtaatttcttgagagattgatttctgttgactgtaggtagaaacattttttgatttgaagaaagttttatcaatttggtgtggtgattgtgaacgcgtgcctaacacaccagcaattgatgctacaatggtgttcgaagaggatcttgaagccctaaaattaaaggtttcgaaactcaaagattctccatgattcactttagggtttggctctgcgaattcaaaaacatctccaagaatcccttcaaaaaatgatttaagaactgtccaagatcccagggaagaaatactagtagctgctacgagcaaagaaaaagatgagatagaagggtcagcgaataaattgaaatctccacacagtacttgtatccataaatcgctccacaccaccatgggaacacattcgacgtcagaattttgtttacaacaaggtgttgtcaggggtttttcggagaaggaccgtaacgatactcagtatcgtcatgagaatcgtttgaaaaaaaaacttgaaatgcttatttttgatggagagaattgatgagtgcacatttgtacactcattcctaatcaattattagatggcttagtatttatttttgtatagatttaatgtgttttctccaagtgtgtaggtttgtgctgaaaagacattttgtgatggactgagatctttgagcctatttttaacaatgatttcatcattttctcgaagagcttatgaaacccaaaatgatagagcttgttcccagctttccaaaacatattaaaccatcccatttggagtccgaacgcaaaagttatgcatgatttactgagcaaggtcaaagtagaaaaatttagcgttgtgcgctatagcgcagggggtctgcgctatagcgcccggctggaaaaaaaatgatttttcacgaaaagaaaaagaagataatttcagcacgggttcaggattttttctcttaggcgttatagcgcagaacttatcatattgaagagaggacgttaagagagataaaaaaaacaagcaactttgagattagaaaacacattgaagagcaagagagaagagacttcaagcaattatcatcaactatcatcattagnnttcgtttcttcttcttcttcttctttattcttttgcttagttatttaattatgaacatgattattgtggttattatgtttgtaattatgaactaaacactcattctagactgttgatggaactattttagattatgaatttaagtttttagattattcccatatttgttcgtgttatttgtttatgcaattttgtgctaattatcatcttcttaatgcttgatcactattaattaatatagagattttaagttttacacttgagggaggtaatttaaaatcggactaagaattgtataacatagtaaaagtgtgagattgagatattccactaattctataagtttcatttaaaaagaatcatattgctttatgagtgcttatttgattaacatt

SEQ ID NO: 26446 - DNA, 2522 bp, Cannabis sativa
tatatatatatatatttgttagtactttctattgtagtagggtttagatcgcacaacctatagtaccaatctttgattagtaaaactattatttcctataaataaaaaaaaattagcatgtactaacatttatacagacaaatcggaagaaccatcctaacatcaaaacatacacagaaacatcccctaaagagtacagacacatctaacagcacaacattacaaaaatctaagactggtctacaaacagcatttaaaatcatgaagtgcaattgacaaattagaaaactaatccagaaatattcaatcgaaatatatggccatagtgccaaagaaaaaaataccagcttaaaattaaaggcattatagattcatccacagactaaaaatctatttagccaaactcatcaacatgttcctatactgaatattccttgtcattgacaaacttatcaggatactcgccatatagtgctgtaatttaagcattcatatatcacaagctataagcatgagaatttctaccataattctactggagttgtattgaacatcaaatataaaacatgtccaactacgaagttttctgacacagagaaaacccaagaaaagagagagatatataaaataatcacgattccaaaacaaggttattcagtgtgtatgattgttctgtaaagaaaataataccttggcaacatgttccagagtaacagcttcaggaataattgctttcctcagcctaatctcaacaaacccactactgcctttcaatgcaaaacattgtcctggctctccaaaactcggcttcaacatctttctggcatcattgtgaatcacatttcttgcactcattagaaacaatttgcttaattttccaaccaaataaggttcggagtgcttcacaaccatggctccaccactagccaaagcataatccacccgcccaagcccgtcagctgcgtgtttctcaatctccttcaataccaaatctcttgcatacaccctgatgtcattcaaactagcttgtcctttaccagcatcatctcccataattttgttcttcagttcctcaaaaatcttatcaaactcctccttagacaaccaattagcatctttcaactcacctaatgacctctccaaagcttcaccttgggactccaattcaaccaatctattctctaatacagaccctttctcctcaatcattttcccaaattcttctctcaaccctccaacctcattctcaatcttccgatcaacgacctccacttgaacctgcatcatcttcgtcgtggacttaaaaagcttctctagttccgcaattcgtccttctaaatcagaaaacgctaaagggggaccttctccatcatctccagatcgcaaggcaaacttcctgagaatctgaacgagacccgcaatcaaaatcagaagaacgaagttcttagcaaagacactgaggacggtgacccaacggggtttcggagaaaccaccttccgaccccgccaagcggtggttgtaacagtggaggttgcagcgttttttttggtctgtacggcttccttcgaggttcgctcgagagtagcctcacccctaatcgagtggtgactcagatctctgccatcacggatggtggatttatcgtcaccggccttatgttgaggctcagcagaaaccaactcgatattttttgacttctctgtagacaccacaaccgccgacctccgccgagtaccggggttcgccgcaatggatacggtcgaagccgacattgggtttctccaaactcagcaaatgaaatttggtactgaattctgagtgttgatcgcttcagaaatcagcaaacacaaaaaccgaaacccccgaaaaattcccatcgaaatttggaggaattgaaaaaggacagaatagaaaactggggaaagccatgaaaggcaaaatttgaatgaccgatgcgacggtttaagcggttggtataggttgatgatgaatgcttattctgaaggccacgaactgttcttactgggcctctgttagtacaagcccaactcaactttcggagaactattattaataatgccatttttatatacttcaattagcaatataccatttctattatatgtagcccaagttttttcgttttactgcttttttatgtgaacatatctgtttagttttttttttttttgcttgattcatatttatttagttaaaataagaatataaggtaaatctcatcaaggtaagataagagaacagagagtaaatactagtcttaactattggctcttatgtctttgttattttcatgaaagtttttttttttaagaaaaaaattctcatgaaatttgtttaaacatgacttgtttagaatttgaccataccactcatgctatctgctaacatggcattaaaccacacatatatatttaaggcaggtacttgggggtttgaccgtttgagttattcaaccgatgatgttggcaaggttcttgctgaccaaaacttgttttttttt

SEQ ID NO: 26447 - DNA, 3326 bp, Cannabis sativa
cgagctctcgaagagctttataggcgcgggactagaaccccgtcggccgagcaaattcaacacattacggctcaacttcgacggtatgggaaaattgaaggaaaaaatgttttctattggtttcaaaatcataaagctagagagagacagaagagacgccgtcaaattatggagtcatcttcgtcttcatcattatctcctgataatgataatcaaaatcatcaagaagaaatgacattattaggtactaattattattctaattttttttattttattttaaaatttcacaaaaaaaatatgggatttaatttgttgaaaatattataatcttatttttttttatttatacacagaaggaagtaacaatattaataagacaaagaactgggtacccactagtactagtactaatactcttttagaggtaattttttttatctctctctctttattatgattaatatattatgaaatgttaattatgaaactgtttggggttagttagagttaaaagtgtgtttatgtatgtatatatatatatgtatgtatgtatagtttgtgtgttgggaaatgaaaagggaaagtgtaaaagctgcagtccatcctttctgtcggggctgctgttatgaaacttagctgattagggtcgttttgggtgttgtgctatacacatttcatgtcgtttaggccaatcattcatgcaccaacaaccaatatatatatatatatatatataggccatgcaccagtactactcctttttacccaaaggacaattttaacccttttctctttcatttgataagttcacaccatacataccataaagctagggtgggtgtccttatttggaattttaaaatgtctaatacactttattattttaccatctatgtaatcaattgtttttaattaatgttactttgtttgattttaaataatattataattaatgaatgcatattgatatgtgtcgccttatgatgctacatatatatagaatttttttatattattaatttaatctttaactccataataaattatacatagtgatacctatagttagtaatatatattaatcggttatttaatattattgctcataatattatcaaaaaagcattaattttgaatgttattagtaatattgttgttacctcgttccaggtttagttgttattttaattaaaaaaaaatgaacatattcacaatgaaaaaatattatttttagtgataaatttttaatttcaacataattttttttttatgattaaagggacttttagtgatttttgtaattttttgtgatttttgtgattaatacatttaatcctaaattttttagccaaacatatgaattattgttttacaattaattacaattttttcacttttaattaaaaaatttattgtgactaaaaatgagtattttagtgatgattaaccattcatgtattttaaattaaaattatgtaatataatatagaataagaaaaagagaaaaaaaaaaaaaaggttatatggagtgccctatatttttagtatttatttatttatttttatatatatttttgcatgtgtatagtaagaataacaaaaaaacattacaaataaacaggaatgtaatgtttcaatagaaaggtcaggaaaagcaacaggagaatctgatcaatggactcatcatcatcatcatcatcatcatcatcaattcaaccaaggagaattacaacaacaacaacaacaacagcatagaagaaactttattacagaaaggaatgccacgtggcagacaatgcagttgtcttgtcttcctcttcttcccactacttgccacgtcatcaccaccaccaacaacaaccctaaccctaatattaccactactgcagccacctcattgttacttactacaacatcaacaatgggacaaagacaaagtctccttaattataattataataataagaacaataatattgatattttcaaaacgacaccgtatagagatgaaaattatcatgaggaagaagaggatgaggatcacgaggatgaggaggagtctcaaaccctagagctgtttccacttagaagtggcaattattacaacactgagaaagagaatgatgtttcggccaatggtatcgcgacaagtgtcactactactaatactactacttgccaattcattgagtttcttccattaaagcaatgatatattaatgattatgacactacaagtgtagtagtagtagttagctagttatatatagtgtatttatatatatcatcacaaacaaaaaacacctatgtgtatgtattttgttgggaaatgaagactatttttatttattttttattttttttaacaaattttatagcattgctatttggcaccactggtgcctagcacccttaagacgtgtcgtcttacgattagctagtgatactccctaaaagctattatatagaacccgatactaaattaaaccaataataaagcaccactgatgctttttagcatttctctaaattttaatatatatatatatatatatatcataaatataagatgagaaatcacctattaataaaactatagttggttttattacaaaaaagaagttctcataaataaaaataagctaaacaatcaaaaaaattttaaaaaaatattaattaagagataaccaatgtgtatttttattttatcaggacattattaatttaattaacttttttttgtgaaaggatgaagaataatggattttttttttttttcaaattttgtaaaaagagaaaaaaaaaaacatacgaaaataaaacacatttcgttatgtactgtaatttttttttgatcaacttaattattaatctaacggttgtaataataagctaaaggacacactctgtatatatatatagctatggtaataatataaatgaaaacgatggatatagctagggttttgcctagaaaatgcattttggaccaaaagtttttggttaatatatttattaatgtattaattctttagggcatattacaaggtatatatgtatacatatatatatgccttatttaagtaataatcccaaatattaataactaaactttggatggtgtgttattttaaagagagagatattcaaaaatggaatatgagatgtgagtgtttgatgttgatataaggaatctggacaatgctgggaatttataataattaatatatatttatgttgaaagatgttgttgatgttgaagtgactaacaattttgtttagagagatattttgttgtttagttatatatatatttatatata

SEQ ID NO: 26448 - DNA, 3315 bp, Cannabis sativa
gagagagagagcttagtgttgttgacttgatagtgatcttgcaagttcaatcaatataaaaatatgtgcttacgataaaatatgggtttagggacgaaacagcaacacaaaggaatagtaatattcaaattaaaataattcttatataattatgtgcaagatatacttaattatgctgtttaaatttttctaatagttaaaaaaaaaattattgatatggttgaattttagaatttttgtcaaatttcatgccgttttactaattctgtaattattatgtactaatttatgttctctaaactttcgtctatattagatttttcttactaaaattagacaagagttcttaaatacaacaatctcaatagtttatgagaaatttttaatgaccttaaaagttcaggaagtataatttaatatgtgttaaagtttggggacaaaaattatagttagcttaaaatttataaaatacatatattttagtatttagttcattaattgtaaaaaaaaaaagacaaaaatatggagcacgaatttgaaccagtataagaaaacaggttgttctatttaagaaaaacaagtctgcctaaataaagcacaatacaaaattattggattagcaggccgtgacgggcctaccatataaattattgcacaatacggcatggcctatattttttttaacacaatacgacccatatattttttggaatcactaagtatagaaccgtagtgaagactccagagcaaaatgacattgctgagaggatgaactgaaccttattgaacaaagttagatgtttactattcaattctgggctagaaaaacctttttggagggaagctttagcaaccgtaacctattttataaatagaagcccgaataaagtgataggcttgaaaaccccttatgaaatatggtacaacagaacccccaacctaacgtatttaagaatatttaggtgtacaacatatgtacactaatctattgacaagatggaacctaaattcgtgaatggaactttcctagattatgccttaagtaccaaggggtatagaatctacatttccaagaagggtaaaccaaatgttgtgatttctagaaatattatttttaatgagttggaatatccttacttgtcctccaggaaaggtagtgtttctccgtgtgatgcaggaaaaataagaaacaaagacactgtaagtgtggaaatggagtacggaacgaagctttcggagaaggttcacagatggaagttagtgtggaatcagaagacaatgcgtagacaaaagttgttgtggagccgaaagaacaagataacgaagaccaaataaaggtgtcaaaaggattcatacagacagatttagaaggttatcagttggcttgtgatagaacacgaagagagattcaccctccgacaaggtttgtggaagcaaacttgattgcatttgcactggcggcagttcaacagactaaaattgaagagcctaaaagctatgaagaggtaattttaggtggaaacaagtctaaatagctttaagccatggatgaagaaatggattcactccagaaaaacaagaattaggtagttgtgccgaagccggagaataagaagattgtggagtgtaaatggattctaaaggtgaaagagggatcaatgagaatgaactagtgaggttcaaagctaggttagtggctaaatgctttactcaagtggaagatatatactacactacgatcttctcacctatggtaaagtacaaaacaataacactgatgttgtctttagctgctcaaatggagtttgaagttgaacagcttgatgttaagactgtctttctgactggattcttggatgaagagatctacatgaagcaactacctgggttttaggtagaagagaaaggaattgaactagtgtgcaagcttaatagatctttatatggtttgaaacaatccccaatgcaatggaataaacattttgatacttatatgcaacaaattgagttcaaacgatctgcatatgatcgctgcttgtatttcaagaatctggagcaatctatagccgtgttcttattgctctatgtggatgatatgttcatcatgagcaaagttaaatctgtgatcaaaattatcaaagccaagctcaaaagatgatttgagatgaacgagcttggaccaatttaaaagatacttagtatcaaagtttcacgaaatcggaaggaagagactatttgcttaaagcagtctgggtacatcaagaaaattattcagaagttcaacatggaagaagcaaagagtacatccattccgttagggtttaatttgttttgtcaaaggaacaatgtcccaacagaatgaaggagaaagaagaaatgaaggatgtaccttatgttgtggttctcgaatgcttaatgtacgtgatggctagcacaagactggatatagctcgtgctctaagcatcctaagcaggttcatgtcaaatccgggcattgaacattggaagaccctctaaatcaaatggttattaagatatttgtagggaacttgggattatggtctgacctatgaaaattctaaaggaaaattagaattgaaagggttcgtggacgcagactacgcctcgaatagagttactgaaaaatcaaccacttcctacattttattgacaaactgaaactgtataagctggaaggcccaattacagtatgtggttgctctttccaccacgaaaacataatttacggcgaccacagaagcattcaaggagagaggtatagagaaaagagagagattgggtttggattttgtaagaaaaatcttctgtagaaaaagaagaattttgggtaagaatgtgagagttgaatcattttgagagaactcaacagagaatcattctcgactatattatacttgttcttgttcaatcaataaagaagattttgtactgtttcagaattagagtagagccataaattacataaatctattagactttaaccaatataatcttggtattatttatttattattttctgcctttgttgttttctagttttacccactctgttcgtctctatttttcatctaattattgtttatgatttattaattttgtccttgttaattattaattgtttaaaactaatcgatttgattatgcaatgttaaccataattctctcacaaaatataattcaatacaataggatacgatctaataaaacataacaaataataatcagttatatattttatattgggtaaattgcggcataaatacctaatgtttctaattttatacacttaaatac

SEQ ID NO: 26449 - DNA, 1862 bp, Cannabis sativa
tgtctttttatttaaaatattatattaaaattatcttatatgacaaattaaataattaataaactccctagccttgtgagtgacaaccaaggagctttcgtcaagaacagactcctggcccataacattatgatattccaagatctccttcaaggttacactagaaaaaatgtctcagctcgctgtttaatgaagatcgatttgagcaaggcctacgacactatagactggcagtttgttgaagacctcctcaacgggttgtgctttccttcgagattcatccattggttactcatctgtttgagaggtacaacatactatcttttgcttaatggtagaatccagggttcgtttaaaggaatgaaagggctgcgccaaggagaccccttatccccccttgtttttgtcatgataatggagtatctgtccagattgctttctcattacgcttacaaaaaagggtttggattccacccgctttgtaagaacatgagattaacaaacctttgctttgctgatgaccttattattttctgtaaagggaacttaaagtctgtggaatttgttaatgatgcattccaggagttttgtcatgctacaggtttggcagccaacaagaagaaatctcacatctattttgggggagtgaaagaggagataaaaagcaaaatcttggaggtgattcaaatggaagaggggtcttttccgctcaaatatttgggtgtgtccttaagacctactaaatggagggcttcggggtataatcttggacaaacttagtttgaaactaagtggatgggctagccgaaacttatcttttgctggccgagctcagctaatccactcagttcttcttggaattcggaatttttggatgagccttttcattttacctcgaaaagttgtggcggctatagacaagaagtgtagagattttctttggggtgtgagtggtaatagaagcaaacttcatctcccataatgggaaaaagtttgtcttccaaaacagtttggtggtattggtttcagagaagggaaaaagtggaacttggccatggtttctaaacacttatgggcactctcgagcaaacaagataacctttgggttaaatggattaactccattttacttaaagaaccaggatatttggtcttgtccttttaaaacaaacttcagctggtacttcaagaagctgttgaagatccgaaacgtgacaagcatgggcatgatgaacaaggcgataaaagggggtaagttcaaagttaacagattttatcttgaactgattgggtcagctaagattgactatgctgctactgtttggcacaagtttgttatccctaaacacaggttcattttctggcaaatcatcaatgaacatctgctcacccgtgatcatttgagcagatttatgaccattccctcggatctttgtgtggtttgtgagagagatgtagaaactcataaccatttgtttgtggactgcatttataccaggaaacttgttgatagtgtgcaaacctgggctggctgtttgagttggccgaaaagcttcagggagttgcaagagagaaagtgcccagccaaacctgacctggctgagttgattatgaatgctatctattcagctactctttaccagttgtggagaaacaggaatgattgtctctttaatgctatttgtcatttagtttcttttcttagtaaagagattaaatgtatggtaaaggctagagtagttgggtttcattgtaacaatgtaacaggaaaggatagttatatatggagggtagtgaatagttgatagctgcccttctccttgtgtggcggttggttgttgcctccggcctttgttttgtat

SEQ ID NO: 26450 - DNA, 5397 bp, Cannabis sativa
  modified_base (43)..(46): a, c, t, g, unknown or other
  modified_base (2987)..(2994): a, c, t, g, unknown or other
tctaattatcacaatgaacagtaataaccttttgattgagctnnnnctcctccatcaacctagttaaccatagtgcttccttgatcacttcttttaaggccatatattcagcttcagttgttgacagtgtcagaaccgtctaaaggttcaatttccatctaatagctatcccaaacatagtaaacccatattcggtcaaagacttccaagtatcaatacaccctgcataatcagagtccacgcaaccattgataacatccaattcttccttccagttattcatgccaaatattagctcctttctgggatttcccatgaatctacttaccatgctcagtgcaaacgctatgtccgctcttgtacataccatgacgtacatcaaggagctaacagaactagcatatggaactcttgacatctctgtcttcttagtatcatcttccagcatctgagtagcacttagtttgaagtgttgaacaagcagagtacttactgccttagagttactcattttaaaggtatctagaaattttttgatgtagctcgtctgattcaagtacaatagttttttctatctttcccttcttatatccatgcctaagatcttactagccgaacccaaatccttcatttcaaactccgtttttagctgaagcttcaagtgcttgatctcttgtacactcttgctggcgatcagaatatcatctacgtacagcaacagatacaaagtatctccatttctctctaaaaactatatacaaggatcaaacttacttctctttagatctatcttggtcacataatcatcaagccatacagggacttccgtaacaagcacacccagtgttcctttccagcctcttcaaatccttcaagttgtttcattagaattctttcattcatatgtccataaatgaaggcagtcttgacatctaattgttctagttcgaggtcttgacacgcaataaatgccaacaaaattctaatcgatttgtacttaacaatcgaagaaaaaacgtcattatagtcgactctttcaatctgagagaatcccttcacaaccaaccttgttttataccgtgcctcttgtacacctcgaatgccttcttaccatttatacacacatttgcatatgatgactttaccatcttccgcacggtattacatcccaagtctagttcttcttcaacgagtgcatatctcttgtgatatagctccattccatttcttgcgatctttgcttttcattgcttgtgcatagctagtaggctcttcatgcacaatctgattagcaacatggaatgtgaatgcaattaaatcagcatgttcgtatctatctagagcctttacttctctctgtattctgtctcttgccagtttatagctcttcaaattattgattctgaatcatcacttctgtgatctacaaatatttcagtctccacccttcctgaggctccaccttaagctcagttcccagagcttcaatttcttctcagtcaatattggcttgacttccagcagatttgtcaatgaatcccataacagattcattaaaggtcacatccctactaattatagattttcttattctgggctccagacaccacagtctataaccttttactccttttggataccccaagaaaatacactaaaaggctcttgccccaagtttgtcttgcctaatgtgtccataacagacacatctgaataccttcaagtgttcataactttttggctttcctgaccacacctcatccggcatcttgaaatctagtgctattgacggacatttgtttatcaaataagctgtagtggacacacctcttccatcatcttgaatgaatatagggcctatttcaaatataatctattcaccaatgatttagtcatatacagactttcaagtttccaccacacacttgtggctgtatctttttttgcaacctttctcataaccttatctctaagatataaaatgatcacactatgagcctttgtaagaatctctttcttgtctttttcagacatcaaatcaggaagaggcttttctcctagaagatcctcatacaacccttgatgaagcaacaacgccttcatcttcattctccataatccaaagtcatttgtactagtaaacttttcgacattgcattttgtggcactcatgattacaaaccaagctctgatatcagtgtttgttgtgcaaaatagaacaatcaatgacttactatatagtttacagtaccaacaaacacacaacacaatcaagaaactaaatactaagagatctcaaaaatttaagataatgaattaagcagtaaaacagaaaagaacaacactaggtttaacgagttcgagccatgtgcaatgctctacatctcggttggaacagcagtagccatatctttattgatatcagtgtttacaaggttacaagaatctttacaaattttttagagactacgaaaagaggtttctctctctagtttagactctacattacactatcacgattttcactgaagcaaaagctttttcgattcctacacaagttacaaagatttacagctacatatagatttgcattgttgccaaatatatctcataaatcattgtggcatatttacactaccataagtgatccagctcatcaccagcaacaataatccatgtcatcttgaaacacgagcttttagtacaaaaaatccaaaagccttgtaacacacaagccttttggatacgtacatgacttcattcctggatgaaccttcaagactaacagagctgtctgggagtacacctccggattagtgacaagccatccaggagagacatatcaaacacggtacaagcgtatctgaaagtaccttccagattcaacaagaccttctgcacagggctttaatgtttttgatatattgtaaaaatatatatatttatttatatggaccacatgagtactaaataaatttaactataannnnnnnntttaaaaatattaaaccattaaatcttagtctgatagtgaataataaaaaagaaatttaaatttctatacttgatttagctacttaattaaagaaaatatcaaaaaatatttctttttatactatatcaaaaatatgtttatatgaaaaatatttaagtcaaactaaacttttttttatcatttttttaccaaaaactttttttttattattttttttttttcaattgacggaacaactccaatccatataacgtaaaactaagaaatttttctaattaaataacaaaatttatcataaaaattcaattttttctaatattactcattcatgggtaatacccattaaaagtgcacccatatatttatatagtcactttatttgatgattgtatttttgttttttcatatgaatattggtaaggagacttctttttattattttgataaaaaaaaaaaaaaatctgttagatattaatatcgtatgttccatttttgtatatgtactatatacattaaaaaaattgtaaaatataaatgtatttttgttttcttttaaaaaaatacttttatatttattttttggggtttatatttattttaatttcatgaacattttgcgcgtgcatacccctcaattgaatacaacatataatatgtttaaaaaaaaaatacaaaacatttaatattgatcatgtcgtacatgtataatataaatataagtctcgttttgtcaactccgagatcttatttgctaagaacaaattaataatgatttttcatatttccattttatattaaaaaaaaaaaagagttttactcagtccaacaaattaaagtctattgtttaaaacgtagggatatatatctttcatcacaattgtaaattatatctcattgccacctaaacccaattaagacttttaaaaataatgaatttattaattatttaattaataactactctataattgtgtgtttgtgaaagggaacagtgctactaccattttattcaaaatacactttcgtttacccatctactcctttatttattcacaattatatgtattattattgatttctacgtatttttccagtgagatggggttaatattttatatgtatttcacacacaactattttattttttatatataaaccttaagttaggtaacatttgtctctatatatatatacaataggtcatcatgatcacgcaatgatgatcatgtgatattattggacagaactaagctagtaaagtaattgtgtgtacaaataggactttggtatataaatgtatatatattaagttgatcatcacccgtatagtacaaaattactcatattgaggaagagataattaacattaaaatagaaaatattaaaattataataaattaccctagtagctctcaagtagtacatatatttataatttatgacaatttgattaatatgccaaattaagtccaaattattccaagtaataacgtaataagttgattaaatgatcgtgaccattcattcatgcacgttgcaattaattacattattatataatttatttaaggaagaactagagtggtagacatggaaaatgacgctggattactatttgctagctagggataacaaataatattattatcaagtgtttttagtttttatataattaaaagaaaatgatatacatatttatatttatatcactctccatgtagttataattaggttctaacattataaggaaaagaatatatgagattatatatatagcatatatttttgaccttatatatcgttttattcactaacgttaactgtaacctgtaactgtcaatttacaaaggaattaaccaaagcttttattcttcttttttaaaataaaataataaaaaaaattgttatttttctcttgtaggacatgcatccttaaaaattaatagatcggccgaacatgtaactatattattaaaacttgtttttttagaagataaaatataattaaaaaaaccatgcctaatttagtagctgaaaaaattaattactgctaaaatctgccagacttaagtactgaataattaattaatgcagatcagcttataaattatatgtactgaagtaaaaaacacctttttaagaaagaataaatcattttgtcgttcaatattgtccttattcacttattgaagaaaaaaaaacaactagtagaagaaagaaattcaaagattgaagaaagatatattttttcaattaattatcaaattatataaaaaatatatattaacaatatagtgaccttatttacagagcgaaagacaatcttagatgataaccttatgcataatatatgtacacatataaaaaaaaatttatttaagtcaaaagtgaattaagtagaa

SEQ ID NO: 26451 - DNA, 4346 bp, Cannabis sativa
agaaagaccgtctacacgaataaggactcgacctttgcatagacctcattcgatgcatcagaagatcccatttcctgcggccgagacctcattcccattctcgagaaatttataaacgccaacaattggctggttcagagattttcttgttcaagcttgggtcttgagccatttgggttctttagtagaatccatgacctcgccaactgggattgccttcttcctggattccttgtcagcctgagggggacctctgaacttgctctcaaaatctacgtccattcctgtagagacaaagataaaagatcagtgaaacaacaatggtaaatgacgaattcagagaccaccattcgcagaggatgatgcttattctcagaaatcccttgtggggatcgcctgtaacgatcgattgtatctccttagtttggatttatcgaaagatcttcagtcttagaatccttcgtttccaatttaaactgaggttttaagtttttggcaacatatagagaggaaaagcagttggtatattctagtgttgcgagttttgaaggataagttactgagcttggatgggacatcttagcaagagaatgacaatccaatttctcgatgaaactcaccaaaaaccaagagtttatggataatggcaagcctgaactgtcattttatacttagatcccagtaacggtaaggccaaaggttggaaaatctaacggttgggaatgaggtagaagatgaaaaggcggttcatgaacactaataatgaccctcgaaaccgtggagccgttaaaattgagggcatgcgtggtcttgaaaaaaaggattatgatgaatgttccctctgtaagcatttaaaaagtactttttattaaaaagaacttttaaagggacaattgttatacccaaaatttggctaccatttcaatggaggacacgtgtcaagttaaggagaatatggatcgatgcgtgtaacggtaattatatttaatggaatactcattgaatgcggaagtgatagagtatatgtgcaacttgttgactataatgtcctatgcgagataaagatatacaaactgttacctcatgcattaacgagaaaccatacagcattggatacacaaggcgagacatcaacttagttactcctgggaagacgtaagcgatgcataatgattgggaaaacacttagcatataatatacaaactaagtataacagttgggcgaatccatccaactaatagcaaggcgcttatctcgctataggaaggcatgctcttgatactttcaccaatcagcttcagacatcttttagtgagattattagtcttggcaaatcagttctctcgaacagaagctgacattcaaatgatgactactgaagtactctttgttattaagaactacgaatgtcaaaatgaagtattatgccttcaagcgaagaggcaacaaggcgtacatcatcaacctcagaaagataggggaaaaagctccagctcgctatcaaggttattggtactgagttcctgtcgagacatcccaaaacattatgatttaaaacatgtttaatacacaatcacttttacccagtaaaagcggattaatcacagctgtgtgatattcaaatattagctgcatttatactacgtgatatgtaatcaaaccccgtgatttcaggggataattgttgtaaagattacagtcaactctgtaattaactgcctgactatgaaattataaatagaggccagttatactgaaaaggggatgaaaaaaattcataagaaaaaagaccctgagaaaccatcagaaatctaataagattgactcgtggactatgcataattttaactgcaaaaccacgtaaaaaacttatgtgttcattttcttttctttactgtttttatttttctgtgcaagtttatcattcaggttcaaattttgttaacaaaaatcttcgttaacacaagcgttgaactcgttcgtgctcacagaggtagactctcccacagtcgacaacctgtgccacattagacccagaatgctacgcatttgggcttcagtggcatatagctctagcatgacgcacaacatgaagcatttttctttgtaatcctttcccaaatggacgcattgggtacctatgtgggaggcagtgtcgtagctataccctttcccttggatttagcaactaccccgaatggagcagcctcaatagcaacctcctctgtaggagcagcagttggattttcttcaatttccaccacttcaagatgaaactgttggttcaaatccatcactggagaaatgaagagaaaacaaaggccaagtaattagatacccaatatccaaatgaaaaaatgggcatcggggaaggcctctcgtaaaattgcttagagaggtccccgctggacccatcactccctgaagcatgtctttgccagatgtctcaaactaatggatgagaacccagggaaaaatttacaagaacgaaatctaaagttaatttccaaaaattaaggccattcagagtcctaacaactctaaataggcatgaagaatgtcaaacggcctggtagtcatttaaaagttcatcaagcctggtgaaaaccctaattctagaagcctaaaaatatgcaaatgtctacggagtttagacgaccataccttagctatccaaacagtatcagcactcccatggcataaaaatttccacataatgccatcctggaaacatagttctatgggcaacatttcaccactggaacatactaggtttccgagacctagcttaaactaagcatttctatcctagatacaaaatagtaaatattcaacaaagagttgggatacttacttagaatataagtgggtaatgaaagattgtcgtggaaatttgcccaagagtgttgaacctagtcaatcacgtgattgtagctaccatgcgtcgaagttctcgtcagtttggggatggatcagttcaaggtctaacgactctggtttggaaagcaggctgaatgaaggtttaaaaaatactgaatcaactttttgcattcactactaaggatgattgtaagtttgaagattttatagaaaatgggattctaatttggtatttaaaggcgaagaaattggaaagtctgagatggtgaaaaaaaaaggaaaaataggttttgtgaacctatttatacttcagttaaaatccttacaattgaaaatggatggtccaaatcctttctccaaaagcacgatttgatccaatggatgggaagttgaaaagatgacatttaaaacttgatcatggcatttattatttatcattgcccaccttgtgtattgtacgcatttaagaggagtcatttgaatcgatccgccatcattacaattttttttttcaagagatgcacccctacacgagcatattttcaatgaatgcattaaagatgttgtatgcgtgctacacccgtggtaactttggtttttggtcctttaattgatgacatctcaagggtacatctgtgatcccaacaatcaccatatttcgaagacttatctccaagagaagaaagaagactgcaagctcccagatctcgaagagtcctggaagcatggggggtaaatattatccatgttattgagcatgtggcacgtggcatatgaaggaagagataagctcataatctcatcaattaaaatcccccaataaaggcttagtcacagagaagattcacaaaaaccgaaaaataattcaagactaatagataagtagaagcctaccttgccttatcctagcttcccgaacaaggaagacatattatctctcgcgaatcaagagtgatctaaactcagagtctacccaactgatacccggaaggatactcgaatggcctattgaggacaccgtccactcgagagtgtcgcgaacgtctacctttggtgaaatttggatctccaacgacggttatgctttttttgacacaaaattagatcttgtccattgtgtctaggcgtggtagtgcgcatgcatcatccaccattttgctagacgtttatttcaaacctctacttttaaaagttaaacctttaagcaacatgtgccctttacttttaaaggttaaaccttttagtgacacttgtccactacgtacaatggtccccaattgtccaagttgttgtacacacgacccaattgtttccaaggggccaatagtcaagtcttttttgcatgaaattgaccctgtagagaatggtgaatagaattatgtgtgtatttcatagaatagtacatatttatatacaaagttaggagactaaatgggaaactaccaataacaaaataggaaactac

SEQ ID NO: 26452 - DNA, 2751 bp, Cannabis sativa
aaaaaaaaaaacaaaaacaaagaaaagtgtcgaggtgaagcatcggactcaccacctcctcattgacatctaatccacttaaccaattgtgctataaccatttaatgaattttattgaactaaaatttatatattatatctatttctatatatcatatcaattttaatttttgggggcctccggcattgtggggcctggggcctacgccccggccgccccaccctctgtccggccctggcttcacaacaattgaaagattacgagctacgttatccgactcatgacttggagcttgctccaatccgatccaatacatagtggacctaaaatattagatggatccgatccgatctaagaaaatactaggtctaaaatatttgataaacccaaattaaaccaataagtatatataaaatacatctagtggataaaactgatcaaatccaacatctaatggatattagatcaattgtatgactgaaattaattagatcggatcggatgataaaatttaacatccaatatataattggatcgaatttgaataggtctaaaaacattgaatatggtccaataaacacatctatttctaacctatattattgattctaataatctagaaattaaaaagaattagaagcaaacaaataagcataattagaagcattttttccatcttattattatcaatagtacaaagcttagtcattcaaccaacaaagcatcattaaccgaattcatagacatattattatgtgactttccattctatagtgaatacaacatttttttttttttgataattaagtcttttatttaagcaaagcaaactagtgaccacaaaagggggccacttcccttagaaaaccagaggacttaactttagatatccttgcccagcgagctaaggcatcagcacaaacattttcctgtctaggaatataagacactctaacatccactaaggacttacacagatcaagatagtatttaaacaaaggaaaggtattccaatcgaaaggaagctctctagcctcaaaagctaaagctgccgatttagagtcagtctcaatccacaccttaggaaagttcctcgagatagccatttgcagggcacaggcgatacctaataactctgcttcaaagactccctcaaccgatgcaaagtcaactgagactaaagagtccgaaggcagcacttgctggtgcacagccgcaaaaccagcctctttaccaaccactgaagcatccacttgtacacggcagaactcattgatgtcgaggggttgctgcatggttggggccgtagccagaatctccacctggtcttgccaaagcttcttttgcgtaaaatcagttgttcttcggaggctgtctttgaaaaccatctccacattacattgactcccgttgaaaatgatatcatttcgccatttccagatcatctcacaagcacatgccacaaacaattgaaatttggtgtcctgaagattgcaccacaaggagccaaactctaggatattgttccattgaaatgagtcaagtctgacaccttttcaaaaccaaagacccctggtgaaagggcattgacagaaaagatgcaaagatgactcattctctgaattacagaagcagcacataggactagatacctggataaaactagttctggttgttgtgggaagaatatccgagaataatctccaacagaaaagcttcaatcgagggtgaatatcagtcttccatagtttcgtccaaatttttgattcatcctttagacgatgtttttggctgttccagtacgcacttttcactgaaaaatttcctgatttggaagcattccaaaacaggatgtccgggccttcttgcaatgatttgatcttcaatatctcattagcaatctcctcgtcgaagcattctctgatcaggttttcattccacgagcgggttccttctgagaataaatctctgactttccatagagcctggttacgaacaaattgaaagtgttccttgatatctacaagattacgcctcgggatccaaggcctatcccataattcgcactctccttcagcaattaaaactcccgcactctccatacatagtttcctagcttgtagcagacttttccacactcttgagtccgtatcatgttgctccacttgccaagcgttaactttatgacactatttatccaataggagtctcacccacattttgtcctttccctgtaagatcatccaaaacaatttcgcaagaagggccatattcatatccttgaagcgacgaaatcctaggccaccacacttcttaggctgacatatttcatcccaacacttgaaagcacaataattctttttttccaggttgccattccaccagaactttgctagaattcgatctaattctccacaaagagtagtaggaacttgggtagtagacataaagaaagttgggatgctttgtaagacagacccaataagaatcgtcctacccgcttgtgaaagatgttttgccttccacccctcaagctttgacagaattctttccttcaagaagagataatccttccttctttttgcagtaaaaaaaagggttgcccaaatacttctctgacgccttaattgggttcatacctattattcttttgatgtcctcacgtatccgaggggtagtgttcggggaaaacacaactccacttttctgcttactcactcgttgaccagaccaattctcatatttttgaa

SEQ ID NO: 26453 - DNA, 3078 bp, Cannabis sativa
aaagaatcaaatttgaagaagtaacaaaattgaaatgttaatcacatttggacatgaatttgttatttgatagttgtgcttgagtagaataagggtctttttttttggtgtaatataataaaggtgatgaggattgcttgcagttaccgtttgatttgaatatttaaaagtgggaataaattaaagatcatgtgaggttatacactgtgatgtaattaatatatatgtatatatatgtatatgtatatgaaaaatattgcaatttacactagttttttagtgatggaatttggttctttaattattatttttttagtttattattactaataatatgattgtatttcactttttgtacaataatttacttgaatttggagcaaagaagataagactattctccttggagtcattttgcactttggcttagttttggtaatttttttataaaatgacttccaacactttagattagtggtgggaaacatcaaatctaatttaattaaaccgaatgatttaacctaatctaattgcaattagattggatatccaattcaatttgaattgtatgttaaaagttagattctaattggactggatcaattattgtatgtcaatatcaaaatccaattaaataccaatttaatttaattacatattaaaaaaacaatttatatttatttttgtataataaaaatatatatttttagtagcttctcttttgtgtgttgaatttgtacacttgattattttgtgtatttattttcatgatattttgttctattatattacttaataatgtagttattttagttatttcaatcttttagttgcattgcacttataaaggtgataatttaatttttgaatattttaagttaatattaaaaattaagtgtgtaattaaatgtccaactaaaaaacaattgaatcaaattagattttaaaatctaattggattgaattggataatttctaaccctttttcatattaatattattattattgctaagagataaatctttcattggggaaagaagcaaaaacaaaaaaggattcctaccacatataacaagctagataacgaaacaattaaacaaagggccattaacacacaccacttacaattcaaaaataaataaactcgatacataagaaaactaactttctcattctcatgtttatcgtaacgttaacgttgcaactcataaattagtctaacatgcccttagaatagacagtaaacttttttggatagaaaaaatctcttcacattgcctttcgatgtttttttctctaacctataatgattactcctaaaaagaaaaaaagtgaatcaacttttatcagctcagttctggatgctaacttcccattaaagactaacatttagagtagaggagagaaaaatggaaaggtagaaaaattgagagaaatagaaaattggagtgatagaaaagaaaatgaatttctctaatgttgtttggtgagatgaatggaaagaaaatagtatatataaaacaaaattataatttaatattatcatggcaaaatttttatgtacacattcatatggcttagactttccctccatactgaaaattgagtttgtaatcatgttgtagagttgccaatgtgtttctacaaggaccctctacagaaaaacataaaagatagtggtaagataaccgaaatttcacatatcgaacttataatgatcgcgctaagtttgactacattgtttatgattgcttgcttacctccaaatacagtatgaagatattgaagatcctctgccgagcaagcatctatcaacgcatacacacccggtcttagagcatcatcgatttccctgcatattgattagggctagcagtttagtctcttgttcggaccaaaaattattcttattccctactcgagaattgtaagaaagaaaaacatatttgtgtcatctccaacacaaatatccatagttagagctatgacataagtaagctaactatggatatcatacttgagaatgaggaacaattacacaataagaaccgatttgaataaatataattaaaatcgtagtgttatcgggaaagaaatcaagaaccactgggtagaatagaaagattttacacaataagaactgaacaaaatattttatatttggaagagtacctcttgatgccagttttaagggggccattgcctgaataaatccatatataattagacaagaactgagaacaatgttgtcccatgacatctttctgatgtcgaatctgaaaagtgaaaggagaaagtactatatcagcgaaaactgaagaagagaaaaagggctctctgaatacctacactacacctcttacaataatctagatatgaagtgcctatatgtaaaacaataccaccttcataaaatcacagtgaacgtcgatgatttcatctcgataaaacttttaaatttaagttggatatgagagttcaccaatgaaacaagtaacatgtttcggtttataactacacaacaataccttcggtatgcatgcttcagaaagtttattcatagtctttaagagtattatcacaggattaacaattgaggattaaacaatgtcaggctaagaacttgatttataagtttatacttatttatagagcctatggtcctccttgccatctcaatatatgtaaagcgaaagaccgaaacaaactaagaacactaaaagagggcatattgactgaccatatcgggtagcattaggtgaagaaataataacaaagacgctttcatgagattatgcattcttgacaatagtaatgacaacactcacctcttcataaatccttcggagactgtatgcacattttactccctcttccacttcccatgagaaataaccatttctgatcaatgacttggaatccaccgtctccaaacactcgagaagaacacacatagaggcttccagcacagcaatggatcgcttgcattcactgaaatttaaaagccatttacaatgtaaaaacacagcagccattttgttggggatgcaaaaccacaaacataatgtaataatatg

SEQ ID NO: 26454 - DNA, 2111 bp, Cannabis sativa
ttgcaatagtactctaatacattaggggtaaaatttagttttttttaatagaaaaatgtaaaaaaaaaaattaacaaaaatattaaatttttattgaaaacttattaaaatcatattaaatatatataaaatgtaaataattattaattacatcaataagtggcaaaagaataaataaaaaaaatgatatttattgtggtataaaatttaacccatgttatattttgtcgaagccaaaaaccttaagtatttaattcgccgaaactaaaaattttaggtgtttatgccacaaatactattatgtttgaataagatttaacaaactggtagtgacaaaagtaacaaaaatataaatttaagtatttaattcgtaaaaaaaatatgaatgtaagtgtataaaattgaaagcataagcaaaaatattccattttttaaaaaatattcttatttgaattgatacgaagatgtccaatcacgttatatatggtttaactttctaatgcctacccattcggtccgctcttgctagaagaatgtatattgaggaagcttctcgccctatttgtggagagggagaggaaactatagaatatctcttcttctattgcaactttgccttccatctctggaggtccttcccctggggtgtaatgtcagtctttgattctggaactatgatgtgggattgggtcaaattcttatggagcttgaaggttaaaggagtggatgtccaagaattatttttgtatgcttctattgtagtggatacgatttggaaaacccacaactgtaagattatgaaatatctccgtgccattctcattcatcttctcataatatatacaagtagatgcctaataaaaggcttgactctaggctacaaactaggaagcaatatcacttgattctaggctacaaactaggaagcaatattctgaatatatgtttaacggaaggcaataaatgaagaatcatatctattctgacaaatatatttacaatatatttaacaacaaggacaatgatgataattgatgaggcggctcttgaagcttgtaaattttgttaatgtagcaaaatctggacaataacttcttcattgaatcttaccaagtagctcgttgctgagcttacttaatagctctgcatattgtgattgtgaagctcagttgccctgagaaaacttaaaacataaagggtacctgctccatctaattacaataaaagtacaattgacaatatttttattgatcaatcatttctccattggagctttagaattcttttgttatataaacttgtcaccatttatatgtactattaccatttatcaaatatgatttatgttgaatgatgatgagttagtttgtcgagtctacatgtgtttcggagtatttatcattgaattatttctccttaattatttgagagattgattaaatgttgcaggaggatgagtctataccacatgaacaagttggagctctttatttttacttttgactgctgggaatcaattagaagtttaggtattacactttttaattttaaattacaaatgaatataatttttacactaatttggtcaatatatatataaggtcaagattctatattattggaactttaggttattgcaatttttatgtatccatgtcatattttatatattgttttattatatgacattgttatttattcggataataccatcatatttaaattaatatgaaattagaaattataataaaaacaaatcaataaaacatccaaataataaactaaccataagtgcaacatgtaacttttatctagtatataaatatatatatgatcttcactcttaattcttaatgtatattacatatgaatgggtaaattagaaaaatttaattttttatgtttaatttttctatctaattagaaaaatatattatttttacatcgtatgtgctgagattgttctatcggttgaaaaagaaaaaattaaaaaaaaaatgttttttagcaacaaaaaaagataagtaaatgtttagtttaaatattttaacatggatgtattttttacatattgtaaaaagagatattttttgatattttttttaattaag

SEQ ID NO: 26455 - DNA, 4599 bp, Cannabis sativa
  modified_base (1369)..(1388): a, c, t, g, unknown or other
aaggccaaagactctgtaatcaaacactcttaattatcaaactcagttcatttctaagtttcctcacaaacaaaatgcacacacacacacacatatataaggatattatttcaaataagttttaacacttgtgaggcattttctcaaacacatggtttgcataaacaagcaacaacaactcctcctctctctaagtatgtatatataaatatatatatatataattaatcaattaattcataaaaaatgatcagatagaaagataaagaataacaaacaaaccttaaatgtggatttattatggacagtgatgaatagcataggctggagataacctgagtagacgaagaagagaggagaggtgtaataaggtgtttttcaaatttaggttttcaattttttttatgtttaaacaaaacacaaaatattgttcgtttgactttgacatgagactaattaaattttaggtggttttacaatacacctatttatatttaaattttatttatttcaaagacaactttttaatttaattttttttaagtgtgttagaaatatttatagtataaatactttatattttcatttttaaattaatttaattagtacttaaaagagctactaatagtgacacaagtgacaaaaatataatatttggtattattttttaatccgtaaaaaaacatgtgaaaatattaggtatttattttcagaaatttgaaatgatgtataatatgaaagacactgtttaaacaatttaacagaatgataagtacaataaattatttgaactttattttaaacacgttaaatttttttaaaaatttttaaaatttaaaaaatattttaaataaatataatatacataaccataaaataaatttcttaaatgactaaacaaataaaaatatatcaatacataccttttaaaaatacataccttttaaaaatgtacctttattgaattttataattttaattatcaaaaatatatataagaaaaaagtaaaaataataacaataataataataaaagtacgaagaaaatgtttagatacatttttatttttctaaattatatatataaatattggtcatatcttatatataagtaatactggaatagttgtgatgctctcttcaaaatgaagtgaatagatgcactccatcatatttttgataaattaaaaagtaattcatgtcaaaaaaaaaatatttgtgacgtaaatattttattattcagttacatataaataattaaatttaattttaaaaataataatacttaagttatattttttaaaaaatttataagtacttgatcattaaattttaaattattatattattttttttattagtatatttnnnnnnnnnnnnnnnnnnnnaataaaaatttaataacttaaaccaatcaaaaaactttcacataacttgacacttttttttttctctttttttttttttgagaaagacttgacacttaattctaagtacctatccaaaaatcatttagcatataaaatactcctttttctctaaatctcaatagaaatattaagctaaacattatgattaatgattaccaaaaaagaaaggaaaaaaaaatgaaagaatattataaaattagtgacgtgtcatgtggagaaggcgacatgcaagtgatgtgcatctagtgaagtgactcacgattcgatgacttaagaagacattattgctcttgggctcgcttacaaattcaaagcccaaattaatatgggctttggacgttttaatgatgttgaatatgggcttcacaattggacttctcttctaataccaaccactgagttgggaggataagcttcacaaatgataattttctatttttctctaatcaaaccaaagccactttatttctgcaaaaataattataaagtaagttaaaatctctatattcttcatacaaaaatattcacacaaaaatataaataaataaaaacttaattgtgtttaaaaaaaattaatttattttaacatgtaagatggaataatagtccattttccacaactaatagtccatttttctatattcttaattagaaaagtgaatatttttaaaaaatatgtcctataaaattatttttacttttttaatttttaattaagaatcaaaattttagaaattttaaaaacaaaaaaaaaaattattttcaaaattttttaaaacaatttttttttcttaatgaacattttggacactgaccccaacctaaaatttgagattcgaattcagacccagaccccagacccaacccagatcgaacccgaaccctagcctcgaaacccgaactcgatcctagaccggcggttgggacccaaatccagactcagatccagacctcaaaccccggctaacaaattggacccagaccccaaaccccggcccaccaaattggacccagaccctaacttctgccccagacccaacttaaataaaatcaaaaagtaaaaatataaaataaaatttacggaacataattttgttttctctttttaaaaattgaaaaacaaaacttgttatagaatataattttatttttcaacttttatttttgtaattaaaaaaaaaatatcgtttggtaatacttttattttctaaatattacatttttttgagtaaaggtttaattttatttttattatccactaaattttaagatcggattctgagtgtgagtgccacatgatttaactatatatataatttattcaaattaataaatttaataatttttagaaataattataaaaaagccactagtatgtacatactatcattcctcaaatggaaacatgtgttttgggatttaaatagggctgttagttattgtcccaaataatatgcattcctagtcaaatgtgctataacaaagctaaacccacaaaaattgaccaatccacacaaaaaattgacgaccttgattacttgtttacaaacctcttcatccattatctatgcactatttcttctctttgccaataaataagaatattccaacagaaaactaattaattataatctcttcacaaaactcacaaatcatcattatacaaaagaaagaaaaaacaactctctttatcctttcacttcaatctaacatgtcaatactcacccaaaaatgttccaccccattattaatggataccaaaattgatcatcatcttattattaaccgtgatcataatcataaattgaagaggttgcattcactcaaatttcctaaacctaattcctcaacaacaactcaaaattcggattcagacactgtgtcggcctcagtccctgacgaagatcataacaatagttctaccattcatcgctacacaagtttgagagatttagacatggctgaattaggagtaaacgatttcaattgcaataacatttccattaaaaatcgccttgtgaagcgagctgcctcggcttatcttcaatccacagcgattttggccactaggaatcaaagttgtttctcttctttttgggagaagttgaagaacaaggtatctttacgttcatgttggcggatctatgttggtgggccaattagggcttgttttcgccctttgttgcggtttttcccttgcatggtttggtctcaattataattatgatagctagttctcattttgttcttttctaatcatgatcaggtcatgaggtaagtactactctcaaattagtcgaataagagggtatgttttttttatttcagccatgaatggctttttgatttatattttctctctagcttaattaattagggttttctaattattaataactttgtttaatttgtttctcatatatccatatgtaaataatcctaacaataacatcacatgtaaatatttgtaagagctatggatttatatgtatggattatctctctatatatgtattttcgtaaaattgcaagtgtataaattatgaataacataataatatgtattttagttagtgcgagatatatgttgttcctagctaagttaattaaatgatttttaatagttacaattttttagtcacaacataatttttttatgactaagtgtgacttttagtcatatataacacacaaagttaatggtgactaaaacataatatttaaatacaagttgttactaatttatttttagtcacaacaaattgtgatttttgtgactaacatatttagtcacgaactttttagttacaacataaaaatgataatttataattagtcacatcttttttgcttttaatcacaaattttgttatgactaaaagtaaaattatttacatatatatagtaagaataggatcaggtgtttataaaatattcgatcaaattcaatctgtaaagtgcggatatccacacttgtgttgactaaattagattgaaaatttttaaatctgcataagtgcgaaatgtatgttgattgatatgtaaaaataactgatccaattgaatccacatatatataaatattttaaaaaaaatatatatgtaattaatattttaatgtaaaaaaaataataatttaagaatataatacatatcatataaatatatt

SEQ ID NO: 26456 - DNA, 3670 bp, Cannabis sativa
tatattttttcatgtatagtcatgttcgtgccttccaggcttgtactgatttcgtgttgtatcaaaaaatctaactagtatttacagcactactttatcgggtgcaaataaaaatatcctaggttaaatcttactttttttttaaggttaaaatttggtctctaaaattagttatagtcaaaatattttcaagaaataccaaatacgtagccttcttaatatttataaatgaagagtaataaacaaattattattcaaataaagatagttttttttttttaaaaaaaaaaaaataatgcaagagttaattaaaggactaaaataaagaatctaacatgatataatttttattataaataaaagatattatgatcatatttttttttgaaatgaaagtcatcgtttaactcatccgtcatcattttatattatgatcatatttcaaatattagattattgtaattttttttaaaaaaatatgggataaaaaatggagtttttaaataggtaaggtttaaactgatatttgactaaaatacaaggtaccaaattatataaactttataatatatatataaatatatttattacaatatatatatatatataattatatttttggtccagcaaaacttaaaatggttaatcattatttgagaatcttccattttaggtaagcaatattcaaccatattaatttctacaataaattttttctctaaaaaatacaaaataaatttgattaattataaacatgtcaacaaatctacatgcacaatttttttgttatagttttttttttattgtttatgacaaagtagagcgtgacttttattgaattcaaagagataagctccacattcaaatggaaaacttatcttcacaagaggattcttttccttttgataatattttttttttttttataaaaaaaaggcataattctgttgagaattttactcagattttcatatatatatatataaaaaaaaacagatttttttcttaataaaaaacttttgaaatgaagaaataatagagaatatcattgataatatcaccatttaacgacttgcttatatatattagtaaactacatatatattcacactataaccttctgcttttgttgctatcttttatggaatgcatgcacatgcttcctttagcattttctcttattgttagtacatttataagaataagagcattagtagtactgctcttgttaccctataccaacactaatatgaaagtatgtgagatctgttacaaatgtttctccaatggcaaagccttgggtggccacatgagatctcacatggtaaaacttgctcttcctcgcccatctaggtccaagtctcggtctaagtctcggtctcggtctgcatcctcggaaagtgagactgagagtgatgactcgtcctataagggcaagaagaagggtaaggtgagatccaaaaggggtgaccatgatgactatattctatcggtacaagatgctgcaatgttattggtatccctttctaaggagagatggtgtagaggagaagagaaggtttcaacatctaaatctaattcagtaatcaaatcagtattcaaatgtggtacatgtagaaaggaatttagttcttatcaagctcttggtggacacaaagcaaatcataaaaaaatcaagaagtataatcacatggacgacgaatttgaaaatgatcaagataaatatggggaggatgaagatgtggtagaggaggaggatgaagaaaatagtacaacagtagaggaggagtctaaaatgaaaaaagtttttcattgttcgttgtgtccaagagttttcaattctggtcaagcgctcggtggacacaaaaaggttcattattcaaataatttagagtctactacaagtagaaagattaaattgatgatagatcttaatcaatttcctttagaagttgaatgatatgtttagaaatgaaagttatttttttttatttcagttaaataatttattactgatattttgaataatattttcaattatgttacattttgcttattaattattttttttttatctgcactaatattataataacaatgtatctccatccctattccgtcaataatgtttatttttagttttagaatcaataatgtttccttgtgcttgtgcttatatattgtgggcgcattttgcaccaatggaacaatcatcgatgtggtaactatcattttggccataggctactcattgacctatgggttaccaaaacacattactaactgtagttcatagttatcctcctagttttacaaacaaatttaagatgagaattaattactattacattactaactgtatttcatagttatcctcctagttttacaaacaaatttaagatcgagaattaattactattattaattttgttatctacacaatgataccaccattacctcaaatttttttatagcactatatttacatactcacatacgtacacacctatatacttacctgtattattttttttgtgtaatacactatgttaagttattttatcattaaatattaaaatctaaaaagtcatctctaatccaaacggtttatagtttcttcaaaccgcaattattgaatcggttcattaaaacacctctaacccaacaaaggcatgtgcagaggagggttcttcatgtatgtgattattatatccatttaaataggtagatagattatattgaagttattgttgtgagtaaatattaccaatgtacttgctattgttttacaagttgagctgagttatcaagcttaagggactctagaagcttcttagaatttacatgaagattattctagattaatctagatgacgtgggaagaatgtatagaaacaataaaagattcttggttcaaaaattctgaggaaagaaaacgggaattttgatttacagtttcaaaatttatgatttgaaattttatttcgcattccttactaaaaaaaattataagatttttattggttaattaatttattgatatgaaaataataatgagaaagcaaaatgatattttaagttgcttattttagctgttatgataaattaggtataccctttcaaaaaataaaaacgaaaaagataaattatattaggtatatgacttttaaaattgagtgtttatttattattgttatattttgttttttcaaaatcagtatttgtaacatgtttaatattgttgaatactttgtaaatttgaaatttgaatcgtgttttcctatagataaaatatagcaatttaatgagaaatttcatttcatattttcccccggaaagaatccccactcataatttccaatatattaataaccacgtacaaattaaggatgggcaactattattattattatttttttctttagaaaagtaaaattattttgaaacaacatatttcataaagttgttttcatttttaatttttcaaaagaagaataaaaaaataaaataaattgtcataatttattttaataattttttttatcgttaaaatatgagactttgtatttataatttgagtaatttacggtgtaaatacctaagttttatgacgaataggagataaatatctaagtcgtatttttggcgataaagtcactagtgtggaact

SEQ ID NO: 26457 - DNA, 1385 bp, Cannabis sativa
aaaaaaatattatttgttacaatattattttgataaattaggcaatgtgtaaataataataatataataataatcctaactaagcaattgggcaatcaatgcttagatcttcaggccaaccaaactcttccaacaatgccaacactactccatttgaccacccaaaaccagtctggattcataaaaaataaaaaaggtcaatataacaacaaattaaataattcattactaatttgattaaatcataatctaattaaagataaaattaagttaagagtacctgaggtacatattcaccaccacctccaaaaaatccacatttctccacattgtatttttcatgcattgtttttgtcttcttgaaagttacataatttgttctaagccaactcactgcaatttctcttcccattgatcttgcttctttcaatccagatcttgttaaaccttcaataatcatatgttggattggagcccaaccatttggaaaatccctgttttttttgtcacaagaatttccaacgaagaccgagaaagttgtatttgttagaaattcatatcaattttaattcatcgatttggttttgataagaattgttactagggttgtttagtgattggaagaaatcgagaaataacctctcacgtgcaaaattattgaagagtctctttaagatcgaaaaatattaatgaactcaattactacctattttagcttctaaaaccctatttattagtttaaaccgagttaacaattttgataatatattcaattccattccttcttggttaaattcctataactccaataaacgaaatacacatatatttatatatataaccaataaatatataaccaataggaaatagcatagtacgaaccattgttgtcctgaatttgtaagagatgtagcaataccagcagaatgaacaagacctgatttttgaagacttctcatgactttatcaaccactacaccatcttcatgtaaataaatgaaaaaaatcagtataaaatcaactaatttgagtgtctcttgtgttaagttgttaactaatctattaaggaaaaatttcaactttatgtagcaaattgcaatcattacataggtccggtcctgagcataaacaggctaggcctgtgtctagagacgcccaaaaaaaaatttcctcttagaactacacatttctttattaattttaaaaataccatatttctttctacgtaaaggcttaaattttttttcctatgacccactaaaattcaaagtcggcccaaatcatgtttttcaatgaagaattgctagtaagattttaatctatgagttcttccttttctactaataaattttccctatgttcaacccacgagtcccaaaaaaaaa

SEQ ID NO: 26458 - DNA, 1540 bp, Cannabis sativa
tacacaatatttttgaaaaaatttttgtcccgcaattaaaaaaaaagtaataagtttgaaattttagtagtgtaaaaactcctagaatatatggtatatatatagtactcaaaacttcaatatgaaaacgtcttaattaaattaggttcaaacttaaagagtacaaaatgtaaagattgacattaattggaaatggacggcgtaattcgctcaaattggagatcatctctcatgattaaccatatctatatgtatatatataatgtttgaaaaggtgatgattgtatttgtaaggggcccttaaccaaagaattatcttcatgcaaaagctttgtaatgaagttgtttgtttgtttgtgggaccaacaccaagcccccaagattattttgtggtgctttaattataaaaaaaataatatgaatttcaaaaggggaaacatggcttcacaaatgaacattatgatcatcaaaagatttaaacaaaaaaaaaatgtttttttacttattatatgttttgtaaagccctagcattgtgtccatccactccaaaaaaataaataaataaatgaaaagagtaatattattaccggattcaactccgttgaatgagggggttaaacattgtttcaaagatttcacctactatactatgtacccatctttatatatgttcattatctctattctctacttaatagtaattacactttataatttggttttgattttcaacaagatataattgtaactaagcacataagtggtataagtattatatatagttggtggtattgaagtatgagagatcaagaaattaagaaagaaaaagagagtcaagctagcttggcatgtggcagtgttagatacctatattgataaataatatataaaaacttaatactaaatataagatgtatgaattactttttttattgtcaattaattttgatatgtatacatttatttattcctactttctcaaccatacactttcacattttgacacgaaagtttgtataagaaaattcttgaagtagaacatatctttgtgttgagttcccaattataatgtaaggccaattctatgtcaacctcacctgcttgacctcttttaatccctctagcctctaactatgtgaatttgattttgatggtttttaatcaaattattatttgaccctatatctttgtttgctatttgtttgtttgttttttttttttttttttgtaaagcaacactttattaatttagaagcttcacaatatattttccttttaaaaatatacaatacatattttttaataatttttaaaaatattatatttttttaaataaaaaacccaataatagaagcataaggaaacaaattaattcctaggaaaaaatacaatcagtttcaaaaagagaagatcacactaacatatgtgctacccaatttgctgaccgttgataaatagagattagagatagatattttaccctatcttagttaaaatcatgtatatcactagacatcattgtatgcaggacattcattag

SEQ ID NO: 26459 - DNA, 3376 bp, Cannabis sativa
tgaatatcaatcaagcatattataatggcgttttagaggatgactttttagcatcagtataaatgcaaagtgcaacatgaatcaaccattttaacgtcaaagatatcacaaatttcatatgaaaaactggtaaagaactaaacaaaaacagaaaataaaacaacaaccaaaatattatttgagtcaatttaggttgttatgaaaaagaataaagaaaaacgggaaaaccttcaattttgtccaagctattgtcctcaactgaagcggtttcagactgctcatcgcacgccttgcagtgttcttcatacactatatgaggatacttctcattactaacatcttcccactgatgacaaaaagatatttgttctgtcaatggcagccacatttacttaaaccacatccaaaattatggagagtatattacctttggcaaatcaacattacgccttattgatgaagttctccagcccacaatatctttaaagtcatttattatggacaacaaatttattttttaaaaaaaaaaaaaaacactttagaaaaagaatacttcaatagaactaaattaatatgtaaaaaaggatacggtcatagcccgcatttgaatatgccacccgacgtttaaatacacgcagcgccaacctgcagaaatgacttgaatgtcattccatattttacaaattctgatctgtagcagatcttttctttttttatatagaaacttatacaagataaaacaggggaaacaatagaggttacatacataaatttacaatcatcgtgatcttctatcatgcgtttaagcaaaggggcctttccttcatcattatcagtaaggaaaaggtgtcgccctgttcgcctaaatattaaatgaataacacaacttgctgttttttcaagggcagttaaaccaaatagaaatggcacctgtaagaaaaagcttagttccatattcgaagtaccaaattataaacacagagatgttgtgtaccaaattataagcactaaaaagagagaaagataaagcaaaggatgtataagatgagatgttgctacctggttattacccctagaaccaagatgtggtgtagcagaagtaataaagttcatggcctccaagccaccaatagtaccaaccaaatctctgtcacatatattagtggaggggtcctcttgcaaatttcttatttccgggggtctatatagtttcccgattgcatatcttgccacaagtcctcccactgaatgtgcaacaaatgaaatttttttaaagtttggcttcctttgaatcacttcaaggacctagagttcaaatattcagttagcaagtataaaattcaagctaatgcatcttctacaaaagtaaacagaaatagttaagttgacaagatcaagaatacaataacctcttctgccaagcgtgcacccatcacatccacaccatctagagtcagggtggagacattttttacactacctgcaattatttttcattaataacttgagcacactgtgcaataactcttttaggcttaaaaacaaaaatcaaattgaatgtgattgcttaaaatttgcactaaggccaaaaacaaacttctcaaattttggccagtcaatcccttatgcagtgattgagtagcataatttggtcaaattaaggtaaccatagaaaaatcccgatcaagacaaaacagaagtaatccatgacagagagtaagaaaacaagcagttagagtatagagatatgatcagatatgcccttctgaaggactgtgttatgaaacaataagcaagaaccagaagaagacactgacataaagaataagcccaaaacatatatacagacaaatagctaagaatgcgatataagaatcaggctttacaaataggtaagaatgtaatataagaatcaggatttaggatgatataattgttacaactagaccaagtatcttaatagtcaagactaataatccaatccaactgaaagctccttacaatgaacaaacactttgtcggggagcattttaacaaattgctctgctgcaaatttccaatccgtggcactgcaaaatcaatcattaaccattataaataatcaagacaagtaaataaagtacaaatttttcatttatttatttatttatttattaaaatatgacattatgttctgttctgttctgtttctgatacgaagggagggatgaaaagaaactaatcatccaaaaatcaaatttattctacatttgggacaacaatgaaaataaacaacactaagaaacaggagacacgaattataaatttcataagcctctcctaacatagaacagaaaaactgtagctgtaaattttaatttgctcctcgagaaatagataaaagtcaatcaactataactcacaattccgaaacttttggaaacaaataaatgtttctatttgaactgaatttaacacaccccttttaacctataaaagttgaaaaaccaacttcaaagaaacagctaattttacgttttggagaatccaagcacgaaaataaacgctgaaatatgagtttatttttatttttcaccttagaagcaaagtggattacaatacaacctatggtagtgccaaactagcataatatttgcaaacctacaattctgatcatgtttagacaaacaacaaagaacaaccataattaagcaatcgaaaaaactgcccaaaaaaccaaaacaataagaggaacaatcaaccgggcattcaaatagctcttcaaatagataaaaatgatatcaaattgaaccataagattaataaataaaataaactcattacaagaaaaaaaaatcaaaccttcccaaaattccattgaccatgacgacgagatgatcagcagaatcagaatccttacggctccagacatcgcgacctccatcaacagactcggtagagcaaagtccgtcccgaacgacgccgttctccatgctaactgtggttattcagcctcagttcgcgctcattgaaattagagcgatggagaatcgggaaaaggctaatttcaaaatggtaaagcgaggtttctgtctggagtggtcggttagagtttctcgggaaaattgagaaggaaaaagaaagtgtgtgggaaaacgaagagaagaaagaaaaagaaaggtgagggtgttagctcagcaaactgcaaaagacaccgagttctcatagccaaggaagctaaatatttttaaacagcgtcattattagttacccaactaacaaatatttattatttataaataaaaacaaaagaataaaggtaaatatcgtattttttgttatatataaaaaaatgaataataataatgtaaattattaatttatagggcggtaaagc

SEQ ID NO: 26460 - DNA, 4234 bp, Cannabis sativa
ttttctccatgaaacaaaactacaacaaacagctgtaaaaattcgtaccgaaacagacaagataaggtccactcccctatcagggttctttctgcaaacatcattgatggaagcagcaacactgatgcaaacatttctttcagacttgaactcagtgaaaccttttggaagcaacaccccctatatataaaaaaacatgaaaccccttagaacataaaagtcacaaaaagcaagagaagccaacagcattagttttggtttagtcaagtctactttgtgcctttaaatggtcacaataacagaacattatgcataaacccagaagattgaatcaaaagaaagaaatacgggatgttacttgcaaactcccaaaggcacgatcattcatctcccaggtctgacaaagcaaacgtatggctgttgcatataatgttctgaaaataaattaaaaaaaaactcaaaatcaagtaaattaatgaaattattacaaaagaagaaaaggacaattaaacctacagaatatatttagcaataggggatagattgtaggacatgagaaaataaattgcaaacataaattcaaatggaagtaaatattatggttatcacaatacatacggttttgagtctttctggagcattggcaatatggtttgtactatcagtggtatcatcccagaatgtgatgcaagtgcaggaagcatgcctaaaagttttagctgcagaataaatgaatgagcaaaatactacccttcaaaatcatagagctgagaggaaaaatgaaataaccagtggtagcaccaagtccagaatatagaagagttacttaccaacatattttggctggtatcatccttcttagtgaatatgttattgtaaaataagattgctagcaaaaattgagttcccattttaggatccatgatggatatggcggttaaagaatctacagcaacaccccctaatgatggatgcatcaacaaaacaccagcaatagcagagagaaacaagggcatttctacaaaaacaaataatggggaagattaaatgcaatacaaccaaatcatatcactttcaaagaattaagttgaacaactattcaataattttaggtatatgaatgtggacaaaagaaccaggtattcaaacattttaccagatacaaaaacttcttgagacggagcaagcggtagaatggattttcttctatcaacaatccttaaacaataatgtcttaattgagaaccccaaaatcttggtagatcatgtatttctttgtcatcgatttcaccactggaagaaaatcttaaaaagaaactggatgatgaattgtgatcctgtagcagaacaaaaatattcatttaaacttcaatcataatgaacttcccttattttaatttctcattaaaaaaaacataagtaagaaccgaaataaatagagaaaagaagttctaacttcacgtctgcgagcacaacagtttgataataaaataacaaaacttaatttccaaaaattgacacttgtaaaatattaacattttcgagtgggaggggaaaacctgaaaccactgatgctgcataagtctaaaaatgacagatccaagtgtgctaattgggggcgattccctttccatcgttggtttgcccttagttgatataacaggttctatcaacagtatctctaacatgctaagaaaatcagttgctgctcttttgacaggttttgatggagatgacaacaagctgatgacaggaaatattaacaagagttcctcgcttagaatacatgatgactggccagcaacagattctgtaagaaaatgaggaataaataagctaaatacaatgagaaaaaagacaagggcatcaaagcaaagattctcctcgacagaagtaggaaattgacaagcagaatagatcttacgagaatgaaagagtttgatagtacaagtaattagaagtagcaaaaaaaaaaaaattggcatttacatgagaagcacagcctaaatagaacacagttcagtgcacattagaccataatacttaaattggtaaggtaatctttttttaaaaaaagaaaatttggagaaaagaaggtactttagcggaacataatactctttccagacattcagcaaaattatattcttttcagattttccagttattataagtaaaattgaagtgcagatgtctaaggatagtagcttaccattttcatgtttccatttaaagaggaagtggaggagttttaatactgaaagttgttcatgatcaagctctgactgaataaggataataaatagggataaagtagctgaagataatttgggcatgtattgaaacccaagttctttctgaacagagaataaacgcctggagacctcagttatgggctcaatccaataggagtacctatgacatgaacatacagaaagaagtgtttctaacagttccaaactgcaaagttgagcctcagcaatcagctgccaagaaaggatacaacatttgataaatgaatgaaaacaaaagctcttggaagcttatccataataagtcttatgcttcaaacatggtaatatgagttaagagtaagggaatacaataacacagcacaagatgaaaatgtctccattacaaagttaaacttaccaatccttgtccagccaaatgtctaagcaccacaacatgtgcatccaccaaaagttccatgaaataaatgaaattcctaaaaccctaaaagaagattttaaaaaagaaataaataaattattagcattttaaaaatgaaaagtctatggtaaattaaaccagtccttccttctcctgggaagcaaacaaattaatgctctagtaacaactgcacttacttctgaatttgtgcaaagactatactgaaggcattctgttaacagcttaaagacagaaatggcctcaagagaaaaggagcaacacagagacaccatcgatgatattaaactccgtgcaaacatagaggaagcagaatccgaaaagggtatccttaagattgaataactcaaaaagggtctcaaaaaatcacaaatttcaaccatccccaactgcttgtggtgtgctagcaacagtaaaacctgctgaaccagttcagattgagcctcggatcggcttgagagaacctgccaacataacacaatgcctcaatttccacttaagccaacaacaatcaagcactgactgagctacttgcagtattatgaaacaataattcaaaaggtttaattttggccaactgccaactttggttcggtgcttaagtcaaatataaatcacaatttgtaatcaattcatgaacaaaattcagtatgcatattcaagtgattcgcaatactttaactagcataacaacattatgtacacaaagttcttcttactttaacaaacgggtggttctcagtaggagaattgaatctccatttgaaactgttcttcttaatccctagccgaacaagaaagcccaaccctttcacgaagaggtcaacaaatcgaggctcacatccttcaagagcagactggagctcaagcaacccgcgagaaacatcaatttgagtgtccataacaagacgacataactctctaacggactgatcgacgacagccggcgatgcagagtgtagacactgagaaatagcatctcttccgggctcggaatcagagtccaggtacttgggggcagaccggagcttcgagaagatagtaattacggcaaatttctgaagtgatggttggggaacacgggtcttctccaacaatggagtgtacgagtccatcgacattggagacaaactgaataaaaaaaccagcagagatcagttagttaccaatttgggaaggagaagaaagcagtggcggtaaaagaaaacgacgtcgttcttgaaatttgaacttttttcatttatcagtcatcaaaagtttcaggcctattaatattcgtgtaatatttagataaaaaataaaattacctttaaaaaaaatagaagttggattattttagatttggttttacttgagacgtctataataaatattagttaagtaaataacgagattaatttttttagaataaaaaatgtttactgaaagcaattgagaagaaagaaagaagtagcagtattagctaactatttatagatatttggagtttgaaatttaattcctattccaacatgaaatattaaaatctaaacatttaattgag

SEQ ID NO: 26461 - DNA, 2407 bp, Cannabis sativa
aacaggtgccattctcctcaaaggtaagcatagagaaggtctttacatgctcagtaatggttcagacacatccaaatctccactacagtgtcttcttaccactggtcttgagtcagcaccttgttcttgtgttcctagtctttctacttcttgtaatagcatagctgatgtacctgcttgtactcaaaatgatatcaataaagactcttgttctaatcatgtgcctgcagcctatcttactacaaaactaactgatataaatatatggcatcacaaattaggccatccatctatggacaccctaagcaaattattgcctatattgccccatactggttcccttaagacattacaattttgtagtgcttgtcaacaaggcaagagtcatcgattaccttttccaatatctcacactcgtgctagccaaccccttgaattgattcacaccgatctttggggaccttcacatgtccaatccaaagacggttttaaatactatattcatttcattgatgactatagtccgtttacttggatatttcccatgtccctcaaatcccaagctcttgacatgtttctcaaatttaaagccatggctgagaaacaatttggattacctataaaaggtgttcaagttgatgggggaggtgagtacaagccttttaaaaggttcttgagtgatcaaggcattattttttctcacccgtgtccacacacacatgaacaacatggtagggctgagcgtaaacataggcacattgtagaaattggcctaaccttactagcacaatcgggtcttgacctttcttactggtggcatgcatttcagtatgccaccttcactataaaccgtctgcctactgctattcttcataacagaagtccatttgagtgtttgtttggtcaattacctaactatgatattatgaaaccttttggttgtgctttcccacatctcagaccatatcactctcacaagatgacatttagatctgaacagtgcctttttcttgggtactcttcatatcataagggctatctttgtgaaaatgctcaaggcaggatatacatctccaggaatgtcgttttcaatgaagaatactatccaggagtcatacaatcttctctccaaaaccaggcacatcctactattactcacactatgcctactgctacttttcacactggttttttcactcctactaatacgggtgttgttggttccatggctccattaaatgaggcacctcaatgttctgctcctccaacaaatgccaccaatataattgctcctggagacaatattcctactgtgcaaaatgcacaaggctctcatatcagcaccatgtctcccacaactctcccatctgcctcaaataaccaagtcgtggccactacacctgtcactacagatccatcacctccagcagccactacagatcccattccctcactaaatattctcccagtctctcctcaaaatcccacattacctcctcaaactacctctcttgctgataacacctctatggttcgaactcacccaatgacaactcggtctcaaaatggcatagttaaacctaaagcctatatggctaccaaacatcctttacctcatgccctattaccaactgaacctaaaaccattaaacaggctctccaggatcctaaatggtttgcatcaatgagtgatgaattttcggctttaaaggctgctggcacatggattcttgttccataccaatcgggtatgcaagttatagataataaatgggtgcacagaataaaattaaatgcagatggctcattaaatagattcaagtcacggcttggcaaaaggattcttacaaacccctggcatagactatgaagaaaccttttcccctgttgttaaaccaatcacagtaaggattgtgctttcccttgctgtcactcacaattggccagtcacccaactcgatattagcaatgctttcctaaatggatctctgaatgaagttgtatacatgaaacagcccccaggtttcattagtaaggacaaaccagatcatgtttgcttgcttaaaaaggccatttatggtctcaagcagtcacctcgagcttggaacgatactctaaaacagttcttacttcaatggggtttttctacatctaaggctgacagttctttatttgtttctagttcgggtgctgatcaaatcctattactagtatatgtcgatgatatactagtaacaggcccaaatgtgactgtcattaacaacctcattcgtgacttaaaccataatttttccttgaaaaatttgggtgaagttcactatttcttgggtgttgaaatctatagagatcccactggcatgtacctttcccaaacaaaatatattacagatttgcttgttaaacttca

SEQ ID NO: 26462 - DNA, 2108 bp, Cannabis sativa
tgaactcccagtatcgactaacatgcatttcattcgtacatgggccacatctaatgtgatgacaagtgtgtcatcatgggggtgctctagctcggaggcctccccttggttgaatgatataagtatgtcaggtccctcattaccgattactgccatcgctttcacagagtgaatccggcgagtatgggctaatgatgctcgcaccgaattccaacttaggtccgaccctcccgagattacgttcacaatctttttaatgtatggtgggaggggttgatctcttatcgcatccctgctggacatgtagtgttgaatctgtggctaggcaatcccggaaaaatccttctcttgccagcctattgacctcgatcttcagtggcctacactcataggtagcgtggccatgctccccatgaaaggcgcagtatcggctcttatctcttttgtcagggtcggtgttcattttggtgggccactttgtttccttcattccccgcagctgcctcatcatctcggttaaagtaatggtcatccgaggtaactcctcctcgctccactgagtatttggctgcctagtttgtcccatactcgcaattactgtccctcgggtgtttctttcattagccgagcagttctcagtcctattgtgaggtcgtacagctggcattcaattttttgattcgaataggaacgtatctcccatcgccaacatttcttgagacacatcttcagcgtgtcgtttctcttctacctccagagccacgtacccccgcgctatggttagggcccttgttagggacaggccgggttccactattattgccttttttaacttcgagccatgcagcaatccttgcattagcacttttgtcgccactgaatcagtacacttcgggatgctgacatattcttcactgaacctattaatgaatctctccaaaggttcatcaaatcgctggtgtattaacatcagatctgtatctactttcgcagtccagacacttattgcgaagtttgtctggaaccttaggattaggtcctgatacgagtttactgttccggacagcaagttgtgaaccagcgtagagcgggacctcttaatccctgggtggaggttttgcatttgattgcttccaagtcttccaacaggacagacacggttagcattttctgttcgaattggcatacatattctaaggggtcccctgccccgttatactctggtagctttggggctacataacgtggtggagcctctgtacgtaaaatatgatttccgaaaggtgagagggttgacccctccattcgagcccattcactgtgtattcccatctggctttttgcctccaaggctagtaacttattccacatcatttcttgcagcttttccgtttctctacttgccattgatcgacttccggtaatcatcagctccgtagttcgctttcgcggtgccgtgcgaagtgcctctacttcagttatttcctccacctcgtccctggctctcctttggtaatcttgcggatgtattgaggcctccaacaacgctggatttcccttttccccaggttcttcatgcatgcaccagatgcggttgccagggtggttattgttggcgtggttttctttctcaacagcttctcccacttgatgattgtcggtttcttccgcatgcaaggggccctggtatccttcgagaacaactttcatctgcccattttcactttcgagcctctgaatgtgttccttttggagggcactttccgcaccttgagttttcattttcccttcctgttgctttagcctttccagaatctcccgccatggtgggattgggtgtgatgcatctctgttagcgttgccggtgttcatctgggtttcgtgagtgttttttggatcgtcatgaagaacaagatcttcctgttcattcgccatcttctctccttcttttttggaacttgcctttttacccaacttttctactgtctttttcttttgccttttctactctgagattgattgtcctatgaaaaggttttttctgaaaaagaagaaattttagtttcccacaaatggcgccaaactgttttggtcaagaacagtcatca

SEQ ID NO: 26463 - DNA, 24205 bp, Cannabis sativa
  modified_base (7476)..(7484): a, c, t, g, unknown or other
aatagagttgtaatacatcttgataaaacaaaaaccttaataaaggccataaatcaaaacccaaaagcaagatatataaatatgtatgtatccattccactactgacacaaagtttaaagctcaccttaaagttgttcaacatggcagcaggtccaaaacttcctcgaagctggaaaatcggttgctcttttatgttgggagcattagaaactataaactacaccaaatttatgacaaatcggtgaacatgcatgcactgagaagcagaacatatacctttacaatatatgcttagtcaacgttatcaattttgattggggttatctcatccgcaaccttgaagtgtccaaccaatcgtgcaaagaaaaccatttgttgttccagggtaaactttatgttttcagcctgtgcaaaaatcttgtattagacaatactattcactaaatgaaccataggatgatgccatattataaaaattgtattaccttccgaaaaccatgttgttccccctcgtactccacaagagcaacaggcaaaccctttgccttcaatgcctcgtagattttccgagcttgatcaggaggtacaacctgaaaatcagttagttcccaaaataatcagattatcaccattaaagccagggttcatacaattggtctacaacattcaaatcccaatttcattccgacagtactcttcttaccttatcttccaatccttggaataggattatgggacaagaaaatttatcaacaaagtttattggtgatctctcaaagtaatccttctcacttcctgcaaccagtttgcttttattaaaagagtaaattaaatcaagagaaaataaatgaaccaatgttatcccttgtcttaccaacaagattatctatatagtgagattcaaatttgtgtgtctctgctctcaacaaatttagatctgctacctgttcatatggtgccacaagacagaaatcatatcaagtagtattccatttgatgagaagtgtttgaatttgatgcatagaaaaatacaatacaatccaatactgtgtgatttagctatttccttagacttcagtgatcttggtccaatcttcttttatatttaggtccaaaacccaatcatgtatcggaaaaatattgttccaattataatttgggaatcttccattgtacaagttggataagatatcaaccttgtaatggtacgatgaaagagtccaaaggccagttttcttttaaattcacagccttagatgcagtgaatgaatactcacgtaagtttgtcaccattgattaaccaaaaaactggtagaaacgagatcagagttaaggaacaggcacttacaccatacaaggaagcccccgccttaaatgtgtttttgaatgcaagagcagctaaggtcgtgtagccacctgcagagcccccagtaatacataacctctctccatctacctttccagtattcacctacataaaatagatatatcaacacaacttgagtagacatatccatatttgacgtgtaccaggatcagaaattgtttaccaaatatttagcacagctacaacagtcattgacatcaacaattccccatgtcttcaacagccgttctcgatattctctgccataacctagaaaacaataggagtctctgttaggccaaaataactacaactgaagagacaacatttgtaaagtgatccaatatctaataacacagagacactagaaaaaacaacaaactcttgtcagaaattacagaaaaatataagaacgaaccagtgcttccaccataattaacatcaacaaaagcccatccacgacttgtccaatactgaatattcaaattcaacattgcatgtgattcagctgtgggtcctcctgaaaggaacaagaatgttaactgagtccctacagccataattattggaaaattcatccattcactcgtaacgattggcggaaggcaggagtgcaaaaataagaatgatttattttggtcatttatcaacaccttgaaaaatttcacattaagtatactttgactttgcaatcactaaacaacagttttaccataaaaattgaaagacagtttactgaaaacaagcaaattttcttgacgtgataaaatttacaaattttctgaagtaaaaataataagtaggctcaatattctctaaatttggcaactttgaaacagcaggttattcattagtactatcatcttaaaggactttatccatttatagtgatgttttgaaaatataagtttaatttcgtatgtaaaataatataaactgatagacaatccaaaactttgttcttgaaaagctacaaggacctgctcacacgaatcaattgacttcacaaagtttatcagatcccaggtctacctttccatccactggaacctctgtcccctttttaatttgaaatcacaagttttttttttttgtggcagaattagtgttcatagaagaaatgatctaatctctgacacacagaatatgtcttttatatggtgcatggcaaagttaaacataccatggcttttcaatagaagtggaggcttttcttcctgactatggtaacaaggattagacggcgggtaaaaataggcgtaggcaatttgaccaggaacttctgttggaaattcaataaactcaggtatgctgaaataagactcgtattttaaacaatctggcgatgaggaccaaataatcttgaagtcaactgcttttgacttcggcttatctaacgtcacctgaaaggacagtattcattgctattcaagtagatatttaaggacattattcaagttaatgttgttgctaagcatttgtgcctattcaaagtaaaatgtgatgattatccaattaataagttgactctgcaccttagcaacagatgacgggtaattttcagatgctccctccacatacaagcaatcctttgttgaagtctgaaaggcagccaaaatatatcaaaaaaagaaaagtaccactctgactgaaggtcactaaacgcaataaataaatttaaccagtgacatcgtataaggtatttgacagtacgatgttatctatatcagtgtacggaatatcaagcaaagatatggtgctctgaacttcatccaaaatacccaggtatgacctccctttctgcctgcaagaaaaacataatgtaccgcaagaaaaaaaatgaataaattgctcaaagtgagttacaggcaaaattaagataacatatatataatatataatatacatatacatataagcacaacaatggctaacactgtagagcggctttacatgtcacctgtaggtacaagcaatcaagctttttccttcatcgcctgaaataagctcataagaatttatcccaaaaacccacaaaggtttggaaaattctgcatccaaggaataaacttgtactaccttgttgtcagattcaacctgttgcaaattaagaacatgtaaaataaatcagtcacaaatgtatttgataagctccaaaccagtcatttagaattcagtattggattaaacagctattctagcaacagaaggcgcaaaatattctttttcctgactggattcacagattttcatacagtaaataaagctaattgtcaattttgcgcttcatataccagacaactatcctccataaatgatatttgaagaatttttaagttgcataaaagaggtattgcaatggcaatatgaggacaaaacagagctgctatgccaaggccatgggaaggctcgggtaaggcatgtgaaatccatgactcgagcaacagagaggttcattgaaggctttgagaagatgtcaaggtgtcatgtgttactcgagccatgagaagcctcaaataaggttgaaacattcatgaagtagccgagtcactgcttggtttgggtaaaatgtgagatgtccatgtgttggtcaagcctttgcatggctcgagtggattgttggtcgagttatgttatagctcgaacaaaaggttcaaacgagaagaactactcgagcaattctatggctccaacaaaggctagatgcttagggtgtggctgaggcattacaaggctcgagtaagcttggcaggatgaagaaacaagtcgtgagctatcctatggctcgtgcttcgcaagaaaattgaagatatagccaagctatgcgttggctcggacagagcttgaagaatgaagcattgtcctagctatcctatggcttggacatagcttgaagaatggagcattgtcctagctacctatggctcgaagagagcttgaagtgtgaagcatagtcaagctattgagtggctcaagtaaagaggaagaattgaagatgtacccaagccatcataaggcttggatagaacatggtccgtcaaaaacttgactatggcttgcaaggtacaagatggctcagacagaaggttcaagtacgacacgtcctcaagccaaaatttcgtacaacctaggatgaacttctagaagctggaaataccatcagctgattttctttattttaagaatagtttaagtttataataaatatttgttttatttgtaaatatcttcctaatttgaaggaaggtagttggtggcagatatctacaaatcggttgcacttgttttgtaaatacacttgaactcattgaaaaatcataactcttggagaattataactctagagaaatattgtaagggcctatatggcacatcttatagaaaagctaaaagctgctttttaagcttttaaaaaaactaatagttacttttttaaaaaaaactgtgataaaaaagtatttggtaaacagttaaaaaaaagcttattgaagaatttatggaaaagctacagctaaaagctaaagctggtacaactcaacttttagaaaatattattttgattaaagactataataaattatcttgtacgtaattaaatatttattatatattacaaaaaacaaaaatacttttctgtaacacacacctaaggcttcctagactcttaagtctattttcttcataagtttttcatagaatcctatcagttcttgatctgtaacactcaattctcactattgtaatattgaagagagccataactagaaattacaaagtctaaacttataatctgtgtggtattatctcaagaataaatacaattaaaaagggagtaggccattacccgttcatcaagggggtcgaacttctataaattcttatgttacttttattatttgttattattatttacacgtggtgaaaatctgtaattaataaggctctgctgtcagttgactaaattccaagtcaacattttggtgctttcattgagagctctttttgagtttcttcatctcgttctgatcaatcaccatggttctaaccagaaaaactgcttcttcgaatcctcttcaagatcccatggcggtagatcccaatgttcgtgttcctcccaccacaaaaggtcctcctaattcggctaatactgtcaatccagccaatcctgcgaatcttgttgattctaccattcctccatggctagaacaacccgcaggatctcgtacaaaagagtagaacaacgtggagcaacctgctcataatactaataagaatgcctcgcgagtttatgcagaagaaattaggccaggagttggccaacctgctattgacaaaccttgcttggaccttggggatgatgctgagctggttaggctcagagaagctgtaggccaggtcagtcaaacaaaacaagaagaaacacgctctgttgcgtgcgatgcctttgcctagtagaggcgcgaattcctgaagtggacggatgaccatgaggccaccctccaggcccaccaggcagagctgaactgccataatcaggaggccaacaacctgataaggcaattcaatacgagaacaagcttcaggggcaaggccttgataagagatcccttgctagagagatccacaaacgggatgaccagggcctaccaacaggcagacaatgggcaaacaacccattcaggtccctcgaacagggggccaaactctgtcttgctcgaggacggacaagtcttgcccaacagaccatatggcaggatgaccagcaggttgaaaagattacaacttgcaaaaggttgggcagcctgcctgtagaaggctggatagcttacagcctacagaaggttgggcaacctgcctgtagaaggctggatggcttacagcctgcaaaagacaagtgtaagacagctcatcattaactgcacaaggtagccctgtaaggttcttcaatcctcaaagtgttaagatcacaaggactcaaacaagaagaattgggcaggtctataagaccctggaagctgtacgacaaagttgtatggcaaagctatatggaaaagttgtacggacagggctatacagacatgtcaaacaggcctccaaataagggttggctggccaaggcaaacagacatgccggacagaccctaaaaatagggttggccggccaactcgtgcagacaatctcaaacaggctggccggccaaggaaatctgtctgaccaaggaggtctgtccaaccaaggaaggctagccgaccaaggaggcctgtccgacaaaggaggcctggccgaccaaggaaagctggccgatcaaggacagttgtccgaacaagaggccaccagaacagatccctctgtataagcatagctggatcaactcaaagtcatgatcaaaggtctttccggcccgaagttgtccgacctaaaactggacaggtctaggggataacccattacgacatatgtcaatgtgttgcccctacctaagttcaaaatgccagcttggaagatgtacaccgagacagaagatcccctgccgtacataaaatactttgagatccagacagatctccaaaaagtaattggagatgtgcgatgcaggatcttcccgacaaccttgtctgaaatagaatgcaagtgtgtttgtgagatttttgaagacctttataatgtaacattgaagtttagtgaatctacttatgtaactgtaaataagtacttcatcaagatatgcaatattcaccaagagttggtcgattcttcagttgatgaagatgaggatgagttgttgaggaacatggcacataacatgaaatccaagtatgacaagtattgggggaagcttgatgattgcaattaggcacttctaattgccttggttcatgaccctagatgcaaacttgattatctctgtcattgttttagctttactcacacggagttagaatgcaaagagatggtgaaaggggtggaacaaacgatttggagaatgtttaatcaatataatgattctgcatcaagtattgatccctcaatcactcaatcacaagttcagcctattgatgatggtggttcttcctcattcatcgtttctagtcgacctaaaggcaagannnnnnnnnatgtccatgatgagttcgtggcacgaagaatggagaaaaatggcagcaaaatgaaaaatgaacttgataagtattttgaagaggaagctgagcaaccaactcaacaatttgatattttaagatggtgggctagtagtgggtgcaaatacaagatattgtcactcatggcacgtgatgtgctagctataccggttcccactgttgcttctgaggcggcattctctgctgggggtcagactttggatccttttaggagttcacttagcccaaggatgattgaagcattaatttgtctcaagaattggtggagcggatcacatcaacccactgttgtgcgagagtacatagatgaagaagaaatgctttaaacacaagcattgctcgaagatagtaattttagtttgttatattttattttgatttccataattcaagtctaatatcataatatttattttacatatgcatatttattatctaactagattatacttttgatattttatagagattctcaatgacaatactatagacactctttctactccttcaacctcaataactcaacaacaagacacgaccttggattgaaaatgtttattattatactttattacatttaatttattgattttatttgctaatttatctttcttttttttatttcaagaaaaacattgaaaggtttggacttggaggactttagagtttgttgaattggacaatggacattaaaaaggaagaaacgatagatttaggttacaccaagcaaagcaaaggaaacacagagagaagaacacaatatacacaagggaagtatgtacttttgaatagttatattctaagctttagtttacactttagatatgaacatggattattgatacttttggttttgaagtttgaatagttatgttttggacttggagactttttgatatgattcatatggatatagattagatttggaattttggatgattgatatttgacaccttgttgatcaatagctatattttgaactttgagatttttttttatatggtccatattgtatagattggatatggattagatttggattgttaatacttttttgattaatagctatattttagactttgacactttttttgatatgatccataattccatattgtatagatgggatatggagtagattaaaatttggattattaatatttttttattaatagctatattttggattttgggacttttttttttatatggtccatacatattgtagattagatacggattagacttttttcttttttgtgggtttatgattggtatctattattgtgttgtttattttgaatatttaaattggtaaataattgtgaataatgaatgattatttagacaggtagtttaagttttttatgaattgaatgtcattttcttaactgggtatgaaccaaattcactatttaggcccaaaaaatgttaattataaaaaaaagcccaaaaaatgttaaaaataaaaaaagatggcatttttaaaaattaaatttcatttgagcccagaaatgaaacattcggactcagcccaataaaacccgaacccgaccacgttaaacccgccatacccgaccacccgaaaactgggttcggttgtgcatttccaacacctgaaatccaaaaactcgaatccgaccacccgaaaatccgacccgtttgcagacccaaggtaccagtccaagactcgatcttgctcatctaaaagtcatacattatgcatcttaaagttatcaagtgaattataatgtaaaaatactactataaaaggttaaaatcaaaaagtttctaaaagcttcaaaaagcttgaaactcatcaatgtcagattcaaagagagagggaaatttcgaagaagagaaaatgaggagagtaaaaggcatacatgggagagagaagatcaaaggtttagaagcgcgtccttcgaagagtccaatacctggccagacaaggctacccagtaaaggctctcctacagtcaaagcaagagctgagaagtctctatccgtacagacgtctaaacagggacatggggagcaaatgttattccaacttttgcgcatctgacgtggcttgtccacatagtcaaagcagaagataggtggcatacaacgtgtcaagaaccgggcaagattgtcctgaacagtctatcaattggcaaggttccaagactgtcaagcaagaataagcaaaagaaattaggcaagccatcaagactctggccgaccatggctggccggccaacggaagcttgtgtgccagccaacccttgagagcaagctggccggccagggaaggctggtcagccaagctgaacaggaaagttgtatggaaagggctggtcggcctagctgaacaggaaaattgtatggaaaaggttggtcggaccatacctggccggccaataggtcacatgccagctaggaccctaaaaatagagttggtcgacgaactcgtgcagacagccccgaacaggctgaacaaattgcaaggtccaccacgagtcttctagaagattctcaagccaaactacaatgtcgggacaagtttaacaacccttgaagatagggatattccctcaagatattagtcctatatttagtaatttaactacctatttttgtaatttaaatataagataaaaagatgttattttctctattttaaagggagatctttacttatttgaattaagatcttttgtaagccttacactatataaagggtattagatcacatgaaaagaggactaaatctaagccacacgcccaaagctctctctctctctctaaacctccacacgcacctaaggcttcctagactctaagtctattttattcataagttcttcatagaatcctacgagttcttgatctgtaacactcaattctcactattgtaatattgaagagagccataactagatattacaaagtctaaacttataatctgcatggtattatctcaagaataaatacaactaaaaggagggtaggtcataacccgttcatcaagggggccgaaccactaaattcctgtgttacttttattatttattattaatatttacacgtggtgaaaaatcaacaattaataaaactgttgtcagttgactaaattctgagtcaacaaatttcttatattttattttgttttaaaaaatatttaatatatatttatatttttattattaacacaccacatcaacttagaattttttataaactacaatttttttttacaagtgataaaaatataataaattatttttatcaaaaacatataaatttatattatgggaaaaaataattaaaaatttatatagcataattttttatatatttatgattataataaataagattataactttattgttattataatataatcttaccaactcacaacacttcaaaatttataatttaccaaacactcagattagtttttttctacagttctactacagctactttttcacatagtacagttgtgccaaactggcccctaagtgttatgggattactaaaaatgactaagtggaagtaggttatcttttttgggctgaactactataaacttgtgtttatcattcttttcatctcattcagtttgttaaaacctatttattagatcagttgacgaaaaaccgcatcaacaactctaataaaaaattcgaaccctttgatctgaaaaagaaacaaaagcctttattattagatggaaggcatacaagaaaacctagtacagttttttcaacatacagaggaaactcgagagatatatttagagtgaaagttgcccgacatttgggtaggtagagaagtatgcatagagtcgttgggcatcaataaaaaataattacaaaccactataatatcaataatatactctccacctaactgtaaaccaatagcaactgttatgtaagcatcaaagaggtacccgaacctcataatatagaatcactataaatttcttgtgaacagatatacatatatgcacacatatccataattttccaacctcttagtgaactctacattctaccatgttaaaagtgatttgcattttcccccttcatatatacatacaatataatagtatgttgtcactgtattttttaggcccgagagagtcaacgggtgtatatttttgtttgaaaacaaagtcaaataaacaaaattgtaaaatcactatttgctataaaatatggctataaggaacattaaattcaaatattgaacttacccatttaaaaatattccaaaatccactttttctatctgtaataaaaaatagttcccctgcacatattcaaacataatgaattaaaacatgaacaccttagcaaacagctacctagaaaaaatattggaactgcttagtgaattgcatactgtgtagtacaaataacatagaacttaaaacaaacacatgagaataaatagagcagaaggaagaagcaagcgtattaggttgtacagcaagtaatagcataactaagaatttgggaaacgttaaagaaagatatataaccatatacatgtaagttgtctctttgttactatgtccaaaaatctatttctcaatcaaggaaaacaatacataccagaagaagaccactttggttcagttggagactctacaattgtaggatctgacccagcaatacaaatgcgcttgtagatctctctgcatgaaatatcaatgttattatgtttaagtgtgaaaagaaaaaaaaaaaccatagaggagacattatcaaggataaatgtagatgcatgtgtaaataaaattcaaacgaaaaacaacaaaaccaatacacatgccatataacaagtagacataattacttatcaaaccgcagtaaggcaattaataatgtttatgaccatataacctcaaaaaggacacaaacaatgaagcactatgtggctgcaaaaaatgaaatttccttaccctttttcagaaatatacccaacccagagttctgttttatcccatggcatgttaggatgactccactcaatccatgcaattcgctcacctttctggtccaatcgagggaaggcataaaaatcatttccaccaaccagtactcttggttctgaatatcatacaaaactacaatcagaaaatgactattttcttcataaccacataattatcagaaaaagactaccaaatacacaacagctataccgttcgaatttaggtacctgttacaccactgccactgccacttaaagtgtattctagaagaaataaaaacaaaagaaactaagtgtaactgctgatgtggcaactctagtcaaagcaagtgtttagtttggggtcaattttagtgggctgggtataaatagaaagtctgattcttttatttggctagggaaaaattgtacagcgtaaataatactctagggaaatacctggctgtctcgaaaagttaggaaagagattatgtaattgtctttcattcatcaataataccagattttcttcttctactctatggcttggctatttttgatttaagcttacaagaaggtgattgtgtatacatcaaattagaatcagagcaggagagtcatggcacccaccaagaaagctgcgaagaacgatcaagaacgcacagaggagttgctggagacggaggaacatgttgacgccaaaatcgaatctgtcaaggatgaaatgcgacagtttaaggaggagatcacagccatgcttggaaaattattaaataagcaagctgatgaaagtgggtcgaaccagaataaagagcccattacggaacatccccattcaagaactccagaaaaatctagaaaatgggctcaacaaccagccatgggattttcaacggtgccagacgtgggaaataccagctctgcttacgagcttcgacgggacttgtcgcttacggcgactaaaattactcatctttgatggtaccgaccctgacgggtggttgctccgagctgacaagtacttcaccctccaacaattcagtaatgaggagatgttggaagcagctgcaatcagtttcgaagggaaggcgcttacttggtaccggtgggagttgcagcgccatccgatcgtcttgtgggaagacctaaggttgctggtcttgaataaacttcgcaacaccttcaagggttcactccacgaacagttttgcgagttccgcaagaaggttccgtggaagaatattgtgaaggttttttggaactgcttgcacccttagatgatgtctccgaggtggtggcgctcagccaattcttgactgcgttaaaaaagaatattaaggaagagttgaggttatttgaacccaatactttgaacaaggccatggattttgctgctaagatagagagcaagaacaattctttatttggttctcactcaaattggagccatttcaaagggccaggcagcaatggggataggaggggaacaaacctttctaataaagatcagaaacccattggccaatttcggcggttgactgattccgaggtgcaagaaaaacgacgaaagggcatttgttaccgctgtgataacaaatgggctccgggaaatcgttgtgctaggaaggaattgagtgtggtaatcacttgtaataaggacgaagaaccaggactgaaggatgaattggccctagacaaagctgagattacaaaaacagtggaagtctcgctaaatttagcaacaggaatagcaacccacgcactatgaaaattcaaggagtggtagggaatcatggagttacggtacttatcgattctggggctgccacaacttcatttcaaaagaatcaatagaaaagaacaagttgccgttaactaaaacaggggagtatggagtgactttgggatcgggaaaatcgattaagagtgaaggagtttgtaaggaagtagtgatggaactacaagggctgaccatcattgatgattttttaccttttggattagggagcacagatgtgatcttgggtatacaatggctggcaaccttgggcaacactcacgtcgattggaagcatcagattttgaagttcaaagtgggggaacaacccataagcataaaaggggattgtgtgggaaagagtccggtaaatttaaaaacagtgttgagaacgtagcacaaataacccaccaagcggttggaagaatgtaatttagccaccacggagactaatcctgtttttttaaacaatgttttgagcaattacaaagctgtttttcgaactcccaaaggtctaccaccttctcgaggaagggaacatgctataaaccttaaggaaggtacccaaccgattagggcgaggccttatcattacccacagttccagaaaacagaaatagaaaagccaattgctgagatgttacaagttggaatcattcaggacagccaaagccctttctcaagtccagtgttcttggttaagaaaaaagatgagacttggcggctatgtgtagactatagagcactcaatatagctactattctggataagtttcctataccaatcatagatgagttgcttgatgaacttcatggagcacaagtgttttctaagcttgatctcaaatcggggtatcaccaaatacgggtcaaggcaaaggatgtgccaaagacagcttttaggacgcataacgagccatatgaatttttagttatgccatttggtttaactaatgcccctgccacatttcagtctttaatgaatgacactttccgcccttatccaggaaagaatgtactggtctaattcgatgatatcttggtttacagtactagtgaagaggagcatcaagaacatcttagcattgtcttaaatgtgcttcaacaacacaagttctttgccaaccgaaagaaatgcaagtttgggcagcgacaattgggttatttaagccacatcatctcaggacaaggggtaacaactgacccaactaagatagcagcaatgaagaattgggctgtaaaatattagagagcttcggggattttggggattgacaggctatttctgcaaatttgttgctgggtatgctcacaccgcttggcctcttacggaacaactcaaaaaaaataactttgggtggattgaggaagctgaaaaggcctttcacaaactaaaggaggctatgtgtttagttccagttctggctatgcccgacttctcaaaaccattcatagttgaaacggatgcttagagatatggtcttggattaattttcatgcaagaaaatcgaccaatagtttattttagccatacattggggccaaggggttgtctcaagtctatttacgaaaaggaattaatggccattatttttgttgtaagtggaggccatatttgttgggtcgaagattcattgttcgcactgatcaacaaagtctaaaatttctgcttgaacaacgattcattggcagtgagtaccaacggtggatagcaaaactcatgacatatgagttcgatattttttacaaaccaagagctagcaacaaggtggctgatgctttgtcccaaaaaccagcagcaacagaactcaatgacattaatcttccacaatggcagcattgggaaaaattacaagaagaagtccaacaagatcccttcctcaagggcatcaagcaagacattcaacaaggaaaaaaaccatttggattcaccctccaacaagacattgtgctctataaagggcgaattgtgattcccaaggactccactctaatacacactattttggaagaatttcacaactctctaatgggaggccattcgggagaagtgaaaacttatcaaaggttaaaatcaaaggtgtattggacaggcatgcgaaaagatatgctgaaatttgtaagtaaatatccaacttgccaaagaacaaatatgcagccacaaacccgctgatttggttcaacccatcactttgccggcccgagtttgggacaaaatatccatggatttcactgaggggttacctaagtctgatgggcgggacaccatcatgctggtggtggataaattaagcaaatatgcccattttataccactgaaacatccttttacagcagccataatagctcaaacctttttgaaggaggtcatgcgacttcacgggctgccaatgtccatcatctcagatcgggatcgaatttttaccaatcatttttggagtgagttgtacaaatggcaaggtactcacttaaagcacggcctaccacccacaaattgatggccaaacagaagtggtgaatcgaactttagaaacgtatcttcgatgttttgcaaacgagaagccacgacaatgggccaagtggatagcatgggcagaatactggtacaatacaaccactcattcagccaccaaaacatccccctttactgccttatatagtcgagaaccccctcctttgattcgttatccagctcaattgtcgcaagtttcggcaattgatacattgttggctgatcgtgatgctatcttagatgacctccacatgcatcttttgcgcgcccagcagagaatgaagttccaagctgaccaacaccgccatcatgaagagtttaaagagggtgacttagtatacctcaagttacaaccatacaaacagcaatcggtggctaagagacgatttgaaaagctctcggctaggtactacggaccttttaaagtgctagcaagagttggagccgctgcttataagctcgagttgccacccacctccactatccacccggtttttcacatttctcaattgaagcgagctcttggcacagcattgtcctctccttctctatcacccatgacgcctgatttggaagttcccatggaaccagagagtgtgctccaagttaggtagcaatctctcaacaacgacaaagatttggaagttctcattaaatggaagtccgtcccataatttgaagccagttggggagagttttgctgaattcaatatgaagtttccaaatttccaccttgaggacaaggtgagagttacaccaccaccactaccacgtaaagtgtattctagaagaaataaaaacaaaagaaactaagtgtacatataactgttgatgtggcaaccctagtcaaagcaagtgtttagtttggggtcaatttagtgggctgggtataaatagaaagtctgattcttttatttggctagggaaaaaattgtacagggtaaataatactctagggagatacctggctgtctcgaaaagctaggaaagagattttgtaattgtctttcattcatcaataataccagattttcttcaactactctatgggctatttttgatttgaacttacaggaaggtgattgtgtatgcattagtaacctttgacaaataaaaaaacattttgacaaatatacaatatacacattgagagaaagttggtaacatttcagcttgacatttctcaccttgaatatcatcacttccaagactaactgtcacgatatctgtggttgcatttgcgctacttagacgacgatctacagaaaacaaaaaaggaacctttattgtaacaaataattaaaaaaatcaaaaagaccaagaaaaaggagaagctacgaacgtaccttcccggacagtgacataacgactaaatcgtgaatcaaatactccatctgcataactgattactggtccaccgtaatccggggtgagtggtttgggtatagaatctgtttgtcacagattgcataatgttagcaggtttctatgatactttcaagaaaaatcagattaaaaaatgtcacaaattgctacagtatatttacaataagctcaaaatatacatgtactttagaaatgtgacaggtactaccataaaaaggaaacataaacaggaacatgtatcataaggtttgcaaaaaagaattgtatgatcaaacttcaaatacaacaaagcatatgaccgtaattgaaacattgaaagagataacagaaccgaacgtcaactatgaagaatcactgaatggaatgtgaaaagcagctagaacatgaacctttggaatttaaaaactgtttgtacagtctttgatccttgtaattagagaaaataactgtatctccagaaaccgaaaaagccccaccgccatattcctgggccaccgttcgtaccgcaaaatccttcggcgtaatatcaacaggttcttcccctgctttctccgcttctcttacaagaaccgcacgcctgtttacaacacaaataccaattgttttcaaactttttgtagtcagataaaaaaaaccccaattttctattcacggaatacaggcattacatatgcatataagtatttatatacgtaaggaaggatttaggtaccctgcttcagcggggcgggattctagccagacaaggcggccatgagagtcaacggaagtaccaccaagccgcttagaggcaccggcgacgacatcggcggtgatgggggagctccaagagccgtagggagcagtgattttctcttggttggctgaaacttctttattaagtgctgctgaagtagtagccattgtcttagagcggtgaaactggtagtgttgcttggtgggtattatctggttgagtcttggggtaataagtttgaggtagagagaagaagatgagaaggaatatgcagaaagtggagcagagaaacgagatatacccaggatgcaggctgagagagccattttactgaatattaaattttactaacttaaatgtcaaaaacaccccaatccattttttttaatccgatttaattagtaataattataaggtttatttgtgtcctagttcttaaattatataagttttgtcaaattggtccttaaattataaaagtttttagaaactgatccttaaataaaatatgttggtattttatatatttatttattttattttgtattaattttatatatttttatattaatgtaccttatcaaattaataaaacacatattttttagtaaaaaaattacatagaaaataaaaaaaattcaaaaatattatctctatgctatcaaaaaaaaatattacccatatacctacacggctactcctacatttttacttttaatattgttatatttacactaataccttttacacgagtatgatgttattataccacattcacacactatctattttcccttcttttcttttatcttttttcctttatttcagttttcattgtagctttctgtttgaaaacttcttccacaatcaaaactattttgattaaaaaaagaactgattttgtctatcttactcaactgccttcctccatcatatgaccacgtttttttcaatttttttcttcttttttctattctataaatggtcattacttggttttcatcttctccatcaccattgttgaaaaagccttcaaaaacggctgttaaatatcttgtaaacaaatctaaaggcaaacgacccattattgaagatgatgattcagactttgctcagcctactaaaaaaagtgatcatcgccctgtgaagaagaaatcaatggttaatgttgctgaaaacatttctctccctgaagttaagaataggaagaaacaaactgatgagagtccaaaggtttctttctagtttctttatcattttgctctaacattgccctattttttcttagtttctttaggaggtaaaaatcatatttattctatttttaaatatctctaaggatcataagtttttttttttcttttctaaaagtactgattattttttatttttttaataactgattaattgtaccatcaagtgtgtgatgtagttggctggatgctttgcataaacttcctcatttggttatctttcagagttcgagtccctatggtaacacttatcttgggccttaaaattgtgctattttagtaataagaaacttttgaagattcaacagaatatttaatgtaataaaaaaagttttagaacctcacattaatatgtcaaatatgatgttgataatgctttatgtttctgttaatattttggatatgacatacaaccttaaacaactgttgtgcaactaatgagttgctcattgcaaagaaggagatgttgttggttgttgttgtgttgctgaccatgttcacacacaatggataccttgtgaagtaaggttctttcaattttagttgtatgtagaaaaataggcttagatagtcatttatcctcaacggttggtatccttctttcacttgatattcagttgtagttgagtgttttttttttggttgcattccagcacttatttcagcttgtgtactagttcttcatatttgtaatctattgaaatgtattggccagtagcttcataatttacataatttgttcattgatcaaactgtccatcgcaaaatatgagaaacggaattgtatctttttcttaacaattttaaaattttaagtattgtaagtcaactatgggataactgtcataaaactgtaatgcaacagttatatttgttgttaggcaactaatattaaatcttaaaacaactaataaagcccttatgtaatacaaacataacttaccacaatcgagttttctctaaacaagtcgtgcattgttaatttcgagtcttatttttttaaataataatattgtagtagcacaactattatttaactaataaataaattaattgtaattagaaatataaaatttgaatgggcatcatcatgaaaaaattgtcagtgtttttttgtcactgatcaacaatcaattgtaccttaataatattatgtggagaaataactgttagaattctataaaccaactttataacaaccaaatgaatgcattaataaaactaaccttgttataattttttttaaagagttttgtattagattgtcgatatgaaatacctacaaatatcataaaaataattttatcattatcagtttgtaatcattgatatgtctagtttcagagcgttagtaaaattttaatgccactacaatgtaactacggagaaacttaaaatctagaataatgtttctatgtacgtggctttagatgaattcaaattttctttgttattcgtgatttgatatgaataaatctaccattgaaaatatagaaaataacattaatggaatgggagaaatattagctagtgtattgatacatttatttttagtttatacctgatttagattgatcaagaactccatatctatttcagacatatctacattttatgaattgaaagttgatattacgtatctaattttgccctatgatatgacagctgaatggatgacatgtgtctcacatttgataacctggtggatggttctatgcctagcaggccacacaggttgatatgaagctcaaagtcatacgtacatagcaggatgcccgagtaaagtcgttgatggacatctaactagcacgatcgcgtgattaactcgcatacaccgaccagggggtgcgagttggtaatttcataaatagacatcgtagtttccaagcttgcatgtcacgaagataatccctacatttgtgggattagctcgtatatttagggaatgaaggcaataagcctatatttcccaatttctttattgtaattatggaaacatgctagtttcctagtttatttcttatagatttaagggaaaccaatcctatgtaattagctcctataaatagtggtctcatctcactattcaaggacatgaattaatttagaaagaaaatactcaagagagaaatttcgatctaagagtgaattaatcagagatctttgtaaaagctttcgagagaaatcaaggtcttcttgtttctctactcacaagtcaatccaacaaaaaggggagtaggctattaccagtatcacggggtcaaacttctataaattctagtattttctttacttattactctttgctttctattgtttctttattcttattgctttaattaagactcattgtcgttggctaaaagtgaggtaaatattttggtgctttcacggagagcaaggacacccaaattttttgtcttaagtcttttacaggacacaggatggttgtaacacgaagggggaatcaaagtaatacagtcgatccaatggtgacagatccgaacgtccagacacccggaaatgcaagggatccaccagggacagccctcagacaagttaatactcaaccaccaacaacaggccatagagtgacttttcctctagctgggttcactctaggtgtgcaagagactggaaacactagtacgacagccgagcacaccacacctggaactagaatcccatccacttcaaatactcaaaggtcgatcgagatgatattgaaatatagaatttgagagatgcattggggttgatgcaaggccacagtaacactttcaccatgaccagcaagatatctgagcatctataaatcttgcttttgatgaacaaagacgctagtttgacgagtggaaggattgagagatggagatcatgagagcctagcaagcgaccattgacaaccgttccaggcaggccaccatactgatctgaagagcttattagatcaccagccaacagccagtgactagcgctagcattcccatggggtcgcagaacgggtcaaaagagtatttaactgatcacaccccataaactcatgttggtggaccgtccaatccaaggccacaggttcaaactgtgggccaagtggtagacgggaagattttaccagactgtcccctgggaaggaatgaccaacttaatacccatactcagaaggagatatcaggccaaccctttatacaaaatggtcagacataggggcccctcggcacatcattatttgaccgactgggtaccgtgcacgacctcaaaaatgactgaatcgtaggagaggattagatagacaaaatgttcctcctaccgtccatccaaataatgcaaacaactatgtccctagtctcattcatagagatcctaatgtgacacacgccaatcaacaagtaggtcaagttgatcaattagtgcaatcataaatagatcatcttaagagcctcatacaaggcctgaccgacccaaaactcacagagatcttgaacttgataggactagaggatcacaaatctaacaagagatcaatgctctcgacctactgcccaagtttaaaatgccaacatgaaaaatgtatataggcaaagaagatcctttatcttaccttaaatatttttgagatgtaaatagacttacaagcgatgagaggtgatgtacggtgcagaatcttccaagctactttggcagaggccgcccaacaatgatacttcatattagctccaaggatgttcaattcatggaattcctttacatctgagtttcgtccatagttttcctcttctcgataacttccatctcatttagaagacctggtagaagtgaagcaaatatcattagaacctttaaaggcttacactagtaggttcacgactgaagcaacaaaggtcaaaggactgaccgaggaaggaaggctggccacaatcctaggaggtatcgaacccctaggagaattatggaacactactagaaaattgggttttagtgacacacattgagtaactctaaaagtgtatagtgacacttcaacgcgcgtcactaatgagg

SEQ ID NO: 26464 - DNA, 2691 bp, Cannabis sativa
  modified_base (1002)..(1003): a, c, t, g, unknown or other
  modified_base (1945)..(1970): a, c, t, g, unknown or other
acaaataatatatttaagaaaaatctttattttaaatctattttatttttattttgaattatattacattattattttaatttttatgggcacccaatgaatttttatatattaataagaatttttctattcaacccgttagaaattaagcggcgcgaacataggaatgaaggacataaattgtgaggatggagtttggaggtgcactccattattacctattcaatttctatcccaactattaattttatgtgttatcttgcttttaaaaagagtacttatccttctttttttttcctgaatggagatttgttatataccttttagccgaaacaataaaatataaaaatgatataaatataatgatgatgttaaatattatcacgtgcttattatattcatacatatgtacaaaaacggtgggtgactttgatcatatatatagtgatggttttcaaatagtaaaagattccgttttaaaaaaaataataacaataataataaaagattcgtttgcaaaaagttgataattaaagaaaaaatttcacctaaatattttagtttaattttaaatgataataatatttaagaatttttttatttttacacttaaaaataattttttttagtatttttacaaaattctacatagaaattcctattgcaactagcgctgcaacctaaattataacaaaaaatcgtatagaaactcctattgcaactagtgctgcaaccattttagaaacccaaaccgtaaatttaaaaaaaaaataaaaaaaaaaaatagtggatgagataattcctctaatatttaaatatatttataaaacttctacatgtacataaatattaaggtgtggtttggttagaggtgatgaaatggaatagaattaaaaagaaataattttcatctcatttctttgtttggttgtatattaaagtattagaataatgtcatttcaatggaatgacttgtaagaattctttatcactcattaaatnngtaatatcatgatttaattctatagataaacattttacatactattataagtatgaaaaacataaatctaaagaatacctttgttgattcaaagagaaaaggccaaatagcggaagcatacattaatccatagatagtgatgatcttaatccatcttgtagagatgatctttgtgatgattttgggtaatgatcttccaagaaaacaagacttggggttttttaattttccctcttgatggcagaagatgagaatagaaattggttcctgtttcttgggactactaccaatttataacctcatagttaggttattaattttaagtatttctaatttagtccctcaataaattagaaatattgcttagggtatctacacatttagtgcatgacactttaatacctaataaccaattactaaaatgatcactttattttgggccaaacttcaaatagcaagacactaattatgagccgtattgaggattttaatccaaaatgactatttcattttgaaatggaaggaaagaccattctaatgcatgatgagaaaaaatttaataattttttttatcaatttttgtacacattttaaattttatttcattcctattcttattttcattcccctttatattattatgttttcattcctctcaaccaaacgtcacttaagtattaagtcaatagtcacataataattcgtaattagtttagattattaatttttatttaaaaatttattaaaatatactaataaaaaaataacacttgaatattaacttgacgctcaattgtaaattaatatttacaaaagttttataaatataatttatgtattattactgtacaaaatttaactcaaaaattaaatttaaatgtttacgttataaattatcctcaacttaataatagtgatcattacataataataataataatnnnnnnnnnnnnnnnnnnnnnnnnnntaataataataatgatgatgatcatgtgcaaccaaaagcttattcaaaaaaaaaaaaaaaaaaaacctatataccacagctttccgcaaagaatgagttatctaaccggaacttacaataagcgacttataattacgttcccattgctttttttattagttcataatatttgtttgcttttttatatttttccagggttagaaattaaagaggcaatatctttacaacccaataaattatacatgcccctcaatattaaaaaaaaaaaccttcaataaaaattttctttcacattacatactttttgttaattttaataatttattttaattttatatttatatattttgaataattaattttttaattttaattttaataagatttcatatatatttttttatcttgtaacttaaaatatatatttcttgaaatagtttcagaatgttaatatatgtggtaactaaatactattattacctgcatttctaaagaggtgatatgtgacccctcgcgaaggcccactagagtacttgatccatcaactggcccaagtgaatggacaagacgacccatctcctgaatagacatgaatccggacaacatgtctagagatgatctggatctttcgagttttttgatggataattcaactttaattaaatactaaggacataagtaaaattgggaatccaacatagatgctgttgggttttatgcc

SEQ ID NO: 26465 - DNA, 1993 bp, Cannabis sativa
aaaaaaaaaaaaaaagacaaaataacacaccaaatactaaaattatcccttaaaatattacaaatatttatactaagaatactatagtatcttaataaataattttctttccatcctcccacttttatttttaataccaaacaatacaaggaagagtcactaaccaattacgtaacagttctgatactctccttcaagataaagtgtagagatattcataacactcattttggacgataaaaacttgaattgtgtatgaaaaagagccttagtcattatgtttgcaatgttgtgccgagatggaacatgtgaaagctttattcgattcttggtgacttgttttcggataatatgacaatctatgtcgatatgctttgtgcgttcatgaaagacaacattctcgaatatgtgtattgcggcttggttgtcatagtaaagaagagtaggttgggagtgttggattccaaaatcatagaggatgttgagaagccaaataagttcgcagttggtgttaactaaggatcgatactcagcttcagtagatgatttatatacagtggtttgctttttagattttcatgatatgagggattggccaatgaatatgtagtaactagtaattgatcgctttgtatcagggcaagttccccaatctacatcagagaaggctttaagatagaaagtttggtttgtggggaactgagttgggttatttgagtgaaaaaatagaccatgtccaagagtgcccttgagatattgaaggatgcgatatccagccttcatatgcggttgtcgatggtcactaaggaattggctaagtcgattgactgcataggagatatcaagtcgtgttattgtccaaaaaaggaacttgcaatgaggcttctgtatgaagttgagtctaaaatagggggtcccacatctttgttgaggtgtagatttgtttccattggtgtgtagacaatcttagagcctaatagaccagtttcagttagcacttgtaaagtgaaaggtctttgagaaactaatatacctgtgttagatcaaccaatctcatctccaagaaaaaactgtaaggcaccaagatcctttagttgaaatttagaattaagaaaggttttaaaagaagtagcatctagattatttgtgcttgcaatgactatatcatcgacattgaccaatagagcaagaaaactagtggaagatgaacttatgaataaggagtgagcataagcaaattgagaaaagccatgctcaagtaaggttctgctcaattttgtaaatcattgcctagatgcttgtttaaggccgtagaggcttttatgaagtttgcaaactgggtttagaggaagctcccccacatgtacatatcctttatgaagagacatataaacttgttcattgagttctccatgcaagaaagcattatcaatgtccatttcgtaaagtgactagttgttaatagcagctagaataaggaaaaattttagggcgttagtgcaaaattttcaacatagttaacaccatgttgttatgtatatccttttactaccaaccatgccttgtgttaataccatattgttatgtgtacccttttactaccaaccatgccttgtatatgtcaacttcacttttggaattatattttattttatatacctatttgtttccaattggatgaaagccaactggtaaagaaacaactgttcaagttttgttttttttttaagggcaaagaattctttattcatggcattaagtcattgagtcaattagatatgcatgtagaatagcatttcaaaaagaggttttaaacttgtcatagctgagatattcaacaagagaatgggcagtagaagtatggcaaacatagtccttaaggtggctaggtttgcaaatttgtctccctgctttggttattggaggagaaattgttggtgattgtactatagctgtagggactatgttattgagatcaactgctaattgtgtt

SEQ ID NO: 26466 - DNA, 1432 bp, Cannabis sativa
tctaagatcctggtaaaaattaattccaacactacagttatcccaaattttgtccacctgatgtggcatgtctacgtaagccaaaaaagagtacatgtggaacacaaccttcctaatagcaagacagggtctccatgcaaggtatggcaaaaccgtcaagcagtaactaaaaagggtgaagcgagcaatcaatgagctataccaacatgtctgcccagccaagagaagcctataggccgaccagggtgagcttgtatggcttgccaggatttgagcacaagctagccgaccaaaaggtaactttcaaatcaaaggagcttccgttcgaccaagagagcctgacctctacaagaaaaaagtgtacaaaactggcctccacttgccaaaggctagcctccacctctaaaggctggcctcctcatggtaaggctgacaagaacatgacatgacctgctagatcttggcaagagcatggccggctagacctcaacctgcagaacctgtatgactggccaacctcatcctctaagtgcatggccggccagcttcaccttgacaggacattgatgcgcatccttcacccgtgaacagcaagccaagatacgaattgggccttgacaacccactatgatgctacgaaaatatctactttcaagaggcaattgtgtcatttgtattcattaatttaattaaatatctaagattttatctactcatatggtttatgttctcctatataaagggccttaactcaaccctagagacttaagtcactctaagtctcactgaaacctctaagtatgaaaccctagtctctctccccccctttctctctcttgtacacgcccaagtggctctctcttcttctctctttctcacaagcctccaaggcttcatctctctcccattagagatctccctactaattcatactttgtaaccttaaagatagctttatcagatcccacctatagtaatctgaatagtattatctctcggtatcaatataactaaaaggggagtaggtcattacccactaactaagggggccaaacctctataaaaatccatgtgttcttttactttctacttttaattgtgtaacacatggcaagcatcaatttaatacgactccgctgtcagttgaccactttttgaggtcaacagtttggtgctttcactgagagcgagttaatatcatatctgatcaaacgccatggataacacaaggagaactttgggtgcaccatttgcattatcaggtcttactcaagttcatttgactgcagatcctgatgtccatgatctagcctcgattgaaattcccatgaacactgcagatgtggtcaatcctgccatttcaacaagcaccacaaatctggccactacagttacccaagatggcacgaacatcccggtggatctgaacaat

SEQ ID NO: 26467 - DNA, 1174 bp, Cannabis sativa
ttttttttttttttttattgtaaatgaattaataacgtttttgcccattttttaactaagttgtatctttttttagataattttcttctcgagtttggtcgttgagtctttcgcccaatttactataattgtttagtattgtaatgattcctaatttcttttgtttttttaataaaaaagtgtatgtatatattatagatatagaaaaattaataatataattgttaacttaatcatccataacttttgtttaattacatttagggatgtttttagtagggctttccccaatacccctcaaaccaagaggtctttattttatttttttaaaaaatattttttaacattagcctataaattttgcttgatttttttttcttcaaaatcggtttataaaataggataattacataaaatactaatttttataaaatttttacatttttacgttattattattattttttttttttttacatttttacagtattataaaaacacaagaaaacaaaaaaaaaaaaaaaaaccataaaaagattgacgatctcaaagaagaatgaaagaagaagaagattagaccttagtaaatctcaagtcaggccaagtcgcttgctctatctcacgttgaagattcataaccccgaaccttcaaaaactaaacccaccggtgaactacaacctcgaaccttctaccctcatgtctacaaccaaactgtgtccccatctatggcgaaaccactagcaaatgttgttctgtctcccaccaagtactccaacgtatgctttttttatgatgatggctatggctttttgaatggagaagatgaaaggatgagaaagagagatatgatttttttatcttaaataaatttgacaggaatgaaaagatgaagctttttctaggaagtgataaagttatactccaaagttataataagaatactaataataatagagaaagagctgagcaaaagagagaaatgaaatgagatctaagaaattttgagggttttattaaaaatgggaatttgtcatccatagtatagccgatgtttgaaaattttcagggattctattttaaaagtgtaaagtttcaattttgtaagtgttttaaacaatcgcctatactcaacgactattaaaaactgaaaagaattctcaactataggtgtcg

SEQ ID NO: 26468 - DNA, 1836 bp, Cannabis sativa
gaaagtaaataataaataataatttcaatataaatggagctcttgtgtcctgctaatgttaacaatttgttagaaaaaataaactactacaaatagcgtagtatgcctttacttaaaaaaaaaaagaataaggctctgaaggaacgagccctcttaatatgctaagtctcaagattggagcacagagtgcatatggtccgatggccaaatcatcatagacttgtttaatttgttagcttaattactgaaatgtcaagagattttcaaaattgtttgttagtttactgctagatggagtaaagttctagctgactctattgcatgccaaatggtctagattgtctaacacctctggctcttttgtgttaggagagctgccaaatggtctagaaatttcttaattccacttggcagaagaaaaagaagacaaaaaaaaaaatgatctaattgcatgcatgagcaaagtcttaacaactaagctatacccttctctcagctaaaaataaataaacaaaaactaaattatattcctctaagctaagtatcagttgattaaaaaagcaatgtaataagttctttatcaaaaaaaaaaaaaaagaaatgacaatattttatgtaaaatacatagagcattttttttattaataataaaacaaccaagtaggtttctcaataattatatataaaagatagatttttattttttagataattctttttattttattattaataaaagtattattagttgcaaattacatataaattcagatatttatactttaattaacacagacatatatgttcagtggcataaacttatgaatttggtttaatgttctaaaatgattgcaccaatcaatatttccaacgaaaaatgatcttggtttacttttttaacaagaaaacttatcgttacaagttggtatgagcattttgggggaactgaacatatcaagctcaaacagcataagtaattgtttcaattgaagagacttagcaaaaaatattgttactatatttttattgaaaagaagacgcattacattgttacactctacacttggtacaatatatataaatctcaaaactctcttaactacaatcactataatgatataatctaaagacaaacaaatatgtgtatatacatagatcgaaaaacttcatctggtttcccagaataatgacaattcaagttttcaagaaatgtcgatttttcaatctacttgtatatatatgtgatatattacatataatatttacaataattatatggataaagaatgtttgggttactatttctatctcatttggaaattgagtgtcttgatgcagtaagcaaacatgaaagcgaagaaggctgtgaagccaacaagaacagcagcaactggtcccataaaatctgggttgtacccaaaatggtcttctatgtaccacttgatggtgggtttagttgtcatttcaggcactatgatcgtgtcttcaacatcaccatactgagacacaatcaatccgtacacagtccatgccattgggcaaatccaataataccaaatccaccactttggaattctctgtaaacaaataaaaaatatataaataaataaccaagaacaagatcagtataaatatacagtctaaataaaatggtggtcttgtcttgattacttaccggtcttgggatgaagaaaccagagaagaggttgaagagagcatagaaagcagcagcgaagatggcggctacttggtgatttggagtgatggaaacggtcatcatgccgtagtaggtgaaatataggaaggagaagaaattgacgaagaagaaccagaaga

SEQ ID NO: 26469 - DNA, 1252 bp, Cannabis sativa
gagagagagagagagagattacttactatatataatcaaaaaaattattgaaacagccagcttttgaagcagtaatggcagctgcaatatcggctctaagatatagtaacaccaaaaaaatgagcgagactttttacataggtgctacaaagtaatcacggattgtttttctctttagggaagagggagggttcaaaacagaagatgggctctttgttgcagtgtcaggggtcttctcaatgacttcatttaaaccagaatctagtgacaaccttctcttctgggcttcaggggtactgagtttaggcattgtaattggattcattgattcatcttcgtctgatacatcatctggatattgtcttttagaatccttagtgggatgtgtctggttacttgtaagcagttttctaccttcagctcctgggattgccattactctccttcgaattgcagatgcagagcttgagcttgggcagcaaatgttttgagagtcccaaatgcgaacctaatgcaaggagttgaatataatggatcagcaagtaatgttgcaaatacataaaacataaatgttgtacattcttctatgagtgcatcagcattgctctttcataccgtaaaatcatcagaagaagttgcaatctttccatcctcgctaggacacctataaagtgcaggagaatagtatgattacatttcattatttataactcaaaaactttgatttaagagaaaaagttaccagtcaactgcagtcacttcgccatcatggctcaatctgataggatcttcttgaggcttgttcacctggtttgacatgttcaataagttgtaatgaaatcagcattgaatagttgaacttatagaccaaaatccgaacatagaagaaagttaccttccacatataggcatttccatcactagaaccacagagtatgctagtagcatccgggctgatggatgactgcaattgcatagatgaaatgaagctaggtaagtatacgagcattctgctttcattgacaaacggagttacagtgatagcaactctcacctttacaaaaaatgtttcaattcgacatccagaaaatgatttcacaggacccttttcaagctgaagaacattgtaaagatagattctggaaggaatgaaaaaatagtaagttacagatgaaaattttcatgcatttgtctagtcattgttgagtaaacatcaaaggcaatcttcggctttaatactgcaatagtttct

SEQ ID NO: 26470 - DNA, 1933 bp, Cannabis sativa
ttgggcttcaggactacaaaagacactaatatggcatttttaatgaagtgggcttggaaactactggtggaggacaacagtctctgggtccagattatgaatgccaaatatatgagaaacaacgatttccttgatattgaagctcaaccttcggactcaaccatgtggaaagcaattctcaatgcaaggcaatatattcataaaggaatctgtagaaaaattagaaatggggaggatacatccatttggttccacccttgggtccccggaggagatttacaacctgaaccgctgaaagacgcaacggagggaatcagtatggtcaaaaactttattcgggataatggatggaatgaagaattggtgagccactggtttaaataggaagatgccattagaattcttaacataacattgccaaacattcctgggaaagattcgtggctctggctgcctgaagcgaatggccaattcagcatcaagtctgcctataggattaccaagaatatcgagccaaattcgaacgctaatgagaaatggcgtctaatctggggtgccaaaatgcatagcagagcaaaaatgatgtggtggagagtgctatccgactgtctcctcacaagaaacaaaattctcaaagcctatggcctctcggatccccactgccctctttgctcaatggcaatagaagactcctttcacctgttttgggattgtcaagtggccagagccgtttggtttggaagcaactggaatataacaactctgacccaagtcacagattgggagcaatggataaaccggttcaagcagaaggataaaagacctttgaacctcaactttgacactatcctggaaggggcagctattatcatggaaagaatatggtatttgaggaattctgttgtgcacaagaacactttaacaccaattaatattattgtacacaacatcaatggcaggttagcaaagttggatgagaagcagcagaacgctcaactttcttctcttcaaactgaatggttgcccccacctaacaattggaggatgtgcaacactgatgtggctattggtaaccgaggatcagctggtgctgctgtaatccgagatgaacagggcactataaacagtgtttttacaacaaaactcttttatagggattccttggctggagaaatagcctctctttgttggggtgtggaagctgcggttcaacttgggctcaaaatggtgattttccagagtgattctgtaggggcggttgatgccgtgaagtgcaacaatcaaagcatatcaacgctgaaccataacgttcaggagctagttacaaaattccaagatctaacatctaagcttgacctatgggagatcaattggatacctcgaaaacttaacggtgtggcccatgatgtggcgcaatgggcagtccgaactaacatctttggtagagttggattgcccaattttgacagtttcttgtcgggtgggatgaaagatggttgtttgtagtttttattttctggtttcttttagtttgtggtagttattctctttagtctcttgttctgctttatttaattctttcgaactctgtttgtatcgtttggtgctattttgggcacgtttaatcaaaaaaaaaaaattggcataacttatgacacactattggagaagcttcttattgagaagtgctaaaaactaacaatacaccaccgatttaacactctattagaaatgctctaaggataaatagtcacataagtactaaaagttttgagttcgacagtacaaattttattttaaatttattagaagaagatttaaaagtaactaatattaaatattttcatccagaataatttaaattttagaccttatatatgagccttatttaagaaaataacagaatatgtgacgaaattggaaaaaaattaca

SEQ ID NO: 26471 - DNA, 2069 bp, Cannabis sativa
tgaagcacttggttccaacggccagtgtttcaaccttttcccgttagtcttaattatctcttggttgatttaggaactgcttcttgatttgacccttttgattcctggggttgtgatgcgcttcgtttcatcactcgagaagtcactcgttcgaagttacccagaggtggcttctttctacgaaaagatcttttgcaatttcacacatcctcttcaaggtttagttttcccacaaggttaagttccgagagtgatgtccgcgacttccttaaccttaggcatttttctctctttggtccttgctagcctactattttagcccatcatgcaacctgatgggctaaacttatgtgaagtctgcgaagatgtgtaagaaggaattcatgcgtatttcttctttttcaacaattttggccccgtaggcatcttatctccagatttgtgctttggtttagcctttgaggaaagaattcaagtgtatttctctcgaggagacttagttgaaaatgtttcctattttcggttgcatgcgcgcattgaggatagtcaactttggcaaacgaacgtaaaaaattgcagctgtcatcactcggacacaccataccccctaaatgagctggaaattttggaattaaattctcagtcattttcttggagcctaacttgtgtcctcttccaatttccgaggagtagagttgagtgtagttcttcccttcttcaagaagcgtgtggttcttcgaaggaagtttctatgcagaaaagccatggggtttttgtgcaaacccagttttatgataggtcccacatgatccctccgtggcatgaacttcataagggaggtcataaacttcttgcagtgcaagaggcttttggtttcccagagggaaagctgggcctatgtccttatggaggaaattccttttatggtgaggtctagaagtcatgtcaggccctttgatggtgaacttttggctttcgctaggaaaggctaaaagtgcacaaggaatttagacactgaccattcttgcagaagaaaaagagcatatgggaaagcattacgaggagcataatatacttcaagcagtcattcaattctgggaacgagggttgaagacgtatcgtaccccttgtgatctttcttgcacaaaaaatagcatacatacgagagacatgttgaatttttatgaagcaagcctcggcttcgggaagataggctaaagttgcatataaattcaagcttagactttgcttgaaaagatcaaggggaaagtatcatagggagtaagacaaacttcaataagtccttccattccgggaaggagggttgaagatgtattgtacactggatctttcttgtattaaaaataatgtgcaggtgagagccgtgttgaatttgtatgaagcaagcctcagcattcgtgaaggaaggttgaacttacataaaaatttaagcttagacttcgcttgaaaagatcaaggggaaagcatcacggggagtaagacagacttcaagtagtccttcaattcaaggaaggagggttaaagatgtatcgtacaccccgtacaccatgtgaactttcttgcacaaaaaacaacgtgcatgcgagagtcgtgttaaatttttatgaagcaagcctcgacttctgggaaggaggatgaagttaaaaaaaattcaagcttagaattcgcttgaaaatatcaaggggaaagcatcacgtggagtaagacaaacttcaagtagtccttccgttccgggaaggagggttgaagatgtatcgtacccccagtgatctttcttgcacgaaaaacaacatgcatgcgagagtcatgttgaatttttatgaagcaagcctcgacttccgagaaggaaggctgaagttgcagaaatggtcgttcttaggtcttgtgcaggcatgctgtgtttaggtcaatgaagtcaatgcaagtactaaacttacaattcggttaaggcaccagaataggattgtatacccaaactaggtagaaagcttccataattaagttgttctctagtagcctttcagcatcttccttgaaagctttagagg

SEQ ID NO: 26472 - DNA, 2535 bp, Cannabis sativa
cacagtatgtttaaaaaacacgtaatacgcctatgctagttagggtgttacaacaaaaccatcattactatcgaaagcacacagcccattaaaagcttttccatcaacaatctttggcccattagcaatttttaaataacccacatgttcagtcccaccattttttgaattaactccaaccttgggccccacatgcatctcacaacaaagtacattaatttttaaatgttcaccacacaaaggctccaaaacaagtatgaggttagatcactttccacgtttagcatccttagtgttcaaattattaacagaaatggcaatttcctcaccaggcgtggctgctgcacttttgggaacccaaattgccttactactaatgttttcactacttgaggtcccattgtcatcatcttcttcctcctcaaataataaggcaccatgcaagccttctccttagcaataactccatcgtgacatatctccatttctaccggagcctaggttggagaagaagatagtcgcctaagccgaggcaaaccacgttccgtagaattcaccttacgagataagtaatcaacattctttgacatagtcaccatccaaggcccatagataggaaagggatccccactaacgttcaagacattgtcaggagaagaaagactacaccccctctgttgatgtcccaaacatccacaataaaagcaaaaaatgtcaagtttctcatacttgtattggatcatctcttagtaccattcgacaggttgataaaacaaacttaaaattgaggcttttccacatcatgatctatcagcattcttagccattaagaccaactagcaaatttctcttcatcaaaatccaccttcacaactgaacttgctagagcgcccaattcattaccattagccaacaagaaatattcatgggcaactgatggatttgaacccaaaaactaatcactcgataaggcatggtacctataaaactctattcccattcatggaggatcatattataacatttcagacaccacgagcaattgtccaacacccatcgcctatcctcctctttctcaaaaccaaacttatacaatgttggttttgtggtgtcatcaaggaaaatagttacagaggaaggtcttttctagataaagcacattaactccttgaccatagcttcctccacaagtctaggagccacaatttgcctagaaggcaaagggtagttatgtttggatagtagatgcacaaggggtcaaagttaaaatagcatcaataaatgatatacatctccccattttggcagctttaacaacctccatacctaaaaataaacacaaaccaacaccaactaactgccatgacctgaccaggaaaaaaaaatacaggaaaggagccagacaccaaaaggaccaaaacacttgggaccaacattactaaagaagaggatacaccataacaaggggagacacttacaaaaaggaagaaaaagaacaaacgccaaaaaaccaacaaaggaacacgaaggacaacatcaaaaaaacaaaatagaaagaggtatagtgaaggaaaaagacaaagagaagacagattagtagaagaccatcctattgataattttctataaaaaatgatttactttctttataacttcaaactaagccttctaataaagcaaataaaatttatataggctatgtgtatatattggcgtctcataatttttttgcatctatgtatacaaatctattagtatatcacatattatagaattgagtaggggtggataggatcaaattgtcaatagcaagacaaagtcatcttacaaggcatggcaactatcaatggttcaaaagcaatcaaacaaaactttcaagcaataagcgaaaggagttaagcaagttgtaaagacactggccgaccatatctagccaaccaaagggtgcatatctggctgggaaaagaaaggttatagcacaacaaggtcttgagcatagacttgctagccaaagagtgaatgtcaaacaaaaaagggcttgttcgacaagggaggcagaactttccaaggctggttagcacgtactaaggctggcatgaacatggaaaagctggcaggcacatggaaaagctggcaagcacatgagaaagctggcaggcacatggaaaagctggcaggcacatgggaaagctggcaagcacacagaaagctagaaggcacatgctgaggctataggaaaaataccttgccggccataaaggagcatgtgtcggccaacctccaataaagggtaggccgaccaacccataaaagttggggttcaacttcaaatatttacctattctttatgagcaattaattggttatcttctcattttaagggatatctctacctgtttgaattagatcttttataagccttacactatatattgagcattaggtctctctataaatctatgttattccaagtcactccacttgcataacaaagtctaagtcaaatgtagagaaccatctcccttgaagtctcat

SEQ ID NO: 26473 - DNA, 2329 bp, Cannabis sativa
tatctcttgtaagtagctcgacataatggacttctacctggtcagatattttatccaccgctctactctggtaattaacaataatagatgctaacgaattatatgcaatctgctagggacatttgccttcgcccaagtactagaaatataggacacgtgtcgctcggtcccctcaccacgtcaatgtgtaaaaaatcagataacaccagacaaacaagagccaaaagggaggcattctttgcatatcttccacagaaatagttctaaatgatcatgaattcgaaaagacaagagtttagagaaaatctcatcatttttatcaaacctgcatttgttaagatcccaatttaatgtcttgagagagaattaggtgaagaattcaacatcaataaatcttcctcaaggagcataggaatagaacaagatgagactaaactagaagtctcaggtctaaagagatcatcaaccaccgaaaggtccctatccaaaccatcttcagccatcaagaccccacaactaatagttccttgactctcaagttaatactagcattaacaaaagagatagaatcaacacaagatcaggagaaattccaaaaatcaatcttagagtgttttccaataatccacacaatattgtttctgataaaatctctagtactctgaatgccctttgccaccgtaaaagcttgtctcgagatagacttatcccagaaacttgtgttaagacaatatttacccaacatcaattctaacacagagagaatcatgattggaatacccttatgtttacacactgcatccaaactcaaaagagagaggtaatcatcatcattagtcttcccagtccatcaaaaatatttagcaataacatccaggaattaatagtcttcctcggaagtttgaagactgacatcgtataaatttgaataagtgaaaccacatttttaataatagtcaatctagttgcttgggataagagacgagccatccaaccctccattctactttagactttttcaatgataaactaaaagtcttttgcctgatttcccctaagaaacatcgggttttctaaaaagattttctcaccattcatcacttcaaaattaagagactcggaaagagcaaggcccagataaacatcataatttttagaaatcataatcttcaattttctttgattaatttcttggccataccaaaaataataccttgcaagagcttccaagttttcaacattcataaaatcatctctcacaaaaaacataatgccatttgcgtacatcaaatggcacaccgaaaggctagcacaagagagtctatacccttgaatcaaattctaccttttcttctccatgatcaatcgagatagcacctcgaaacataagataaataagtaggtggaaaaggggtcaccttgcctgaaccccctatggggagcaaaagatttcgtgagacccctattcaacaaaacttgaaaccttactgtagaaataccgttagcaattagctcatgaattcaattatcaaatccaaaagccaacaaaacctgattaaggaaactccactctaggaagttgtaaaccttggatatatcacatttaatcctaagaaaagcatccttgccttgcctttgacccatatcaaagataatttcctagacaataatagagttttcaatgatccaccacccttgaaaaaaggtcaattgaaaaagagatataatcttaggcgccattttacgaatatgattagctaaaatcttagacacaatcttataactcacattacaaagacttattatatgccaaaaatcatcaaaacatctagcatgatttttcttgggaactaggaagcgagcaagtgaggaaaaagtatgctgaaaatactcatgttagtttgtagggttaatcgtcacaccaggaagcaaccaaaaagttacgtacccatgtataagaaccatacatccgtggaggaaggcctaatggaggcttgaagcaggggtgttacaaacctggtcccaaaccccggacctagcctcgtaccctagccctggacccggcccaaaacataaccccgaaccccaaccacggacccagtctcgaaacccagaccccacctcctgacgctggaccctggaaccccctccccctacaaaccccgaccacggactcggccccaaggtcgaggttgaggtcgagtttatggtaaagatattatattttacacaatcttttaataaagtcaacaccaaatataatattatattaaataatacaatatagtccaatacaatactatataatatgatttactaaacgagccct

SEQ ID NO: 26474 - DNA, 2328 bp, Cannabis sativa
tattctgtaatgaccatgaggtctagtttcttttcttattaatagacgtctattcattcaaaaaaagtttgtaaaatattattagagtaataaatacacggttgatttcttcaaaaaaaaaaaaaaaaaaattgaagtcgtgtatctaaagttattaaagttactctaaaaattaagttcaagataccaatttatatatataaaaaattatttaactaaaattgtgttcaatgaattcatttaattcattttgcgaaacaaaaaatttgtattattatttaacaaaatacagaaacaaccattcgtgtattagtgctaaaaagagaaacttaattggtatgttgatgttcccataattttattataacaacattcaaaaatttatttagttatttttttccctatatatacacaataaaagttggaaatttaaaagaaaaatactatactgaaaataagcatatgaatatttttattgcttttcccacatattgtaattagcactaaatataaaagttttggtcttttttctaaattaataattctaataattaatactaataaatttgtaacaaaaaatgaaacattagtacttctaattaccatgctatatggaaatccgacagaagaacataagacatataatttagtttaattaaaatatatatataatccaaacactgaaaggcacacttgaaaccttaattacagacacaaaatccctgattggaacaactaagatttcatcttaataaagaaaaataaattaaagagagaaagaaagaaagaaaggtatacttgaacaacattaatagattttattaaaatatttatatattgttcaaatattaattattattattaataataataacaaattgggggtgatggagtagtagggcaaaacactaactaaattatttaagtggagcccattttgttaatcatgttatgaaattgcaagaacatgatagagattttataaaagacaagaaaagtccaagattaggggatcactaatgatgattatcaattaagattttctcttaattgaaaaaaaaaaataaaaaacaaaagcaaattcgtttatagctaatcattagtaatctcactttttgctctaaaattaaaaataagcccaaaacaaaattattaatgtccaaagagaatacaaagctagctttgagagagacacaaattaaacaaggaatcaaataaggttgactgaaaaagaatgtttgtgaaattttttgttaagggttttttttaaaaaaaaaaaaaaattagcaattattattttatttattttgttttgttaagaagggtattttgttttgtgggggcaaaacaaagaggcaagaaagcaaggcaacaacataaattgggatcttttcttgaccatgttttgggtgacaaagttaagaaattaaactagtttgcttaattaatagttagagcatttaatttgttgggtttttttttaaaaaaaaaaattaatttaaaatttaatttattggtgaccctaatcatttctatatgatatgttgatttgtgaaaagggtgtctcaaatcaataatctagttactaatctaattggctctcaagtcaaatctctcttatctatgactataattaatctaattttgtccctagtcaaaatctcactcactagctagccatcttaatagccctccaattttttgtttttatttttttattttttaaaaaattattgtaggttacctacttatatacagttaaaatatgactttttcttctctcttgttctaataaaaataaataaataacactaaattggactataaataattgattcttgccagtggattaatattctatgaattatttccatattgatattcaaaaccagcttttaaaataaataaaataaaaattaaaaagctagttccaaaatgttctgttcaaggcaagaattaattaaaggaatcgtaaatgggacatttgagaaacccaacttattattttaagttaattataaaatctcaagcacataaaacaaggcacaaaaacatttttatttattttttggtacatgttattgctaatccccaaagaccaaaaaaaaaaaaagcaaataatgatcttcctctcttcttagctcaaattaaataattaattattttaatatgacagaatcaattaatttaaaattcatagtaattataaagaaaacacttttaagatcttacaaaggaatcagttaagatagtgtaggccataattaaataaactaaggaagattagtggagagggaaaacacctgagctttttcatgtaaataaata

SEQ ID NO: 26475 - DNA, 1781 bp, Cannabis sativa
  modified_base (720)..(723): a, c, t, g, unknown or other
tttttttttttttttgtgtttaaacatttactttttttttttttttatctttttgattggtaagaaacataaaagttgaaaaaaaaaacaaaagaaagaaacaaagtgggtgactttttgaaggtgcagtttcggtaattaaatcaataaaatataaagtgagattaatattattatatgcatggtcgagtcaaagatggggcacgtgacttcaagttttgggaatttggggaattcataattttgtggcacacaaactaacaatagctcactcattcatcatcatcatcatcatcaatattttgcaatttttatagataaatgttaaaagaatgttatatccttattggcaagtattggaatttatataatttaatataataatttgtatgaaatattgttaattaattataagacgcactatagtaatttaaattttttgtgattaaatgtgagttttagtcataataaaaaaaatacttgtaactaaaacatagtatttaaatacaaggtatcactaatttaattttagtcacaataatattttacaaattttatagaaaaatattaaaagtgttataccgttattggcataattaagtatcagatttcatataatttaatataataattttatgagatatcgttaaccaatcacaagacgcactacaaaaaaaggtcacctttagtcacaagataatttttttgtgactaaatgtnnnntttagtcacaacaaaaaattacttgtaactgaaatatagtatttaaatataaattgtcactaatttaactttagtcacaataagtattgtggctaaaaatacatttaggcacaataaattgtgatttttgtgactaatacatgtagccacgaatattttagtcaaatgtaggaatagtaatttaaaattaatcacagtttttttttttaatcacagtttttttttttaatttttagtttttttttaatttttagtcacttttttaatttttagtcacaagttttgttgtgactaaaagtaagattagtaacatcacccctaagtgtcgctagacactattagttgtaatgtccccgcttcaagtctctattggccccttatacccacagaatgatggctcttatacacgaatacgtcattctggctgctttctggaatgacgactgaccttacaaaccagcacgagtatttctagcatgctttgtcctcactcgtacgcttcttgggaaaacttcccaggaggtcacccatcttaaaattaccccaggtcaaacacgcttaactgtggagttctttcgtgatgggccatcagaaaataaaatgaccttgttgatataagtagtaccaatcaatctatttaagtcctcttcaactgtgtagtcctatacatacatagtcttagaatcatcacctttgacatttcttaggcgatgtgagattacacagcttacccagtatttctccttacgaatcacaagactactgattgtcacaatcaccctcttacagggtctgacgtccttgttgaccacacttttaattgggtcaaggctctgataccattttataacattcccgctttaagtctctattgggcccttacactcacacaatgatgtctcttatacacaagtacgtcactctagctgcttcctagaatgacgactgaaccctacaaaccaacacaagcatttttggcgtgctttgtcctcactcgcacgcttcttgggaaaacttcctaggaggtcacccattctgaaattaccccaggtcaagca

SEQ ID NO: 26476 - DNA, 3571 bp, Cannabis sativa
cggaagcttcggcactagaaactccgaagcccaaactcatcattgggtaattattatgggctaacatatgactctatacgcgttcgtgaagcaacttgggcccaaatggtgtaatgcatttattatactttaatgatttatacctcattattatgaaaatgtttttaccattttttatataatatatgttgtaatttttttttctcaaagtagtagagggtgtagtttaatcataaattttatatatttttatttatttatgagtaagtaatatttgattccaaaattcacgagtaaaatattaatttttatgtctcaccaatttttttttttttaaaaaaagttgtattttctttttactcgcgttatgataatagtgtactcttattagttataattattttaaaaaatatgaggactaaacatatacatcatattttgtcattttgtatataaactatgcactctttaacaattgtgtgcatctgtttacaaaaaaaaaaaaaattaaaaaaaaagaaacatttttgtacatattttgtgtataaagttaaagaaaaaaggtatttacaagacaatttagaaagtaagaaatgcttgttactattattgtttattagaaagcaacttaggcacatgcaaacatgttcaatcaaaatagaaattaaaaaatttgggcatactaattaaaacggagtttaataacaaatcaatgagtaaagtcaatattatgaaaatcaattgaaacaataatgtatttgctttcttcaaatgataataaaaatgaatgaaggctcctccatattgccctataatttttgcatacacatcttgtcaatgtggttgggaaaggataacaacgaccaaggaagaattgaactttttacaatgttcccttgtattcattacaagttgtgaccagtctctttcaacaactcataccaaaatagtgaataatgtggtattgtgttatagagcattaaatatcatgcccgccaaaggcccatatacatcttactttgacaacctttttttttttttttttcttttggagccatactcatagggaaagagagtttaggatataatgtgtttgatatattagttcaaattactacggtgggatatttatgatgttcaaattaagaggagagttttttcttaagctataataagagggcagcacatgtgggtcagtatgggcccaaaattgaattaaagcccaacttggacacttttgtgtaagacccaaacatacaaagctaaagtgagctttgagtatttccatgtaagttaggtttgtccatatcccatttagtgttcttgttccgttacttgcaacatattcatgataacaattgaatacaaaacttcaatatgcatattaatacaaattgaagcataccatgtgtgaaattataccatattatatggtacagcaagttcatttacaaattaaaagggttagttagatggaaatacaaactcattctacaaaataaatcaaaagacaagaatacccttttgtttcccacttttggaattaatacacacacactacaccattccattaaaaatgaaaattaatagtgatacatatgattaatgatgatatgaaaaacccccaagtggaaagggaaggtgggtttgaattaaaaagtgtccccaaatgaagaggatgtatggaggtttatggtgtggtgtttcccatgtgatataaacccttccttaaattaattggtcccagtctctgcatgttttcacgtgtcctgccatccccttgccgttaattacaccatcatgagcaacagctactgcataggattctaaacgatcccaaatggtacaaaatattggacaaaataatattgaattttttttgtatcagtttccagcccacattgccttccccattccccactctcaccccctagcgcgtcttcacaacgctctccccaatcatataactgactagctagctagtacttacttagtagcttagctattatagctttacctagctaggcttttgtcataacttgctgctgcagccttaaaattaagattactgggtaattttaaaatggattttgatgagcaatttagaacattaatcacttttattttatttattttttcagtgtgcaaatgagagaggagatatcatatcagtctaaagaagcttttattagttagagagggtactgacttcactttcttcttaaagggagtggtactgccctggtcatttctcttgcatgataggacaaaactccttaattgatatatatgagagagaaagagagattgatatattttttggagtgatgtgtgagtgttgcaatgttttccaaatttaatttacagtgagagagagagagctaaaccaaaagggtagagagaaaagggtaaaggaaaaaaaaaaaaaaaagcaaaaaagagagagagagaaaaaaaaaagatcattagagagtagtaaactcttatctatctacacacaaaattcctacaaagatgttcaatggtggagtaccagaccagttgcaccaattcatagcctcttcaagacccaattcagtagcagcactactccctctctccaccaccacaaccactaataccaccaccactactactactcccttctcttcttctaattcttccattgatcatatcattcatgccaattacaccactactattacccctaaccatgcccatgaatctcatcatcatcatcatcataatccttttcatcatcatcaactccttcctcctcttcaccaccccaacaacttcttacaccccatgttgcaccatgtgcaacaccccaagcttattaaccaccatcttcataaacaaattgatgaacaagccaccgcctccgctgcctcgggaccgaacaacttggtctcccatgttgatttggagatgatgcaaacccatacaccaatcccagaattaataccaaccgttgatcatcatcatcatcatcatcaacttcatctgcagcagccctggagtgaagatgaagttctggcactgttagggatcagatctactatggagaattggttcccggatttcacttgggaacatgtatcaaggtatgtgatactatacatatatatatacatatatgtgtgtgtccaactgttttgttttgtttccttttgtttggaattatctagaaatttttatagtgtaaaaagaaaaaggaaaattaattgtatacaagagtgacagaatttcattagaaaattaagaacaacaaaaatacaaactaaaaaattgttatatatatgtatgtagttaattagggttttaattaatgatgttttgcatatgttttgtgttattatgtgagtggacacagaaagctagcagagcttggatttaaaaggagtgcagagaagtgtaaagagaaatttgaagaggaaagtcagtacttcaccaccacaaataataacagtaactgtagcaaaagctatagtaggttgtgtaatcagctgagtgagctagaagagctctaccatggccaaaataaccaaggtggtcatcatcagaatca

SEQ ID NO: 26477 - DNA, 1854 bp, Cannabis sativa
aaaaaaaaaaaaaaaaaacatggctcattcaatattttgacttggtaatatttttaaattatatggtattcttattatttagccactagatttactattctctcaaaaataatcctttgtgacgttagtgtatccatatctatatatataaaggagaggaatagagcggtgatacagctctttataatctcttcaaagctatttttctttctctccttaattttcttatttttaatattttatgaaactataaaatgatattttactattattttaataaaatttctataaaaaaaatatctatatatataaagaagagaaaatacaaggagaagatttgtttcaggttggtacgatgctcagtctaggtaaaccattcgagtaaggccacgcgtcacctaaccgtgcaaagagagaagccaaaaagtcctcatgcgaccagaagtccccacgaaaacttggggttagcaaatattatcccaaaagtctccctaatgacgtgacatagaatgatgtgacacatgacaagtatagaagatcaaggttggacgaacaagagaactttgaggagactctccagaagatgttagtcggttgtataggccggataaagccgtctaacatcatatatgtgttggatgaagtatatcgactagcttttaggggggatcaaagggtcgtctaacagaaaacgttcgactagtaagtttgctagaggaaatgtccatattcgtttcctcaacctatttccttgcaaataggccaattagcacacctataattgagagattgcgaaaataaaataaaaaattagagaatttgatgggattgactcattcaaatactaaatgcattattttgtaattaaatgtaaatattctacattctttttcctataaaaggtggatcatatttacaattcggggaccgaattctgtattctcaagagagctattaccttgcgaaattacatgtaatattcaaaggaattagtaggaaactcacttgacaagttcatgtgatattgctatttcttagaaaaatacaactaaaaagagagtagattattaccgattcagagaccgaacctttataatactcgtgtatcatttattgctctttcatatttcaattattcaaacatttttatcatcgttttattgactctgcgttattgactagaaataatgccaacacttgttatttaatatatatataatatgatccttatacgacctgccaaacgaacattaatagtcctaaaaattaactcattctaaaatttccagaactttgtttatttttagttaacccttccaagcattttgtcacttattatgccttaatgtttttccataaaattgattttcattgtttttttttattgtttgctttgggagtccataatgaaacttggcaaccaaatgaaacgtattgtttttttttttattgtttgctttgggagtccataatgaaactattggcaaccaaatgaaacgtagtctaaagcttagatgcaaattaaattcataaatgcttaagctaatacaaactttttttaacgtattaaataatatgattcgatggtattatattaagatttatgattgcaataatattaatgtaatacaaaatttaatctagatagtattctattaattaaataatacaatatgatccctttatcatatttgcatggtattgttaatcgatatacacttaattaatatattataagtgacagtcatgagttctgccatgtatgtatacatagatatgaagggtaaactagctggctataccacatatatttttttcttcaaatacatgtacatatatagataattattataa

SEQ ID NO: 26478 - DNA, 1792 bp, Cannabis sativa
atacttagctcaaaaattgatagtgttatttgttttttcctaatcttattgaagaaacgaaaatgggagtcaatggtgaaaacagtggacttgatcgagcaccacacacaacgccatcattcacactaagtcaactcaagaaagtcattccaccccattgcttcaaccgttctcttctccgatccttctcttatgtccttcgagacctttttttcgcctctttgttctactacgtagcaacttcttactaccaccttttccctcaaccactcttatactttgcttggccactttattgggtctcccaaggctgcattttgttcggtttagggctcattggtcatgagtgtggtcaccatgcctttagtgactacaaatgggttgatgacatggttggtttcgttatccactctgcttttcttctcccatacttttcgtttaagtatagtcaccgacgccaccattcaaacactggctccattgaccgcgatgaagcctttgttccaaagacgaaatctcaaatgccatggttctctaaatacttgaacaatccactagggagagtcctaacctttggtttctttttaaccattggttggcctttgtacttagcttgcaatatattaggtagaccatatgaccgtttcgcttgtcattacgatccttactctccaatatactcaaaaaatgaaaggcttcaaatattgatttcagatattggtgttttcatcaccacattggtgttacaccgacttgtcttagccaaaggattgagttgggttttgttcgtgcatgggataccattgctaatagtaggtgccttgctagttttgaccacttatttacagcacactcaccctgcattgccacactatgactcgtccgaatgggattggttgagaggtgctttgtcaaccgttgatcgagattttggagttctcaatagtgtttttcataacgtttcaaacactcatgtgttgcaccatttattccccaaaataccacattacaatgcaatagaagcaacaaaagctgtgaagccaatattaggagagtactatcgtttagatgagacttcaataattaaggctatgtggcgagaggcccaagagtgtctttacgttgaaccagatgatgaatcttcgaaaaaaggtgttctttggtacaagaacaaactttgatcaaatcggcagtggaagaattggttcaaatgttgtgattgtgtgtatattttaagttaagaataagattcatcccaatttgttttagttgttatgatttggtgtttgatttaataatgggtctcttgggcatgtgatgagccttgttttagtttaaatatatgttatatgtgttttggtaagttgggatatgtcaattaaaaattaataccacataagattcttaatggaatcattatattaaattataacatatgtggtgatatcttatacaaaaattgattatgatgacaagaatcatacacacaataaacaagaatcattatattgcagttagtaataaaagttttgataaaatcaagtatcatccataagaactgaattaccaattactatcaatcaatgttttgtttggccaattaaaattggtttttgtaaataggaaagtaaatggtatgaacaataaacaagaacacaataataataagataagcaagagaaaactttgaattaaaacaattgggagaataattacggatgaggaaggttaattacaacctcttattataattttttagtcaacctccacatctgaaattacatgtcgaaat

SEQ ID NO: 26479 - DNA, 6347 bp, Cannabis sativa
  modified_base (5200)..(5201): a, c, t, g, unknown or other
  modified_base (5528)..(5540): a, c, t, g, unknown or other
tttattgaagtgtcttaaatattttttattgaagtgtcttaaatatttattgttagtgaattgcattgcttgcgaaggaaggcaatcactgtatatctttaaatgcaataacttatttacttggttcttatgtagaagttataattgctctttgatatgtgatttaggtaggaatttgattttcacataaagttaagcttatatgtattttcttttgatgtaaaatggattttgtagttactggtcacattttactgaacaaagcttttattttattttctaaaatggaacaataaagagaactattagtcacattttaattgttatgcaatttgttttccaggtatcttgttacttctccaagagatcagctgactctttactatgaacctcactgtgtatacaacaagagttctctggagaaagaaaaggctgatattgtcatcacaccagtcataaagcagcttttaccgaattttactttagtctctgggcaagaagatgctgttcaactcgcaaagctgctgcaatccaagtacagaacggtttcaacctcaatttgaagcagccaactttaggcgcaccctcacacacacaaatatattcatgttgattaattatttttacgtatgacttctcacaggtttgttgttccaatgaaaaacggagacctggatagcaaagggcttctcgctagcttagttcaatcagagggaacaatacaatcattcaaggtatgtgggcatgcgttaaaaatgaattgttagctcggccctgatcgattttttagaatataaaagttcattttaacaaataaattcttatgtttatagaaagtgcaataattgctatgaaagtgtggtacattttattgctcgctccttatatgtttccagagttccaatataagctggaatactttgattgcacttatctaaatattatttgtatcaagggtatgatggaaaatcagcttttgaagacttctgtactataatgtgtatacatcatttgtaaaatgcaataatatattttcttaaaagtcgacacttgatcacattagctgcccattatactatacacttgttctctgttatgtgttgaaaaaaatatagtatgaatctacctgttttctctcaacttcgctcatttattgaataaatctttcttagtggccaattttagtattttttttttctccttctgtaaacatatttattttttttttgttctgccttttgttgtaggacctgctgtttaaggaattgccagacgcacagatactagagcccactgctggggtaccacttgaaatacatgcaccttgaacccctttagagaatatttattggtagtatagttgtacaaaataaaacagtttctgaaaatataacatttatacatatattgatctcttgatctctcatctaatagtaatccaattttccactgggctctcattttacttacaagatggaccattgagttttaatggacatctttggtaaactagtttataccattttcatgaagaggtttacattcctatccaattatgatagtatggaatccacaaattaaataaaagattttacaccgtttttggacaaaatagatgtaaatacattcatattgattcaacagaaattaatttttattttttctataattgttcaacaaggtacatattattgttataaacactacaaagattttacaaaatacaaactcagaaacactaaactcaattacaatagtaaaagctcatttggtacttctggacatgttgtaggagaggcaacttacgattgaaagttggcaactataagtagggagacacaccattacaaatgaagacaaacctaaccatatacatatacatacatataaggagtgcattttgtgaaccgtaaagattgagttgatccaacggttgacatctaaagtgcatcaaatcgtgtgttacatcaagaaaatcttatagtccatcaagaaatggttcccttttttcataataaaggaacaaaattcattcactatatttgagtagaaaattacataaacaataaaacctactccaacaaatcaatttaatcagtattgaaacacaaggtcataaaagacctttcccaaacctaattttcgatcaaataaaggttaaataatcaaaattgtaccgttttaatttctcacaacaaaatctttagaatattctagataccaattagatctctattcttctccttcttctcgaaaccctagtagcgctaaaccaagctcaaattcttagggttttcacaccagcacacacagacttagatctagatcaatccaggtccaaaaacacaaaaatcacaaagagagggagagaaaacaccaaaaaaatttcctaagattcaccaaaaaatgagttacatccatgttgagctgttcctcagatggttggctcaatcttcattacttctgtcttgattataaggtattagccaagtatgccttgcaatcttaaatgacggtgcttcggtgcgatagtttaataagtcaaacgtggtgttgataccaaaagtacaaaaaccaagattggttaaagagtaccgacctattgctttgtgtaatgtaatgtataaaattgttgccaaagctttatcattgaggatgaaaagtattcttggccccctcatctcatctttccaaagtgcatttgtcccagggcggtcgatacatgacaacattatggttagttttgagctacttcactcactgtttaaaagaaataacgggagaaggggatttgtggcactcaagcttgacatgagtaaagcatatgactaggtggaatggggtttcttagccagtatgatgcgacagtttggctttgctgagggttgggctaaggttatcatggactgtgtgatgaccctggagtacactttcttaatcaatgggtgccctaaaggctgagtgatttcgacaagagggttacgatggggatgtcctttatctccttatttattcctcttctgtgaagaatctttgtcttcattattctcctttgtaaaagctagatctgaactgatggggtttaggtgctctagatcgggaccacgtgttactcacttgttctttacagacgatagccttatgtttggtagggctaatggaggtgatactgaaactataaagcgtatccttctaacttatgagactgcctcggggcagaagattaattttgagaagtctgctatcacttttagtctaaatgtgcaacaggtggatcaagatggggttttaagagttttagggttgacatcaatggctacacatgacaagtacttgggattaccaacggtgattggtagaaacaaacaacaggtgtttgaagggatctgtaaaaaggttaggaagcgtgtgcggggatggaagcagaattttttttttcagtcggtgggagagaagtacttatcaaatctattcttcaagctattcttacttatatgatgaatgtcttcaagcttttggcaaaaacttgtgaaaaattaaagtcaattgtaagacaattctagtggagttcatctggagatcaaaggaagattccttgggtaaaataggaaacagtatgtcagcctaaggcgatgggtgggcttggttttcaggattttcaacttgttaatcaagcacttttggcctagcaagttttgatgtgatttctatatcaagattcattgcctgctcgaattttgaaacataaacatttcccaaattgctctatccttgaggccacggaaaaagttggttcgtctcatctttggtcagtttgatctggggaatggaattgcttaggtgcgagctttagagatctattggagatggaacacaagttagagcttttaaggacccatggctcccacgtctgaggtattttcagccaatcacgaggaggactacggacgattgtcgggtgagtaaatttattcttccatctgatacttgggatgtgggaaagcttcaataggtttttttgccaatggatgtggacataattctatctatttcattagcgaggtgtgaggcagaagatggttagtgctagcactacgatagagatggggtttatactgtcagtggctactcattggcctggtcgctccaggttgaggaggaaattacagattcatccatgttaactcattggtggaatggagtatgaaatctcaatctgccaccaaaggtgaaagtgtttgtttggcgtatgttctatttggttttaccattagcacacaacttatctcccagaaagtttgggtacctctttgatgttctcagtgtggagaagaagctggaactcctgagcatgctctatttttttgctctggtttaattccagtgtggcatcggttgggagtgtggtcggtgctccgtcgatgtgcatatgggccgatgcaggaaattatcctattactctttgacatgctatcttgtgatgcttttgaacatgatgatgacaaccctttggtggctgtagtatgataggaattcagtattatttgacaacaagcaatcaagattggatattattccagacttagccaataactatttggcggagtctaaggagtatgatcagcgaggccttcatttgggattgggccttacgaacccagttgtaaactgaactactcaatggatgccacctcttcttgaatcttttgctctagcgacggatgcttcggtgattccgggtaggggctttgttggattggggggagtggtacaggatgcagaggatgtggtttggttggcttggtcatcaggtgtattaggtgatttctctattaatgtggcggagctgcttcccattcgtttgggcttggttcttacacatcaatttggtttcaatatctctattattaatagtgattccactgtgaaaattagttggattaataagctttacattaattttagttttcagtctattttattatatatttattctttattagctgttgttggtggtagttcttgcagtgtcattctacgattagcgaatgacgttgcccatacactgccaatctttgttactaatttagaagaatgtgtttggacaaatgcttgtcctcgatttttaagttctgtactccaaatttttcttaataaatttcgcatttttcttttaaaaagatttatatatatatatatnnatatttttttttttttgtagtgtttggcgtacgtttggagttgaatccactaaagtgataatttcgtaaatggaataccaactcgctagcgcattactatattaagacaagtacattgtataatttctttcacacaataataaatcccagcccagggtctccttgaattgattgtatgtaagattattcttattaatgcaattgaatcaagtattgtcctttgaggcaacccaacatcatatttcctacaacttattattaatttccatttgagatttgagaattgagactaattacgaacgtgtttctttcccttttttttttttnnnnnnnnnnnnnatatatatatatatatatagtgggaaagggagttattaatactaattagtcaacgatgaccatgaaccctaaagtctaaacccgattaaactatttgatatctagcattagtgtggtatgctttagcctttagttgataatattgaatatattagcaaaaacaaaaaacccacataatgtatttagccgaatttaagtgcctaattaaggacgacttattgacttattaattgttgagagtttgagctttgagtttttgaatatttctctcttcagcaaaatattctctctctccctttattttattttattttatatcagagttgggcacaaatgtgaattgaaacaaagtgagacagcaaaaatttgaataagggaacgccaggctagcaaaatatatataagtaagagttttaatgcctatatactataactaatcaaaaatgtcaaatggaaaaaatatttaatatatagtaccatttaagtctacgtaccaaagtaaagagccattcctatgaacgctttagagcatccatagtaatgtagacaaataagactaaaaagaaggattaaagttttatttttgatgaacaaaagtaaagttatatattcatgccttatcatttggattagtatataaaggagaaaaggaattaatgctagtgttcacttaagtccttatcaaagaaaagaaagactatacattgtgcatgtatgtaataaatctcatcaagtatatatgcaagagatgggaaatataggttgacctaaaatattacactatgtaaggagagagagagagagaga

SEQ ID NO: 26480 - DNA, 2159 bp, Cannabis sativa
gtaaccttctattataggtaaaaataaatgtaaccatatggttacaatgaaaatataaccattgaatagtcacccacatgtatatatatatataagtgatgccattgtcatcattaatgttttatataattaaacaaaaaatttatcagtggcaacactttatcagtactaatagtggcgtcaataattcatactattcttgtactgaatagtgcttgtcaaaagcgtggccaagtgagatgagatggaggagaaagaagaacaattatgtgatggtttacccgaaaattgaccctacaatgtggcaagtatagggaaacatttacatagttgatcccaagtcatagcagttgacttaagggtccctagctctacgcccaagttgacttcaagaaccctagaatgggtgtttggatcctcgaaagttatttctaactcaccatccttcagtattttgaattaaaaaggcaagaagaatccaagtctaagccctaaaaactaaaaagagaagaaacaacatcccggaagtcaacctgaccgcctaggattttgatagggaatccctatcaaaattaatttgggcagtagaaacaagagtagagaagctgagatagcaatggttgaaggcctttcattaatttctaagatttcgagagcctggttctctccctcgatggttacaataactactaaatgtcttcacaccccaaaagaataattccccaacattttattgaattaaaccgagtgtaagcaaatgcaaccacactctaacacaactcctgaactaactaattccagctcacattaatttcttatggtgcacctcacaatacctctcttgttcattcgaatagacaaaagtaatttggaggtctatccataccccctacaagtttcaccttattctcaaggtgcaaatgaggaaattggtcctgaatgattgagaaatcttcccaagtatcttcaaaaggaggtagaatttcccacttgatgagtgcctatggagctatcttatgtgacccaagatgaatgtctaacacctccttaggagtaagtagccactctatatcatccatgaggcatggaggaaggacccaagcttgcaagtgtgttcccaagacagcccgcaggagggagacatggaagataccatgaatggaagactttggaaggagttgaagataataggcagccgagccaatgcgctctagaacaagaaagggaccaaagaatcggggaccaagctttccattgagatgtcgggccactgtgcattggcaatgaggtcttaatttggcatagaccaaatctccaatggaaaaaacttacatctctttgctttctattagcttgggacttcatcttttgttgagctcattggaggttttctttcagcaaaaccaaggtaacatcccttgcttgaagttgttgctcgacttctgaaactttggtggttccattttcaaatcaaagaagtggtggaggatcacgattagacaaggacttggaaggagtcatcccaaccgacacatgataggaactattgtaccaatattctgcccaggccaaccacttaagccacttgctgggtttgacaccaacaaagaatcttaagtatgttttaggtagcagttgacctcaaaaaaataattaactgacagcggagtcatatagatctaatgcttgccacgtgtgtgtacaaataagaataaaaagtaatagataataggattttttatagaggttcgacccccttgtgatagtggtaatgacctactccctttttaactgagagaattactgtccttatcgctataggtgagatcttcatagtacccttaggattacaatgtatgaattaatgtttggcagaactaaagtgttggacaacctagggtaggcctgtcagagaaagaatgaggaagagagagagtttgtcaaacacttagagtttgagatcacgtttgtagcttagaggcaacttaggttttcagacagaggttaaggcttttatgtaggacgccttaaatactaggtttaaaattaaaatcccttagcaattgtacagttagttagatatttacaaaagaccaaagtgtccttgattttagatattattcatgttgggttttgtgccctaaataaaaccctttaca

SEQ ID NO: 26481 - DNA, 4758 bp, Cannabis sativa
aaggataaagattaatctcacctaatccctatgatacctacgacataggttatggatgccctattttgtatctcttgggaacttgtgttcatacattactgccactcaaagacaagttatcccttttgaactattcctaccaatctctataaatacccttgaggaaaataggaaaagggggattgatcggtagagcagagagaaaaaaaactcaccaagaacattctctgtataaaagctctcattaataacaaagactcgtggactacagctcattaatgcccgaaccacgtaaaaatcacctgcattaattatccctaaagctctcatcattatctcatttaattagttgccaaaaatttcggtcaacagaaaccatacaaattaaaaaaaaattaagctaatagttaagagaaattataaatgttgttgactcagaaatctagacaatacttctaagccatacatgctagctagattgacaagattgaaaaagtaggtaaggaattataagagaggcacaacaaatttataatagttcactccctatatcacaacaataatggagctacatatactttgagtttttatttctcacaagatggaaattacagaaaaagactaagtgttagaagctccaatttctagagagagagagagagactagagagacaaactctgaccctgtgggtaattttctaaacttgaaaaattagcttatggagctctccttttataggtgaaggagacccacaaaaatagaaaaaaaagatgtttttgacagttaatgatgatctaatgcccaacggaacctactgtgggtaacccaaagtttattttaataacttccttggggtgaaatttgatgacgatagattcagaattgtaattgaagtatcacacatgacttgatagaacattgaattatcttcgaaatgcaagttgaattgcatcaatcagatcaaaattgagtgagctatggctgttttactgaaggcacttcatgacccagtgtccatgttgatatcccagcgcccaggttgacatatgacgtcaacctcggcaatgagaaagtttaaaaatttcaaggggatgtactttaagattccaaagtgatattttgacatcacttagtcagtttttgtgctctggcaaagctggtcaccagtttttggagatgttgctgttctgcggaaatgagagactagaaactttcaattccgagtgagtagaaatgagaaatgcaaagttgtgaatttgaattctctgacttcatgaaactttgttattataaaaaactagatggacggtcgaaacgacatcagaattgaataagcagaaactagcgcactaggccttttgtcaacctgggcattgggtacttacttccgagctcttgggatcttgttttgattccaaggctttcaaacttgaggaaaaggtctcctaacctattttcaaaaattccaaatacagtggccccattagttttggcatttgagcaatcgaaggcaacgtcttaggttaattatcgacctgggcactgggcctcacacaaagttaacctgggcgctgggcattaggcccaacaccaagtcaaccgggccctgagccccttttctaggggttaaagtttgtggttttccctccaagttttcttgaatattcattattttttatgaagggaaaaatgcccagaacactttttggtgaacttgatcagaactaacccaagttaaccatatgtcaacctgggcgctgggtccagcgccaagtgtcaacctgggcactaggtcccagtttttccccttcaaaaattctggttactccacaaaaatagttgaatctcaatattttctaaaaataaagaagatgctcggaagcattctaagaaaaaactccatttaaaatggcccaggttgacaaaatgtcagccttggcatagggcaagccccatgtgtcaacttgggggctgatccctatttttttgcacttggaaagtgttttttcttcctcaaaagacctatttccctatttttgatatagacaaagaagatataaaagttgaatatctgatctgatacttcgaaggcacccaggttgacagattgtcaacctgggcattgggtgctcggggccctgagtgctcaaaaatgaacttgctcaaaattttattttgatgcctcaaatatatctgtggtgtgtctagttgatgttgtaatgcaagttttgacccttttgcacttagacagccccgaaaaccaaaaccctatttggatatgccaacttgggcaccaggggaaagcatagtttctaggttggcttccaggtcccaggttcgtgtaattttaacttttaagccttggattaagttcctatgtgtcttcatggtacaaaatactaaaagatactgagttgtatccaagttattgaattccaaacttccatcctagagaccccgaagtcaacctaggcgcagggctagggtccccttgcaggtcgactgctatgacttgggtctactcaacttcgtgacataatccttcatgcaatgtgttaaacattgatatccacatcaccaaagaaattttctaggtgaacattttcccctatgtcaactttataaatgtgttgagttggcttgatgacgtgaaccaagtccatttcgcttgaaactaccagatgggcatcaattttgacattcttagtgttaacccagagactttccctggtgacatagacataaatgtttgacacatggcatgaaggatgacgtcacgaagttgagtagacccgagtcatagcggtcaacctaggaagggaccctagccctatgcttaggttgactttgggatctctgggatgggactttggagtttaataacttgaatccaactcaatatctttcagtattccttaccatgaagatatcgagcaacctaatccaaggttcaagagttgaaatttcacgaacttgtatcccagaagccaacctaggcacctaggatttccattcggtgcccaggttgacatccttaactatggttttagtttttgggaccatcttagtgaaaaatgactaattttgatatgaactagacataccacagacatgtgtgaggcatcagaattaaattcaaagcaagttgatttttgagcaattgaggccccgagcacccagcgtccagtttgacaatctatcaatcttggcacattccatgtgttcgatcagagatctaacttttgatttgaatccatatacattgaaaataggtctttctgaaggaaaaaaattagttcttcagcataaataacagggctcagtgcctaggttgacacctggggttccccctgcgcccaagttgacacttggggctggccttgtgcctaggttgacaattcaccaacctaggccacaaaaaatggagttttttaggaattcattcaagcatcatcttcatctttagaaaatagtgagattcaactatttttggggaccaaatgttatttttgaaggggtaaaactgggtctcagtgcccaggttgatagctggggctaggcctagcgccgaggttgacattttgtcaacttggattatttccaatccaattaagcaaaaagtgctttggtcattttactgtcatcagaaataacgaagattcaagcaaacttggggagaaaactacaatcacgagtccctagatatatggcctagtgcccaggttgacaatcaatctgggacactgcctgtaattgcttaaatgccaaatctgatgtgaccattgaatctagaatggtcaaaaacaggagaggagaccccgatctcaagttcaaaagccttagaagtaccaaaattagaatctcaaaagtttgtttaaagggccgaacacccaggtcaaaaaatggcttggttcgctaggttctacttatccgaatttgattcagtttcgaccttctatctagtttttcacaagtacaatgatctatatgcagtcaaagaaacaactttgcattgctcatttctagcactcccgaaaatgaagagtttggagtctcccatttctacaaaataacaacatctttgagaactagtgaccagctttgcgagaacctataaaaagaataagtgttgtcaaacaattacttaggaatctcaaaggaaatcaattggaagtctctacacttgtacatcatccaagttgacgtcaaatgtcaacttgggagctgggatgttagcttgggcgctggatgtcaatttaggcactgagacctgaactgccttgagtaaaacaaccataactcactattttttttatcttattgacgtgattcaacttctgtttataagctatttaaaggatctatcaagtcatgtctcacaccccagtcaaaattctaaagatcccttagctcatttttcacatttagaaaactacccacaaggtcagactttctctctctagactttctctcactagagttaggagtttttgatacttagtctattactgttattacaaactctaagtatacgtatctccattactattgtgatatagggggtgaactactgtaaattattgtgtctctcttattaattgctcaacaaactattaagtctcaccaatctagtgagcgagtgtggcttagaagtgttgggttttatgccctaaaatatagggggtgaaacagaagtattttttcattcatttgtgtatgttttggttcacattgtcaattacttgtctatttgattt

SEQ ID NO: 26482 - DNA, 1442 bp, Cannabis sativa
accaacgtgcggtggctgtccttcagccccgcaacctgccatgaaaatagttagctggaatgctcgtggattggggaatcctagcacattctgacaacttcgtttgcttgtcaaagagaaaactcctcatgttttatttattatggaaactaaattagcttgtaatgcagttgctcgttttcgtcaatctttaaatttcaataatggacttgaagtccctagggtaggtttaagtgggggtcttctcttattatggaaagacaatgttgatgtaacacttcttaattttaatgcaaatctctttgattgttacgtgaagtgtgataatgggccatcttggcacttctccgctttctatggcgcacctgaaattcaaaatagaatccacacttggaaactacttgaaagatgtaaggatgttgcacctttaatgccttggttagtgattggtgactttaatgaaattctatctaaccaaaacaagcttggtggagccttacgaagtgaagcaaaaatggataacttccgaaatgtgttggatatttgttacctttatgagcagccatttgaaggggatccatacacttggatcaagggacgtcacaatgttaatgctacaaaggaaagacttgattggtgctttgtaaatgatcaatggaaaagcaattttgaacctattacaactcatcaccttgactatttcaagtctgaccatagagcaatttctgtcacggttgttcctttggttggccaacatcatagcactcaaagacactcaaggtttaggttcgagaagctctggttatctgatccagctgctgctgaaatcatccaccacgaatggaaaaaaatctggcaggctcttctattgacaatttctgcaagaacatcgaagcatgttcaaactcattacaacgttggcataaccacaagtatgggaacatgaaaaaaaaaaagattaaaaaggcacataaggaagtggaggatctcaacaaccaaaatgtaagaacttcaaactccatgactttgctgaaaaaaatggaagacacattggaagaattattaacgcaggaggaagtttattggcaagaaaggtccagggtcaattggcttcaaagtggagatgagaatacaaaattttttcatgcctatgcctcatccaggaagtcgaataacacaatcaaaacgttgcaaaattatgcaggtgtagcaataggctcgaagaatgaattgacagaaattatttactcttttttggaggacctgttcacggcatcaggtactgatgcttctgcattaaaccaggttacacagtcggttcccaccactgtaacagatgaaatgaatcagctcctcctaaggccctttacggataaggaagttttggatactcttcattctatgagtccagataaaagcccaggaagtgatggaatgtcagc

SEQ ID NO: 26483 - DNA, 1075 bp, Cannabis sativa
ttttttgcaaaatgcaggattgggattcacaaaatggatcacaaatagtaactcaattgtgtggttttgtgacaattctatctggtacttttcttctacacaaaaccaaagacatgggaaacgctacgccgggagagacaccggtctttcgaagtccaacgcaccctattgtacagtcaaatccgcgatgatgatgatgatgatagctgcgttgctgccacgaagatcgacgacgatgacaacgacttcaatcattaggatcattttcactcaaatcataacacttgtgactaatgactatacaacaactttccaaagtttgatggtgcaaagaagagagtagaattagaaaaggtttgacaatttttttgagctaaaaagataaaagacttaattgttcatttttgtgtgagcatgttgtttacatctatgattattttgtctcattgttcatgtgaaaatatgatcacatattattgttcagttaagttttagtggttgaaattcttagattttatttatttattgatttatttattattgttataattatttttaatgttaatatttgagactattttgtagtgtgagcttctaatagtgaagagaaacttgattaggacatgattgaagatatatatatttatgtaatattcttgtttagatttttacaatatcttctcataattctttttgccatatgcatatataaataaagattttctttttgtatatttattgcccttgaaaaaatctcaacaacccaaacaaatacaatttattgtattatttaatcaaaattgcacaattaaaaaaataaaagaaataataataatatgttggcatataaaattaggggtgttcacaaattgatttggtcggaattttcatattttataaattaaaccaataagaatggtttgaatttgttcgaaactatagtttaaatagagtttataatcatttattttttaaagtaattgtactatttatgagattgttatttttatatttaagattatgctttcaatatttccaacaatatagtactctaaaagtatttttcacctttata

SEQ ID NO: 26484 - DNA, 2129 bp, Cannabis sativa
acatcgtaaataaaggacgagaaagaaaaggaagatattatgttaatctttatcactttaagagtgcttaaacttttcagtccaagaatcatcaagtgacccatttttacaaccagaaacagggcaaccgattctcgtaatgttatcctgaagctttgaaccaacttacctgcctatacactccgaacagtaaatgaaagatgggtcgtcttcattcttgttggaatttgatgactgcccattttcgatcacggaaacacccgcaaagggttccaatatccaagtttcaaacttttgtcgacaattagaagaatggagacgagaagccatgatagcaagttcaatgtctcgatcctcattgtactggttgactgaaatggggttggagttgtttgtactcttgtccaaaatggatgatcctcattatgtgcttgtttagtttctagtttgggcttcttcgtcggtcttctttgactcacctctactactctctcctcacctattactctcgtcatcatcaccatattccaccaactaagctggaaatcaatcaaattggtttccacactttctggtctcctctccttattaatagctatgttgtttgtttcccaaaacaactttacacttatttacagatttttatgataggagtagttaatacctttacaatataggcaactacccttaactcacttcctaattttttaataaaaaatgtcaaactaaccgatcaagctaaaaaaaatgccaatggataatagtgacctaaatttttttatactcaaattcgaatatattgttaaaaaaaaaacaattaaaaatattgaaaaattctataatgcactcttaaaatagatatattgatggagcctaagcatctaaaataattttctagtcaaattttttctatgctataattatttaagacatcctgcaaaattttaaaaaatttggaaaaacttgacacatcgaaaattatattcaattagtgtgttgttttctatattgtaaattatatttcaaaatttttaaaattttgtagacatcttaaatagatataacgtacataaatatgaaaaaaaattagatcaaaaaatttaaggagtgcattatggaatcacccaaaaatatttgtgggagagataaaagggcaaaagaaaaaaaaaatctttctctacatatataaaacctttcaaggatttttattatacatttgtgtttgatgcatacgatggaaggcaatttttacgcatatgatcgtttggctttgtttggcttaatttgaattgttgtgaaaattaaagaatcaagaagcggtcatgtggcagaataaaatcattttgaagtatataatctttttttttctaatttttaattagaatttattataatatttgattaatttaattaattattaatcataattaaaatatctcttatccatacttttctcttaatataaataaaacaataataattaaacctaaacacatattggcatcttcagtcgctccctatctatttttctattttttttcttcaaattctcaatctttttctcacacactcacaaacataatttgattgtgtacaatgatataattacataaatgcatatttcttgatgatgattttatgtacacattatttatctatttattttgctccatttttttttcatgtcaaattttcttttttaatttcaaattcaatttgaaatcatcaaattatatcccttcactcatactttcatactttctagctcttcatctcttatttcattattacaattaatataggataaatttattgagaatgtagtaacaactatgagatatagtgataacataataatgactttgaatgtaaactcaactataagtagaatacagtaacaataattctaaaattataaaagataaatttatattatatttttttaatctctatgtgaggatatattttttaatttctattaatattttcttcattgtaatatttgaaagtatctcttaaagttaatgaatataagaaattaaaaatattcaaaacatatcattttaatttaaatttgattagatataactttatctattttcttattattaatttgatgaatttttttg

SEQ ID NO: 26485 - DNA, 1605 bp, Cannabis sativa
gtgcacttactgctaaccccgtctaccatgcaaggacgaaacacattgaactagatgtgcatttcgtaagagacaaagttttagagacgaagttggagattcggtacattccctcacatgaccaagttgcggattgcctaacaaaaggtctcagtcccacaagattcaagttcctgattgacaaactcaatgtggttgcatcaccacatcgtttgaggggtggtgtcaaagatattgagtctactggtgaagtggcagctacaagggtatgatggtcaatgtaaatgagggaatccctatgctgatcctgcaatcattgcaatcattgttttccctaacaatttcggttatgcatagattttagtgtaccacgtgttctgctattactggttttgattttcccctgtattctctctgtaaaggcctttttgcctatttaatgaaatgtagcagcactcactcattgagctgagttttcaattcattccaattctataatttcacttggtatcagagcattaggctcttttctctgccatgtcgactgagcaaagccagacagctcaagtctcacctacaagagtagggaatggaaactcccatggaagctccggagcacaaccgtccatggctgctgcagtacctcctctagcggctcctttcagcaacactttgagccagccattctcactcaaactggaccgaaataatttccctctgtggaaaacgatggtgtttaccatcattaggggtcacagattagaagggtatcttaatggtcaaaagatatgcccacaagagtttattacggttgagtctaaaaatgacaaggatgaagttattactgaacttcttcctaaccctgaattcgaggcatggatcatacatgatcaactcctaatgggttggttatatggttcaatgtctgaaggaattgcatctgaagttatgggatgcagatctgcctccactctttggtctgccttggaggaactctatggagctcattcgaaggctaatatggatgatttgcgcaccaagattcagacggttcgaaaaggaggccaatctattgttgattaccttagacagaaaagggtatgggccgactctcttgcccttgccggagatccatacccagaaagacatttaatagctaatgtgctgtcaggtttggatatggagtatttatccattgttttattgttggaacaacgcactgatcttacttggcaggaacttcaaggctctcttctcagctttgacagcaagctagaacgcttaggagccatctcaccaaccaacaaaacactgggcaacccgtctgcagctcttgctcaaaaaccatctcagccaagtaatcgaggtggatatcatggaagaggaggtggttacaacagtaacccaggccgtggatatgggaacaaccctgcttatcaaaattctacaggcaagaatagcaacaataattgtgggagaggcagatatggcagaggaaattctcgacccacatgtcaagtatgtggaaaatatgggcattctgctgcagtgtgttacaataggtatgatgaaggcttcatgggacagccaccacagtcagaaaac

SEQ ID NO: 26486 - DNA, 1104 bp, Cannabis sativa
  modified_base (930)..(930): a, c, t, g, unknown or other
atacccgatgggttccccataaccgatgagtattcccctaccccgaatccgttggttattagacggggatggggcggggataggggtatatataggtagcgaggatgggagcagggattgtattccccgtacattaaccgaacaatttccatctctaactccatattgttaaattttgtcccaattttgctcataatatgtaaaaacttatataggagttgacattgcctttttcatttcttggctggccacaaaatcaacttattaccttcaaaatcatattcactagggttaagtagttagcaatttaagacaacaaaacggcgaaacaaactaataaacgttcgatatctaatcaacttccccgcaaaggctcttctttagctattctacttcgagtgttcgcccttgccttacaaagaacaaatccaatacaacaaaaaaacgatgaaacaagtcaataagcaacattcccacaagctcaaagactactcttgttttggttatttttgtttgcaaagaacgaatgtactatattattattttatttgatagatttaatttaataatatttatctatggtaaggttataccatgttattattatttacagggtagacagaatttgtgggcctaaaaatttttcaatattttttttttataaaagaaaaaaatagatctttactttctctacatcttcttcttcgtgtattctgttaatcatgtactcatcagattaattttagagaaacttacaaaaatactggaatttgagtgaatttttacaaaaatactgtcacatgaatattttttcaaaaatactgtgtttttataaaacactagtaaaacataaagcaaaacaactcaaaaaaacaatagaacaactaaaaaaacaccagtagaacactagtgaaacttaacacagtatantgcagtatgaaacttataaaaacatacagtaaaaaattctgcctgacagtatttttgtaaaaaaatagcaaaagttaatatattagtatattagagcaagtgcaaggaggcactaaactttggatttggtgtgtgtaatccctccaacgaagcagcaaacggtacatcatatat

SEQ ID NO: 26487 - DNA, 5727 bp, Cannabis sativa
aaatgcaggctttctctctggttgctcagttgctcttgtggtgaccatcattgtgcttgtacaaataagaaatcttagaaaaagtgaatacagtggtcaatatatggacaatatatttcctctttataggtaagttctaaaaataatgaatgaactcttattcatagtcctacaattgcataatgttgagtatgtttttgcagcttgttcggattcatagtcctacatatgcttatgttctcagcaaacatatacttttggaggaaataccgagtcaattatccatttatattcggtttgaaacaaggaacagatcttggctacagacaagtgtttcttctcagtgcaggtctttctgtcctctctttaggtgcagtcatctcaaatttggatatgaaaatagacccgaaaacacgaagcttcgatttgttgtctgaattagtcccaatgggactcgtcgttgtgagtatttgcacaaaactcattcaacatattaaaaatctcttgttatgttcactactaaaatccgaaatctttgcaggctctgcttgtgatgttagtcttgcctttcaacatactataccggtctactcgctatttccttattgtatctggttttcattgtctctttgctccactctacaaggtaataatgggactaaaatcttcacataagcagataaaatttagtgtaatcttgaagcagaaaattcatattaaaagttcttttttgaatcgtttgtaggttagtcttccggattttttcttggcagatcagcttacaagccaggttcaagccttcagaagtttagtattctatgtctgctattacttctggggtgatttcacaaaaagacaacacaagtgtcttggcaatgatgtgtataaagctttcaatcttgttgtagctattattccatactggtttcgtcttcttcaggtattctaatgtcatcccaagttttttttttttttttgagtaagatcatctttaagacaggatttctttaagggtggcaatttgtgttcgtggatcgtgtcgagacttaggtattacaagaaaatatcaaattcaaattcaactcaaaaacccaacctgttcataaacgggttaacttgacctgacctgtttatataaaaatgatgcttaattttggttatcaactcattaacatgttcataataaatttaacatgttcacaatcttacacatttttgagcaatttaacttgtttctgtcttatttaactaaaaaatataacttacatgtcgtaaatacaataaatttaagagtgtatacttacataggtcattatcttgtcatatttgagttaaccatgtcaacccgaaaatgacccttttaataaacaggttagccatatcaactcaaaaatgatccaaacccgtttattccgtgggtgtttcgagttgtgttatcgtgtctgacctagattgccacccctagtaattcttatgcaatcagtctatattttttgcagtgcattcgacggttgctcgaggagaaagacggaatgcaaggcttaaatggcctcaaatacttctcaaccataatagcagtctcaatgagaatactttttgattccaaaaaggatcctttgattaaattcctggttatatctagctctctgattgcaacaatagcaggcacatattgggatcttgtcatcgattggggtcttctaaggcgagattcgaaaaacccctggttgagggacaagctaattctacaacagaagagtgtctacttcgtggccatggtaagaaaatggaatgaaaccttaagatcctaatagtataaagatgaaagggctcttagcttctttggttatgaatgatcattcattcaattttcgggtacttgacaatgcaggtagtgaatgttgtgctgagacttgcttggttgcagacagtgttgcaatttcaaattgcttctcttcatccaaaggccttaatcgcaatcgttgcctcgttagaaatcattcgccgtggcatttggaatttcttcaggttcaactaattttcattttgccattagtatctttaacatgagattattactaacatgaatttaatgatgtttaactttgtcaggattgagaatgagcacttgaacaatgtaggcaagtatagagcattcaaatcagtgcctctacctttcaactatgatgatgagaatgatgagaaagaagagtgaaaacagtgacataacaacacaagatgtcaagtctcaaccatttttttttacaagtgttttaggattagaatgtatttgtacaaaaaaaaaattcaattagtttggtttgtgaatagtggcttgtggatcatccattgttcaaaaccctgattttttttattgtttaccctctttttggaaaaaagaaagaaaaactacacatacaagaaatttctatagaaaaagaaaatatatgctatactttgagaaggttgatgccttaaaaaagttatttaaggcataaatacttaaatatttttggattaaatatctaatgttactttctattcctttacgttattactaattggttattttcctaaaattaactaaggtgacacgagttagcatattccaacatcatattttatcgtaacaaatatgttcattaaatttttaaggtcattaaaaatgttcatgaaaatttaggagcacaattcggtacatgttaaagttcattaaatttgtttaatttcgtttaattttgttaatatggtaattgtccatgtacaaaatcatgcctctcaaactttaatatttataaaatcatgtcccttgaactttaacatgtaccgaattgtgcttctaaattttcatccattattttctttagtaaaattagacaaaagttttaaatccaacaatctcaatagttcaagggagaattttaacaactagaaaaattcaaaggacatgatttagtacatgtcaaaattcgagtataattaattaagaaaaaaaaaaacactttcaaatcccattccttaaccatatttctccatgcctttcttcccggctgcccaaactagcacacaaaaactgagcaatcttgtaagttatagcctttgatttgtttaaatttgaacagaccaatgttgcagcgatttcggtatatgaacttcagaaatttgaacatggtagacagaattgttcatgtaaactttgatatatttaaaatataacaaaccaaatttgcatcaattatttgattaacaaaatgttccaaaataaaagacaaaatcagaaataacaatcttattatccatgtaaacaaacatcacaaatatacaaatccgtgtgttttaaggaacaaagataaacaaacatggaaatgttgtaaaagagaaactcccactgtagttagtttactttgtacacaaagagcaccacttattaaagggtccatttcaatggtacaggagctgtaaagaacagagcccctgttattcaactccaacctgctagaagaaattgaaatcaaatacaaaacagcaaccaatcgatgaaaaaaaatgcagtcaaagtcatacagagcgggaactctcttgctcagtcttcttcaccgttctgagaagtgttgggagtacttgaagcggagttttcagatgttacagccccacttccctcgtcttcctggctcctaaacacagatgaaaacgacaatggattgtaagtagagcttgctttttgaagacctcgtatagctctcattgcagcgattgtgcttcgatataagtacactgtgtcttccccgagatttgatggtgtctcggttatatttgcatggttgttcaattgctggtttgtcttgtcttgcaagggtgaggttgactcaatgatttcagcttccagcgggaagagaagctcaagatttgcctcacattcacggactagccttgtgagaggctcggtagagaaggatggttggcgaagggccagttgggtgaagggtaaacgcaacagtcccccagttcgtttatcatacttcttcagaattttaacaagtcctattaaaaacataaaaggaatgtaatttcagaacttaactacaaatttcgtctaagcaatctaacaatgaaatgaagaacctgtacctgtatgatacaggatgctacaattttagaagcaccatctccctttgtaatgtcacaaaagctcttaccaaaattattagttagatgaggaagaaaagaagtgatgaaatcgtttgtgtacctgcaaagtttagggagctatagtttttgagaaggaccatctctccatgaatggcaacaaagtcccttcgaatgtccataatttcttcgctgaactcgctttctgatgtaaaggctctaccattgttgctcttctcctttactcgttcgattcgttctttcagctcctgtaacattagcatgaatgataagattgtaaagaccagacaatgattctaaaaacaaatattgggtttctaaattagttgcaaaattgataatatcatttgaaacaggccataacactgacagcatgagagtcaattattgaaagagaacataacatgattgaaatttgagcatttgattcaaaggcaaacttaattacaatgctgtaatggaatctataatagaaaccatggctacaagtttaaacatcttccaatctgaatcacctgatttctatctctgaaaaattcaactgacaattgaatttattcacatctgaaacaacccttttcataattattccatcaataagactaattctgttagattttcaattaaccattctcaattgggaataaagttttcacttttcataattatacaaacctagctaagagctattaaaagaaacacaaaaaaaaaaatcaagaaccaaaattttctcttaaatccatcgaattatacaattatcctaaatttctcaaacccaattcaaaaaaaggcaagtaaaattgttctcacctgaaaacgaataacgaattcttcctctttatcaacatagaaatcgttgaacttgtcgagttcttcattgagaattctaatgaaccaatcttgtagttcagccaaaggagggttgccctgatcttcaaagccttctagagccgccggagcaacagcctcgaagggttgatgttgatcagatgggtttgtgggaaaggtcttgaggaacttcttgagaggtttgtagcagagaaacttgtccctccattccgggagggtatcttctagatgggttgtgaactctttcccgaacttcattgaaaccaaagaaagaaagagctaagaggtatgagctatggctttggctgtttttggtttgagaaaaattagcatattgaatagagattagagagatatttttgtgaaggaaaagaatgaaagagaatcgacatgagaatatatttgagttggacgattgtgatttgtgatttgtgatttgtgaatatcaagtcttttaataaaatattagagaaatgcactaataataataataataagagtaatttgtaatttaaattcttaaatttaatattaatatttgtacagtttaatattgagttttatatattaaaaaataacttttaatatataacactaaaattctttcaaaaaaaaatatatatatatatatataacactaataattataaaaagtcacttataaaaagtattgggtgcccaataataatgcactaataataagagtaattt

SEQ ID NO: 26488 - DNA, 3575 bp, Cannabis sativa
atcccaattcaaaattagcagcttctaaacaacaccaactctaatttgaaagcataacattagaacaaatacaaaatagctagcttgcaatcacaggaaagcaggttctcatggacgaaaacaattacgcatgtccatagataagaaaatataatcacggagtaacccaagttgtagcgagataaacaatcatcacaacctcatcagttttatgaatcgcattattcgcttttcccaatgttcttcgaaataatacaattagcacgaaatgaaaggctcgtcttagctgggtcgagtaataattttaattttctgtaagtcaaaaacagcattatccccttcctcaattttctcagcagccaaacgataatgtatcacataaatgtcaaatccgattcgcgagaaaaaaaaaaaagaagacgaagaacgaaagattaacacagaaagctttgaatctcaaaattagggccaaaatcatcgcaatgaaacaacaatggccaccaaccaaatgcaccacaatcaaacactcaactacgaaaataacaaattaagataattatacaaagcctcaagcaatgtttatccaaaacatcaaagaaacacttgaaaatgtgctcccataaaccataatcaacaaatctttatagacatagatttcttcagataagttaaaatcaacaaatcttccattataaaaaaaaaaacaaacaaacaaacacatcgacaacgaaaaatgaaataatcttcggacaatttattttagagaaaatcaaccgctacctgctgaagacgattttgaaatttaagaaagaaagaaacaccacctactcccagtagtataaacagaatagtgtgagttaaatctcaaaaatgaaaaggaagctggtgatgaatcattcgtctccgataagagatctcctccgttgaatgaatcagcgccgccgaacttccaccgcgatgcgttgcgatgtcggcggctatggggagtaagagccaaagaagggagcgatgtctttcctttgttttctattttcttgctttggtttctctggttcctcagattgtgccgtttaaatgcacctttttggtttttattttctatttttaattttctttcaaatatttaatttaatatttttctatttttctttttttcttatcctggatgaagttttagatcacatccaatattgacctaatcaccgtccaagtttaaatcaacggatatgatcttcccttccatatcttgccaggtgtacaggttacttatttatttattatttatttttttttgaaaaatacaaattagtaagtaatttaattaattgttttgtttattattctgttttatttttaacgaattttaattaaggatatggaactagaagacgtagacaaatgatccaacgtggcgtttgggcattctttttactgtttagtccttacgagaattaagttaggaacaaaattctttgtacttaaaaattggacaattctgtaaaagtaaccaaaagcaagcatgaagaatatgctgatgatgataagttataacgtgtgccaaggcaaagtatcaattaaaatatagattatttattggatatggataacgagcaatttatataaaagaaaaataattagtttaactttcaaataaaaatgttaataataatactacgtttagtgtagggtctacataaataacggttatctctaattaagctttttaagcataaagttagacttaaagcttcatttcatttgtgttgtctatatgtttgggtggaaaaggattaatcataagtcttgatacatacatatataacagatgttattgcaatttgtatataatatttctataactgagaatgagcaaaattgaaatagttatgagagattaatatatatgggtgtgatcattgttcaatgaaaagtacttgaaaataataaatacatatatattgtatattaatatctctacttatcatataattattaatatttggcatttgctctcatcacatggtcacaaatcacaatctgatcatcatcgttttggccaaaaagaaaaacgacgatttttgttactaagaatgttggtatgtttttgtagggactggaggtgtgatatatgtgtgtatatatatacatatttatattgtacacatgccacgttcatattaattaattaaacaagggagtgagatttgggtttgggtttggggccattgaaactgaaagtgcctcttaatattatatcaataggagagagtaatttaatttgtgggggttggtagtgtatatatatatgggaccactactaattaatagttatgtaatctactctttggcctaatatatatttggtagggctagccattgtaaaaagaggctcactaatatgctacttctttagaagttgttctcaaagtaacatgcaaattcaccaatcttgacaaacaaacaaaactaaagagtaacaaataagattgactaataatatattctctattcttgctatgttacaaagtaaggcattgtagcaataatagccaaatatattaatatgttacaatatatttctccttccttcttatttccaatttgttttttccccttcatatttatatatatacaaacaattttttatttttatttttatttttttataagaaaaagagtagaaacgtaaaagcaaagaggaggagaggctattatataataactattaataaagtggtccaacaaaagttttggtgagccatgcaaaaagtactagagtaaattgtatctatatacatatatacctactcaatttctataatggccacactttataagtgctacataactaacactatatacttacttatatatactgagtatttgactgtcatctctatctactacagagtgacaatatgacatgcatgaatgatgctaataactaattaattacagcaaataatacgatttaattaattaactaactacacatgtaatgaccttatatatatcctctcatcatctcttaaagcataatttataattattgtagttgatctcatgcctatgacaatgtaatgtaatagagaattaaactattattattaaatagtttatttaaataggaaaatggtaattaatccagaaaatcacaaagggcgataaaacagaaaaggaaacgcacaaaaaaagatgagcatgtgaaggtggggttgggaggagcttccaaagccttggattctatttcacgtttcattagagagggagggactatatatgtctttattactatttcactcaatttcaccaccatttttcttaccctccccctaaaaaaacaaaaataaacttatttatataatattataaaagaaaaagaattcttttttattattatttttttgaaaccataaattaaaagaaatttagcatataaaaatacaatttctcaaaaatatttcacatataaaaggattcacactctgcaaaataagatcagtgtatttaacattactcaaagtacatatatccaacaagactctctctagactaatattaaaaaaaaaaaaaaa

SEQ ID NO: 26489 - DNA, 2199 bp, Cannabis sativa
aaatctgattatattgaaatgggctttatttagcacacaaaacccaacacagatactatcacaaatattcttttccacatgcatcacatataagttgtgtttcaactcatttgtactctaatactcaagttcataaaagatgtttttttcctccaattaattttagtctcacctcttttttgtttgtccgtagctcgttgtgataacgcattcacttgttctaatatgtcatcgtcttggaggaagtctcttcttaacatttccatcaaattcacagtcctttctcatactgtgattggatggcaagaaacgtctacggccaacataagaggtcttaccaatcactcgaatggaactagtatcctcgttgcatgtaggacaagctttatatccctggccactccatccagacaagttactgcgggcaggaaaatcattaattgtccaaagaaaagttgcaggcaacttaaacattaaattgcttgtagcatctcttatttcaatctcgttagtccacaattcgttcagctcatctaccattgtcctaaaaaatacatccatatccttactaggtgatttaggtctaggaataaggagagtcaacaagaaattgttatccttcatacacatccatggtggaaaattgtaattttccaacactacaggtcacatactgtacgattggttcatgttttcaaaaggagtaaatccattaacagctaaacctaatcaaacattttgcggatctcttgcaaaatcagaatgtctgctatcaaagtttttccatgcagcgaatcgcaggatgacgcataacactattttctttcacgcccccagtaagatgccaaaccatctctttggtcgtatgtcttgaactatataatcttttcaatcgaggagtcagcagaaagtaacacatcaccttatgcataacttttttccccttgtgttctcattaacccatctactggtcccacacactgagcaaaaatctttcaatgcatgctcattgtaaaataagcaacaattattcttgaacacatgaattgattcttaccctaggcctaatttacctaacttcttctttgcctcatagtgtgtttcaggaattttgttatccttcgaaaatgtaaatttcagcaatttcaacaatggtatttttcccaaatttttcaagtgcattaactttgctataaatttgagggaggatatcaaattgcaacccgatacaactctgcctcgatctcctcaaatatttcatcataatattgacccctctaactaccatcatcggtggctctttcttcatcgtttataggagggaagaaatcttcaattacatgaaccatctcatcgacatcaatattgttgttagcctcgtctggttcatccgactccccatggtaaatctacctcttataactgcttacaaaatcctttgtaaagatatgtgtcagcacagtgttcaatggatgcagtccggtattcttacatctaacacaaggacagaaaattcttccgtcacaatctttgtgattagatgcaagtgccataaagacctggagaccttccaagtaagctggatccttacgatttctcatggtcacccaagtcttatcgattgtcatctaccaaaaaattataattaataaattataatcaaacttgtttgtgtgacacaaattttatgatttacgtacaagttgaactaattgtgcttttatttcatgttatgaatttttttaaaacttttagtttaaataatattttgataattctaaaagaaacattgggataattaaacttataatgtttatctttcttttaataaaacttagatattaaataaatttaaaaagtttattacactaaaaatttaattatttaataatttgttttaaacaaaaattaaactttttttagttaaaatacttagttttaaataatacttaattatataaaataaattttaaaaaaattattaaattaaatatctaaatatttaatatttttttaaaataaaattaacttttttttagttaagatacttatttttaatattaaatgcattcaattttaaaatatttataataatacttatctatattaaataaatataaaaatatttattaaaataaaaaagataattatttaataatatttttttaaaaaataaaataaaatttctttttaattaag

SEQ ID NO: 26490 - DNA, 1915 bp, Cannabis sativa
  modified_base (670)..(671): a, c, t, g, unknown or other
tatatatattcatgcatgcacttagataataataaatctttttttggactgattatatatggcgccctatagtttaacttttttttttttttatatgggtgggtggttggcacttttttctcttattctttcttaataataattagtgtcgtacataataattataattctttcttacaaagaaaaagaaagttaggatgataacacttattagttttgtagctatcactagtactatataagagaaatgataaaacctccacccactatctaaaggtatcatattatttgactcggtgttataacctaataaggcttagaatatatctaatggaaatgtaaataagtgctgtaaagttaaatataatttatttaacaaaaagtacacttgaatagtgtattaaaaaattatgtaaatttgtcacataataaattttatattaaatttaatacaatatttattatgatataaaatttacatcataataagtgtactatttttttatttatatttatggcatttatattattttattagtataattaactatagcattaaattatgaagaatttatattattattttattgtcttatatattaaaataataatataattgatgataaagtgttatgagttttatttttttaataaaaatattaattagatnntaaattttacatcaaaattttgcaattgtgcatttgagcacaatgctaaaatttgacataaatctaccataaaattactttttgtgtcaaatataacacaatttttacatattccattagagatggccttatagtactaaggcaatgttaaggtgttaatttaattaaatccgcattattttgctcatatgtaatgcatttaatcagcactaagtgtggattttatattttggatccaatctaatctgcatagtaactcgaatccaatccaatccaattcacaaaagtgcaagtagatcgattattttggattaattatttttaatattgaattctttaatatttattaaaaattatcttttttcgcataactaataataaaaaaaaaagtacattattgttatttttatgtctctaataataaattaaaattaaaaaaaaaattaaaaataataaataataaatttaaaacaaaaggaaaaaaattatacatgttttaaattatattttcctcgtaaataagagtggaatatatatttaatctattatgttttgaaatatatttatataatatatattagatttttaaattattatttttacattataatattaattatatatataactttttaaaaatataaataaatatgtgtgaattgaatagatcagttatttttatgtgtcaatcaatatatataatttgtacaagtacagattttaaattttttaattcaatccgtactagtgcatacattaacactttaaagattgaattggactaaattatatgcatatttaattagattgatagttattattttatgaacaccctcaattaatgtatctcttttccacacatattgaagtatatatatttatatattagatagggaatcatatacttatcgatgtattcaaagcttaacggcttgaacatcactctactaccttttgggacatcccaaaaatcatataaattgtgtgaatatattaaaatatttattgtatcataatgagaatgacctatttagtactttaattgataataataataagctttaagaaaatttggtgatctacatgaatgattacactacaacgaacaggtttaaaaatttgattgggtttagggaatgtcatgcaaattcgggccattaataaatatgagcgtattatttagaaaatttacaaaaatactgtaatttgagtgaatttttacaaaaatactgtcacacggaatt

SEQ ID NO: 26491 - DNA, 2927 bp, Cannabis sativa
attttatttttggtggaggtgatcatgtaggaattgaaaaaatgtggtcattgtcgttgacagtgtttgaaagaaacaatttagtcttagatcagacaagttaatctaattgcattgcatgtggttgtagctggacatagattagaggtcatgctcttttagatagttgagattaaacaacttttcttattgtctttgatgcttaattttttgatttttaggttgtatatattcattgtttaaaaaaaaaactaattgcatgtggtttggttgatttggaattttttttttattcacattacatttgttataagataaactatttattaattaagggatttatattttccacccgaaaaaaaaaatatataacatcccattttctatagagataaagcttctaaaaaaatgatatatatattttttttctctctatcgatataaaaattacactttcgaaggagaaaaagaaaagagaagaagagccaaaactcatttgcactaatatacaacacatatcattacaaaattctgaggtatgtcattatattcacaaacatccctctaagaacattatatttttctttttctttttctttttctttatttttactcaaccctcacttaagttagaaggggtctttcaatgtcatcctctgattcatggcttgacattttttcattttctatcagacaagcataacagaatgatattacctgaaaaaaaaatagcataaaaaaataagaattaacattagaaaggcaaaagaaaatgagagagcattaacttatgaggagaaagaagagtttagtattattaccatgcaaatggatgcaactactatgctgaagcctttgcagttaaaaggtgcatcttcagataagaaccacgctgatatttgattaatttaccacaagtcaataaaaaaactaaaatccaaacttttgaaagtgaaacattaataatgaaaagagaaaaaagattaaacaatctcacaagtcagtggactcatagcgagtggcgatagcaagctcgctatggattgtacaccagcaacaaatccctgtgctttcccctgaaagagaagaatagagtaaatttagagaatggaagtaaaagacttgcatctcttctataatgagtgtcagttcatgatttttcatgcaatttgggaacaaacctgattgcttgagctcgatgcttttgaaataattgcgtaagtctgcatattgagaatttgacagcaaaattattgaacaatcatattcatagttcaccaacataaatataagaaaaaacaaaaaatcacttacagcaggtttcacaagaacatagataactccaaatgaggcacttaagtaaggcacctgcaatatgataattactttcattattcccagaacaattattttatcaacggaaattttttatcaagtatgttataaggctgcaaatttctaaggatcttttcatggaagaatttaagtcaagcatgatttgttgaagaaaataaacagttccttttgactaggcctctttattgattggtcttttaaatctctacttttcaaaatagatcttgtttaatatttttatcaagttgttcacagtgcttacccaagttgcccaagccaaaccatagagtaatgcctgcatgtaagaaagcatcattagattatttcttttttccttttagtggagaaatgagaataatttaatagggtggcttacataagctatagaagaaagtaaggccatgcacaatattactttctctccaaccaatggattcattagtggaagcagcaccatctgggaggcacatcaaaaacccaaatctttcattcaaaaaatgcataataattggactaagcatgatcttgaaaggttatatagatgagtttaaatgcttatgacacattaataattcacctaagagattagaagaccgttaaaaaaatgatattgtgaatactactttcttagtcaagggtaagactatgagaactggtttttcaacttttgcatagatttttatatgaccatcttgtgagaaaaaatattaaatgcagtgaggtgagagaaatatcaatccaaaccatgacatatgtatgaacttttgtagaataaacaatttgagataataagctccataaggaaacatacctgagaagcaatagaacctataccaaccatcatcaaaatttccgagaactgatttttgtcgaagccaaaagctgcctttagatagtactgtgcaagttgaagtagtaataggattttcaattcattgaaataaacagggcacaaaatatgtttcaaaatcattagttataatagcatttgcaaaggacaaattactctaatctaattactgcaaagactaaactaatgcaaatgcaattttaaaaagggcaaagtaaaaatagtacaaagttggtacaatcccatgtttggcaggtatcataaaccctcattcaactctcattttacttgttgaacccatattccaataatgttgaagttctatcctttaaaaatggagtaaagctctttttagctacaagggtggatcaaattaatgaacttgtcctccaaaagtggatcaattcctttcgtttggaataattaatgtagataatgtttggttatccttagtcttttattgtaattgaaaaaacataccagcagaacactgctgattcctgacattcccaactcatagaagaaagaaaccagagaaatgctcctaagtgttggactgcaatggaaatatagcttggaatagtcacaagtggcaactttcatatgattttcataaccaatttgtttcaatatactatctgcatatgaaaaggagaatgtcaccaaaccattcacatagccataaacttaagccttatgccaacaataccactatatcgat

SEQ ID NO: 26492 - DNA, 2995 bp, Cannabis sativa
atggatcttgggccgattgtccttcagaccccacaaaaaaccatgacaaagattctcaatctcttttatcacacactgaggaagaagaaaaactctcatccagtagtttcgaagaccgatcaaaggggattgaataagttgaacacgaccagcaaatgaaagatgtttattagcccaagaaagaattcttggtttcatctttttaagaatgattccacaatcttcaagtctctaattagtaggcctaagaggaatccccaagtattttagaggaaagctcccaatagttaagttgattcttttagctaagtcttcaggacaagtcactctcccacaataaatttgagacttatcaaagttaattttcaagccaaatgttctactgaactcctctaaagcctcctttattacatgaattgaatccttatcccctttacagaaaataacaagatcatctgcgaaacagagatttgaaagtttaagttttttacaaagagggtgatacctgaattttttctccttggctgcaagctagaatctccgagacaagtattccattctaagaacaaatagaattttcttgttagaaaaacaaaatgatacttatatattataattattttcttttgggaaaattgttctaaatcatttttctttactataatagtttaataaatgtgggatctaccaattaaaataataataatgtaataaatgtgagacctaccaaagtttaaaagttaatttagttcacagaaaaaagaaaagaaaactgtgtattgttagcagagtctaaaataggagcatatttattatttaatataaaattaaattagttgagttgggcagggatacaattttctaagagaagatctattcttgattctccccgctccaattgattttattgaagaaaaaagaaaacgtgaacaaaacatgatttaaataatagagaagagtgatgggatccatcccaggccaagtatgaatgatatcttcacgtgaacaaaagtacaaaacatcatatatgaataatagagaagaatgatgagatcccaataatgagattattttcactattttcctttttcatttccacacataaattaataaagaataaatgaggtcaaatatattccaaacatcatactaacgagtgacgagtgagtagtattaaagggaggcgatccgcattagtattttaaagcaccttttttttttttttgtttttggaggaagagaagagagaggaaaaatagcacagatatatcgatgatgaacttgtggagtaatatcttgtgtctaatacttgccttggcaatcatcccagccatccattcaatcatgatcagattcaaatccagttcctacaaccttcccccgggaccaaaaccattaccagtcatcggaaacctccaccaactcggtgacaaaccccacaagtccctgtctgagtttgccaagctctatggccccttaatgagcctcaagcttggtcaagtcacaaccattgtggtttcttcctctgctgtggccaagcaagtccttcaaacacacgaccagtacttgtccagccgaactattccagatgcgttctatgttcacggtcatgatagcaatggtcttccatggattccggtctctgacctgtggagaagccttaggaagatttgcaatactcaactgtttgcagtcaaagttttggatacaaaccaaaaactaaggcggaggaaagtgaatgaccttgttgaggaagtgaaaaagagtagcttgagtggtgcagctgtggatattggtagcgtagctttcactacgtcacttaatttgttgtctaacacaattttttctatagatttggctgacatggaatcggaactggctagagattttaaggaaatcacttggaatatcatgaaggagggtggtgcaccaaacttgagtgactacttccctttgcttaagaagattgaccctttgggtataaggcgtcgaatgaagattcacttcagtagaatatttcaacttattgagggaattatcaaccaaaggtcgaagcaaagggagtgttcggactctgttaagaatgctgacgtattggatacccttctggacatcatggaaggaaacaacaaccaaatcaatcgacaccagatactacatttgttattggtaatcgaatgttctattttatgctctgctgaatgatttggcttctcaaattgggtatatgtttgtttttatgatttgtatgttttttttgactttggaatttcatccaacaggctctgttcgtagcgggtacagaaacgacagctgcagctcttcaatgggcaatggcggccctacttcgtaacccagaaatcttatccaaagccagagcagaactcgaccaagtcgtcggaaaaggaaacccagttgaggaatctgacgtttctcggctaccttacttacaagccgtaataaaagaaacacttcgactatacgcatcgggcgcattcttgcttcctcgtaaagccgaaagagatgtcgaaatcaatggcttcacaatcccaaagggtgctcaaatattggtaaacatatgggctataagcagagataaagagacgtgggatgagccagaattgtttaagccagagagattcattgggtcagaagtggacgttaaaggaaggaactttgagctgataccattcggaggtggcagaagaatatgtcctggactgcctttggcgatgaggatgttgcctttaacattgggaacccttatccactcttttgaatggaagcttgaaaatgggcttaaaccagaggaagttgatatggaagataagtgtggaatcactctccaaatggctcaccccttaagagctattccaagtcttgcataatcttaatattggttcatatatataccagtgcacgtcattcttcagctattgatgtaatttttctatatttatattttttagcatatataagattattcatatatata

SEQ ID NO: 26493 - DNA, 2912 bp, Cannabis sativa
agaaagagagttttttttttttttgacaatagagaaagagagttttattttatttattatttttttttttcaaatagttaatgaaaaaaagatttttgtgctggttaagttttgtgcttaatttctttaagggtatatattaatttaataatctgttgtaaaataataaattagattctgtattttttaaaataatattaaatagtatataaattattttttatcaaaataaaatttaatgataaattgttataaaaatattataacaaaattagctgtattttgtacatctctttgtgttataaattattttcaagttagttatattaaaaaacattatcgaaaattaaaaattgagttcagaattatattcatagaaaatatataattatttttgttatttaataaaataaataattgaaataataaattttataaaatataaaatttaaaatagtattatgagataaaggttttaaccttttgtttcataaattttaataaatcattattacataatttatatttatgagtattaagctttatacatatgtaatcactagtaaattatttatgtaaaacaaaataattattattaatttctttttatattttttttggaaaaaaagaaatcacatggtgctcatcccttcagtaataaattggtaaacttttcatgtttgatgggggtgcggacaatgtcggaccaccattgaacacgaaatacatccaacaatcaattagtaaacatcgtgccactattgaatttatatcgaaccactaacaaaccttcatcatcaacctcgaaaacttaaaatttgaaatctcccatcgaacttatatcggacactatcaaattgactcggaaaaaaaaccacaaattatagagaatgtcttcgttcatattctctctatccgtggtttgcgttcatgctttccgttagtggcaatggtctctccgttcacggttgaggaagggattagcgaggtctcggtcggattgaaatggagtcctctcggtcagtctgattggcgttgtttcgatcatatggtggtgatggtcgcggtcttagatcctgtagtggggttttagttggtatttcaatgagaacaaagtgagagggaaagagcaagagagaaatagagagaagatagagagttttgaaatgagagattttagggtatacataaaaattagcatattccactaatattgggtagcttaagttttagttattaattttaacttaccatttgtatataaagtcaaaatttatatttgttatttaaaaataatacccgacccgatctgattacaattagatattcaatatttgacgaccagttataattaaattaattggttatcatttaattggatggatttatatacacccctaaattgcatagtaaaaataactaatcataaagaaattaagtatattttttggataaatactattttggaccttgtgttttataaagttacagattaggctctctattttgttaaatgataaaatgagccctgtattttctaaaatgatacaaataggaccttgaattgattttttgtcaaaataaaacttaataataattcgacccaaaggtgttatgacaaaactatgtaaattttttgcatttgttcgtgttaggaattgtcttcaaattgattatatttaaaaaaattatcaaaaaattgaactcagagtcctatttaattatttatacaatttaaaaaatactgggtctattttttcatttaataaaataaatggtcaaatctgtaatttttacaaaacacaagatccaaaatagtatttacctattttttttctttccaaaaagggaatatactcattttttttttttgaaaatgggaaatatactcatttagcaccttgtgttttcataaataacatatttggtaccttgtatttttaataatacttaattggtatatggtattttttaattatacatatttgataccttaaagtaaaatttaattaatttaagcaaatatatctaagttatatgtaatcaaataattgaatttgaattcataattcataaaattttagacagtttgattgtattgataaaattttattaaaaaaatttaaatttaaagtaccaaatatgtataatttttaaatacaaagtaccaactaagcattattaaaaaacacatagtatcttacttagtagagtaggaattgtgtaaacaaccttccaaaaaataaaaaaaaaaaattaaaagaaattcttttaagccggcgtccaaacaggaaacaaggtcatcataaaccgacatccaaacacacaccttaataatagaattagtctcaaccaaacagacccctaatttgattctcttcttcattctctgcaaaaccctacttcaaccccaaaacccaattaacagaaaatcctttcacaaaatctcttccaatgtcttccgtactactccgttctcgtctcaccaatttgatatcaaagcgtaatcgacgcctcctcagttccgatgtggcatctaatcctcccaaggagccactcatcgctgcccaagctctcgcctccgatcaacccccgccacccggtactccggaatcttctaacgcctccactagcaagtcattgagctttctcaagtattctcttattgcagctattaccggagctactgccgccactggttacgtttcttacggtatgcgatttaaaaaaaaatgattcttttttgaatgatttgaatttggttttgagttttgagatttgggtttctttcaattgatgaaatttagtgtggtggaagatcaaagcttaggtatttaggtatttagtgtattggctatctttgctttatatggtatgagtatatgaacacactgaagtgttggatttgaatt

SEQ ID NO: 26494 - DNA, 2098 bp, Cannabis sativa
gaccctatttaatcgagcaattgcataaaacataaagagatgtatgtgttcaacaacaacataccatgcaagtgggactcaacactgccattaggaacaagttcatacaccaagcaacgtcttcgcccttcaatgcatatgccaacaagtttgacaaggttacgatgatgcaatcggcttagcatctcaacttccgcaataaattcacgatctccattttggttatcccttgtaagcaactttactgcagcttgagttccatcctccataagcccactgtaaacacgtccaaatcctccttctcctaaaattctttttgaactgaacttctctgttgccttttcgatctcagaaagtgaaaatgttctaactgagaggatgctgggcgccatatttgacatcagggacaccgaagtggagcttgcaatactactcgacaaaattgaccctatacctgcattacacgctcatatcaataaggcaaaagaaaaactaatgatctcagatatacgctacttggggagattttgtcattcgaatccatttgcaaagagaaacttcaacatgtctcaactatacaactcccgaaacttacctgatcttttatgaatggatgaggtaaaggcaggaccaacagcgttcgaaggttttctaacttttctccatttaatgaatacagagattgctccaagtaaaaccattaggagcacaaatgcagacagagctataatggcaatggttcgaacattcattttctgattcttattcccaaaattggcggtaataggtagatttccgacactttcagctggaccgttaccagtgaaacctccatatggtggagaggaaggaatccctgataataacagttttcgttctcaaacaagataattatagcaatgtaatgaaccaatagagttaattagtcaatgtagttacctggataactaatgtacacgacatcataattaccaaaaagagtcatgtttaaaggcacttttttatgtcgaaatcgctgatatgttagtattgctgtggtattatcgaacttctctcctagtggaactaagttaatgtccactactgtcattccttgattttggctatcagcactagcacccattattttcacttgactttgctccaagtatgtgcctgcagcaacctcaatctctagctcattcattacgggaaaaacagcaaaaggagcaacatctagtagaagtctgactttcattggaaacacacatccacacggcgaaccaaagggggtggcagtaagtggctccacacagatttgaccacagcctgctataaaatcgatagcaatgatgagtaaattataggatacaaaaggcttagaattccaaaacttttgagtgtaacaaacaatagctaaacgaaaaaaggtttaatcttttttaaccatgcctcagtgcacttaaaaggtatggctacaaaactcaagcccaaaaattaccttggtcttttgacggagctggagcaacagcatgggcccttccatgatgtcgatgtcgatgatgaccaccatgcctaggggagatagaaccagtaggacctgatagaaaagacatcataatgtcaaacaacaatgttgccatctcatcttatttaagataataaaactaaattcaataaagaaagaaactacaacgaatgcaaatcgtgccttgataaattggagaaggtgcaggagcaatagaaggtgccaaagagtgtttgagcaactttgtcttggaaaactttgatgacccaaaagacaaactcatcaaaattgaccttgctgcagccagccaagagtgtaaaaatcataactttagtatagtttaatgcatttattgtaaactaaaccgagttttaagcaatgctcaacttaccatggtcaattgagaattcttttgatgataataatcggtgtgtaaattgaacaggagacaggtatatgtgcagtaaagaatgccctgacataataaacaactatgttaagtttgttctaagccaaattcattagaataaatacgattttcaccccgaactttgacagttataggttttgcctccttaattattgttcttt

SEQ ID NO: 26495 - DNA, 2786 bp, Cannabis sativa
gccttggatgaagtaaaacaatgttgagtttaatacctcagaaagcttgtcaaaccaaaccctaagtgcttgcttcaaaccattaaagaaatttggatcaacaaagccaggaggatgcgacatgtagatttcttcttgaagatttccattcaagaatgcattattaacatctaatgtcttatgggccacccctttgtgaaagcaatggttagaacaaccttaattgttactggtttgatgatcgggtcgtgttatgtttctgagtaatcactgcatttattttggttcatgatataatattttagctatattaattaatatttagttagtttcctatcaaattttcttagtttcctatttactctctctaattttatatataaatatatagtattctattgaataaaacatacaattcattcaccattttctacatggtatcagagcaaaattcgaaatttgaaattcaaaattagggtgtatcccaaaattaaggtttgcaattatggtttgtttttcatctatcttaaggtttatttttcagaaaacgcatttagagagcacgtgacctcgcatcgctagctccaacggacagcccagctgctgatttgaagaaccccaaaatttggtggtcggaaccgttgcacatgagccacaagcgccgcctgaagcttcaacaacaacaaccacgcgtcggcgcgtccacacgcatgaagtgccttttcccgagcatttctctaccggttccctttttcggtgtttctaaccttttggtgcatctatttcaacattgatttcttcttttgtgattgtaaaggtttattcaccatcctttagtgtgattctttgtcctttatcattggtgtttttctccgtttgtggtttggcttgggttctcctattttggttgtgagattttgattgtaggctagtctcattttgtttgctcatttatcgaatttgttggttggtttgttgtttgagttagtatggtgggacagacataatatttaaaatgacttatggaagactagttcttgtttctacagttgaatgtgccaaattcttacagtatcaagagtctcttaagtattaatcttcttttatcactaatattgttgattcaagtaaatcaaattcgtgtcttcttttcttaccttccaaattggtcattgattttggagctacagaccatatgacaagtaattctagatacctttctacaattgaatgtgccaaattcttacagtatcaagagtctcttaagtattagtcttctttcatctattgttgattcaagtaaatcaaattcgtgtcttctttccttatcttccaaattggtcattgattttggtgctacagaccatatgacaagtaattctaaatacttttctaatcttcaacctcacgcttccactactactgttaccttagctgattggtcaccaccttatgttcttaggtctggtacaattaatcctacttcaatgctttatttgcgtctgtcttacatttatttaatttttcttttaactagatctctatcagtcaacttactcatgatcttaactattgtatttctttttcctagtcattgtttattttaggatcttatgacgaagcaaattattggttaaaagacatgaatctgaaggcctctacattcttgatacaccattacctaaatcaattgcttgcttttgtgtacaatcccccttcgaggcacattgtaggttagtcactcatttcttcctctgcttaaaaagctttgtccgcaatataataagttcttttcgttagattgtaagtcatgtcaatttgctaaacgtcgtcgtcttagttcaagtcctagcagtcaataaatgtgctagtattccttttgaattagtcttattcttttgttggggtcctcctatcttgtctaaacttagttttcattattttgttacattgtggatgattactctcgtaggttgatttttataaagaattgttctaaattgttcactattttttgtgccttttatgctgaaattcaaaatcaatttaatgtttctatttgtactttgagaaataataatgtcaaagagtacaaatctactttatttcaatcttatatggttcaaaacagcatgtttcatgaaacttcttgtgttgatacactatttcataatagtgtagcataacgaaaaaaaatagacatatttttgaaatagctagagctctcttatttcagacacatgttcctaaaccagtttgggctgatacttttactactgcatgttttttgattaatctcatgccattttctgtttatcatggtgaaatttcttacaaaattctattttccaatattatttcctattgagccaaaaaaaattggtagcatttgctttgttcaagatattcgtccacaattaactaaattagatcccaagtcattgaagtgtgtattctttggttattttcgttttcaaaaagggtataggtattactgttcaatcttaagaaacatatagtttctatagatgctacttttgtggaaaaatacactttatttttcatcttcgcctactcctactcataaggaggaggatgataatttgttggtatattctatcacttcttttgcgcccgatacatgttcagacgagtctcttgttcctccatctaacttggtcacagcttctgacatgcctacacctccgcctcctctacctcatcatgtttcatgttttgtacctgcttcttcgtcatcgaattggaaccccagcaatgatcttcct

SEQ ID NO: 26496 - DNA, 3768 bp, Cannabis sativa
  modified_base (343)..(347): a, c, t, g, unknown or other
ttatatagtgatgctatttggactaaagaatgcaatatttacataccaacatcttgtaaatggaatgttcgaacaacgaataggtcacaacatgaaagtctacatagatgatatggtggtaaaatcagtataaagtaatgaccatatatgtaacgccctcaatcctaaggacgcagggccggccctaacttttagtgggccatagaaaaaaaaattattttgggcccttatttagaaaaaatatggtattttttaaaatcaataaaaaaaattgtataattttaaaagggaaatatttttttttgggcccttgggctaggtgggccctaggcacaggcctagnnnnnctatgcccagggccgggcctgtaaggacgccatgtgtgtgcttttataaactagtttctaataacaaaactagtggtttaaataaaaatgtgagttaataaaatttttgctaactaatttgaattataaaattatggcataatcacttttacaattggggatccctttttttgaaaaatattacaagacatactattgtagtgatgttacaaaatacataattaggttaaaaatattttaagatacaatttatggaaactcaacattacattttggataagctgatatgtatatttactagaaagattcctaactcatggttgtacaaatgtttctatctattacctacaccacatagcacctgtgagtcacaaagacccagaaaaaaaaagcagtaatacaccatcgcaaaaatcattacacaagtatcaataattatcctcagaaaatcaaaattagatgatcgcacattatttataaaattaaatccaaatcactatagatatcagtcacaaataaacgtcaatataaagatattcaataatacataattattgagctagtagtacaagtcatatccattactttataaaataactattttcattgtttatttaacgaaataaccctgatgcctaacctggcatcttaatatccttgttgttgttgttgttgtctagtaagataatcttgatatctatcaccggtagccaaatgtcaccatcgttaaatccaaatcactacagatttgagtaacaaataaatgacaatataaagatattcagtaatacacaattaccgagctagtagtacaagtcatatctattactttataaagtaactattttcattgtttatttaacaaaacaaccctgatgcctaacctgacatcttaatatccttattgttgtctaataagacaaccttgatgcctattaccggtatcccaaagtcaccatcattatcaaataaacaatccaaatacctggccaccagtatccctaatatgagaaacctaacaacggtttcagcttatagtcatgacttttgatacctaaccttttggtatccaattatcattatctaataagacaacatttttatcattgcctaataagaaaatattttcatcattgcctaataagacaatctttttatcattgcctaataagaagatatttctatcattgcctgataagacaatctttttatcattgccaaataagacaatctttctatcattatataataagaaaatatctttattacataacaattataaccgtatcttaatctcgataataattaattcacaaatgataataatcgtaccttagcaggacatgttatgtagtacaaatatacttcttacctttaattccaaattcatgcatgctggcgaacccaaatagaaaaatgtccgatgatcctggccctaagtcacaataatagaaaactggtaatcacttgacctatcccgttttaaggtcttaaattgtttatttaaaataattgaaaaaaataaatttaaattaaaccaatatactcacaaatatttattatgcattcataattcatagaaaataaaagacaaatttgcctcaaagttaacaaaaaaagaaagcataatccagtagaaaataaaaaaaaatatgtctcaaagtttgaaaaaaaaaaaatcataacccaagtatagtatcataatctcatacctctcaagtctctaaacaaattaaaaagtaaacaaagatgaaactaagaatcgagaagaaaatactttagcatttgtaatctacaataatcaccaattcactatcgtcattgaatcttcataatttaagcatacgatatataattttgattatggatgataaccaaaataattttgattatcaatgatatatatatactatatatacgttaacaataaaaagaaaactatatatctatattgaggtcggatatagtgcggataatatttttcttgctcccgccccatccccgtttcgagtatcaaaattgtccctcatcactgccccattaaccactaaaacggggaattcccaccccattaagggtgggttcccacaatatattaactattctagcagtataaatttctctctctatttattagtatgatattttttgagaatgtgctagaaaaataaaaccgtgagaatttaaatcaaaacgaataatatcatattaatatgaatatagatatcgtcccgacgattcccaacataacaccctcttgatttttcactcactcatttgtggaagtgtcgctattaaacatagtgatatattattacctataattgttttttgtttggtttggaccccatatattagctttcttattcgattggaatcttttatttatattttaaggaatgtgaattgtgattaaagcttagactttagcctattaatatcttatcatagatagatgctttttaaaaagaaatgtaaatcaaaattcccgtttccaatattgagagaaaagaaagaaaagaaaaataggctgcagtagtgttcgagtcatctctcaaaataattcattccatatatcgaaagtgcatgatttacctggtctattactatcaaatcacccttagtaaataaaactgtacattttcccatttaaacccgtcataagaaatcattaatttattaccaagtggctctcataaaattaattagctttggttgtgtcatttcattaatttaaatatattatctttttgataggtaattttgaaagctgcaatagttttcttttaactcttatctttttacattagatcatttacatcttattttttttattatcttttacactaattttgtactatgcacagtgtatttatattttcatatctaactcaatacttcaaatatcacactaaaaaaattattgtacgttcaatatatatatacccatagtattcttctttattttattattaaattcaaaggcacttatagtcttacaaaccagtattaattaatattatatttttaattattaaataataaaataacaaataaatattatttaagtaattaatattatattttttaattaaataataaaataacaaaatatattattttaaaacacatgattaaaaaaaaatattatttgaatttaaatttattacgtctaaaattcaattaatttaatttatcacatataaattatataacatttttagaataatatttaatgaaatacatatttattaaaagttataatttattttaaaaaaaattatgataaataatgtcttttttttacgtgacgtataacatagttacagattaaaaaatgagagtgcaacatatttgtttaccgaaagaagaagaatacaattaatacgtatttaaactaatttctcacaaaaaaaaaaaa

SEQ ID NO: 26497 - DNA, 2543 bp, Cannabis sativa
aaaaacagaatcagtcaaaatggtaatcctttttctaagcatgccacggagaaaaatcaacaccaaaagccaaaaattagctagctacaagcaatgacatattaggaacaaacaatatgaactatttcaacaacaattgaaaaaattgaaactttctgacctttaggccagtcagcaacgattctctccttaagcattgcaacggtagaagccggcgagtatcggaagggaccaatatctgatccatcataaagacgaaacttcagctcaaccaggtcctcctccggcatttgaaaccttcccccgattcaacgtttctttcagcacaaaactcaacaaacaatcaaaccaaaaaataaattaatctcaacaataacacaattctcaattgaccttcggcatcaatcgcatccaatattcaatacctcaaaaagaaaaaaagtgttcagcaaccaaacaaattgactaaaaaataattgattttgtgtagaaaacataatcgttatataaatatcagaaaaatacctgaaataattgcagaaaggaatcgagggttttcactgtaacggtttcagacaaagagacaagaagagattccagtgaagatgagagaaaccctaacccgatcttgacgcttttttttttctctgttgtctattttttttaatttaatcgaaaattgattaaatatttatatgagttttttcccttcaaattacggtttatttccatatataaattttcttatttaagaaattaaaatacaaaataaattataattagaaagaaaaagtaagatttgggggatttcgaatcttgtcagtgtaaacggtagaaacaaaatttgtgaatttgtgtcagttaaattcgtaatcccaccgaaaatattgactgttactctgtatccgcgaaggatttcggtgctgataatgaccaataggatttcatcacgtgagtcattcgatgacgtggcgtgttattattggtgaatgagaattgattaactgtggctgcggatgtagcgtagtattgacagtaacaggtcggtgaaagaaggaaagcaacgacaaatacaaagtctggcttattgggtggtcagtcagtttgaccaaataatattaaatacacttcttttcatgctcttttttttttaatttttttatttttacttttaccacttttttttataattcttttcagaaatattaggcacgccatgagaaacgacaatatagagttgtgtactgtttttattgtacgggaaagtttgatgaatgtgcttgtaataaacattattaaccattattacccatctttaaaatgtgtcttttccttaatgtaattatatatttaggtaactatttgagaatttggtatcttatttgcatcgaattaagtagtcaaagtaagaggttagttatgaactaatgtagctcaccaataaaatatgaaagaagaaactcatttgtttcttactatttgaagaagaaatgttcctaagtttggtagaaactttattttaaaattgaatagtttatttttaaaacaagttcattataattgaaattagaataatcgataacaaataagtgaatttaaaatatgaaataattaaaaataatattttattatattatttatttaattgactaaaaaggaaatcaaacttgttttattttgtttatataaatgaggaaggtaattaatttttttaatttagctaaaattattttttatttataagtttttttaacatttatttgtctttagctaatataattaaaataaataatgtaaaaaacggaatgtttcattctaaaattaaggactttttcctttcttttatccttaatttatgtgtatcttactaattttttctattacaaagtttaggcaacaaattaatgagaattcattctctttttttaaataataaaataactaaatataatattttattatataatttattttttttttataaaaattattatattatttatttaattcaccaaaaaggaatcaaatttatttattttgtttatataaataaaaaaggtaattaaattttctaatttaactaaacttacttttttttattaatttttaaagatatatttgtctttggtaaggatggtttcatggctattaaagtagatatgaccaaagcctacgacaaagtcgaatggtgttttctagagagtttgcttcttcatatagggtttaatggtcggttggtggatttgattatgttttgtgtctctatagttacttacaatgtgacccatggtggtcatattataggtccaattactcttaaaagagggttgagacaattggagacctgttattcatgtatattttcctgctttgtgcggagagtttctcgtctctattgaaaaagtatgaatgacatcgttggttaacagagtgtaaagtggctagaggcgctccaactgtttctcacatactctttgcgaatgatagctatgtgtattgcaaggccaatgaggtgaacactgagaatgtgctatatctcctta

SEQ ID NO: 26498 - DNA, 1102 bp, Cannabis sativa
tactaatttttagtgtcccattggagatgacctcagaatactagtatcttatgttttgagcaatatactgatgcaagaaatatatgcatcaaaattaattgatgaaagtttggtagaaaagattaaaaaaaaaatatattgtactaatgaagaaaaaaattattgattctttcactatcacttagggtttgttgtacagaactaagtgaagagattagacaattatgtttagttagttccatgattggttggctttttgggactggatttgtctcctttcaaaaaagtttcaatcttgtaatatatatagaaattttttaccgtaggaagacttgttttatttatgaaaaacatttttttaatcatagatagcgataacttttgatggtacaaattaattattgtgtaagtgaattcattattattttatagaatcttgaaaatataaatattaattgtattattttaaagattcttgaaaatataaatgtcagtacaattttaaaaaataaaaataatttaaatcaaataatgtgtattaaaagagtggaaaaattttataatacactaccttaaaaggaatttatcaatacatctctatctattttagtgtccaaaataattttttagtcaaattttttctcattgtcatgtaaattataattatttaagatattctgcaaaattttaagaaatttgaaaaagtttaacacgctgaaactgtgttcaaatagtgtgttgcacacgtgactaatttattttataagcgtgtaaaatagactgcttgaatattgttctatattgtaaattattccaaacttcttaaaattttcttggatatcttaaatagctataacatacatgaatatgaaaaaaaaaaatcaaacaaaattttttttctggatgccgaaataagtagaaagtgcatcagtacatctcttttaaggggtacattgtagagtcatccaaaagagtatttaacaaattagaatttcaaacttttagttatattaatattgaaaattttatattcaccccttaaaagagatgtaccgatacatctttatccgttttagtattcgaaataattttttagttaaat

SEQ ID NO: 26499 - DNA, 2297 bp, Cannabis sativa
agatcctggtaaaataacttccaacagaaatcgacattgaagactcccaagagagagggagggaccttatgtcgtcatagaagaatttgaatctaggagaaacaggttggactttgctacgaccgccacttaaatacagtgccagctacaagttactggaatgggaagcatctgagaagataataaagcaaacgtgccctaaacaatttgcttcacggtgagattcactttaccttgtttaagtgaattaattgcctctcgaactgaaaatatgcaatgaaatcattttttggttaggaggtccatctctaaagtatggcccctatgctattattcaaacagtgcagtagtgtagtgaggatcacttcaactaagctttgatgaaaaatgaaagcctgcaacaactacttccttttctttcaatttaactcacagtgacgtaattgaatttaatatctaatgaataaaagtattgagcaaagcttgctgatacttcattattattaatcaattgcagctcaaaaacttgacgacgctctctagcgctgaacaaagcttgtagaattagtcttaaggtaactacaattatttctttagtgagttaaacattgccaacccatgaatctatagataaggggatgagtgctcacacatgtaacaactctctgagacttatgatcaagaaagcccaacgggatttggtatggcaagtaaccaatgaaggcatttcttcgatcactcaggcggtaagtaagacatagtatacgggagctatgcatgttacatgagcattcacaaaaatcatggtacatgagagccatgtatgtcacatacaccttggtatacgagaacaaagggtcgcagtgtcattttgcacacctaagttaatatttctatggtttaacgaaatgctgacgttatctctagtaactgagtttcttaatcccgaagtgctagtctgaatgctagtaagttcattaagttgaataattacacgtataaactatttgcacaccagagttaagcactgttgtgatataaacacttgaggtctcacaagaatataacgattgagtttaaaaatctaatgtgctagtgcaagtgtttttcctcagatcacaaaaagaaaagaaaaacatcccagttacagaaagctctctagaagcacgacgttgcatataaaagatattttctaattgatcgaagaaaaccctctgggagtgggacgctgcccaaattgtggtattctttcagtggttaagctcatcttaagtatggagttgtacttagcacgagtttaatctaacctttcttttttcttttttcttttttctcccttagcattttttctttaacaaggttctacgagtcgaaatcatcaaccgggttcttcaaaaacctttgatttggcacctacacagaagatctagcaggtttctctacactgctcatcgacagtcattcatctcacttatgatcataaagtgaggtcatgcttgaccgccaagaacagaagcaataacccactacacctcaacagtggtctatctcactcacggtagatagcttcaacatacaaacttcaaagttttttcaccccggtcattaagacatcaaccttgggggcaagagcagtcgagctcaaacagtgtcaacgaaatttcaaacatcatggagacaaaggtgatggttaataatcaagcatcacgaaatgttctaatcaagagtgggtcactccctaagagatctgaagccatgcaagaaactcatgtatagtttcaggtgagccgatattactccttgtggaaaaatcaaattaccactcacaattaaaattgcattgtggtaaacatcacggtgactacctttatagtgatctacaccaagtctccttggatggtcaaaacccaacaaccttcgagccatctcacttatctatcacctgtttatcaagttctcgatagtagctagtattgacagtctccttggcaaccaaagagtagaatgtaaatgttacaacacatcgttgacattcgccaagaagacctcctctactgtgataacaactgaggggaagtggaaaacgtcctttgttatcgagacagccaaggggaagaggaaggcctcttctgttataaatacaacaaaagggacaatgaagacctctaaggttaaagaccaatgacaaaatggagaccgcacctacaataactctaaggtgcacccgagatggggaaagcatcaccacaatctcaggtatattactttgagagttggtgttggaatatattttacca

SEQ ID NO: 26500 - DNA, 2900 bp, Cannabis sativa
taaaccaagaatgttaaaccaaaaaatgccgttaaataggcacttttaatatataaagagatatatatatatatatataaatgcatataaaataaacagatatcaatggcgtgtatttttttgatatatgtgtatacatatatataaataacgacttttgatattgttggtgtatatgtataggtctgttaaggtgtggaaagagctgtaggcttcgttggataaattacttgaggcctgatattaaaagaggaaacttcagcaaagaagaggaagacaccatcatcaagctacatcacaatcttggaaataggtatatatatactctacttcttttttggcaatgaatattaattaagatctatatatactcttatatatgttatagttgctatgagattaattgattatgatatgtattaattataatatcagatggtcttctatagcgacccaattaccaggaagaacagacaacgaaataaaaaacttctggcacacccacttgaagaagaagatcaagaagaagttaataatgaaacaaagtagtaatagtgaaactgatcatcttgaccatgaagcaatattacaacccatgacgatgatgatgatggtcaataatgccagaactagtagtagtaatactactacagttgttaataataatgtccatcaccaacaacaccattattacaagcattctactaccaggacagtcttttttgatccaaaattacagatctcatcatcattattgttaaactctgatgatgtacatcactcattcatggatcataataacaattataatactgatgaggatgatgttatggaggaaggcattcacaacttttggtacaaacttcttgtgaagtcagcagagactgctactgctgctgcttcagtaccaccagctcttgcaaattttggataattattataattttcttttcattttcaacgtagattttttttttttttttaaagtttgaaatttggttatctctacttttgactttattgtgtgatggtgaaattaatttagttgaatgagatagtggagatgaatactattattttattgccaaaaacctcagtaaaatatacaactttttttagtttctttctttctttatttgtttcatgtttgacatttgagagtatgtggtgtactaaaaaaaaagtagtgcattgttatattttaggactatttacaatagtatgaaaaaaaaaagtttatatatttattgatatgaaatttaatggacaaaatatggtaattttagagaaagaaaaatatgaaaacctcaacaaaataccataaaaaatttaataatatgtttaaagaacaatggtcattggaaaaattgtcgaagtttgctagagttagtattggtgctggaaaagttgtcggaattggcactggcgctgaaaaatctctggagtttggcaccggcactcacagctgttgtaaaatttgctgaaattggaataactcgaaaagtcgctagaaagtggtcggagttatcgccgtaatcagagttagatgtcggagtcgtcactggagttgaatgttggaatctgacacacagaaactaatttcatttatcaactagttaaaattttaacatataggaaaccatttagtaaagtacaaaccagtttcgtgaaataatcaaatgaaaaaactgaaacttaaaactcaattatgaaaaataataaaaaaaaaaaacaagttatgaaactagttacttaaaaaaaatgattatgaaagccaataaaataataagacataccacaaatttttttaacaaatctatataaaattaaatcatagaaactatttatgtcaagcaaccaattaaaattaaacacataaaaaccaatttcaaatctagaaacaaaataatacaaataaacttaaaataaaaaatatacaataatatcataaaatggagcaaccctaattaatatagaaccctcaaaactcgtaaaaccacttacaaacatgtgaaccctctgaaataagtttcaaccttataaaaaaatcataacaaaactgaagttatatgaacaatgaagataacagaaactaattttatcagtcaaccaaatgaaacacacacacagacaattactaaaaaaactcacgaatataattaaaacaacacataatgcacaataatgatataaaaataaaatataagtgtgaaaactaatttggaacataaaaataaaataataaaaagaaaatataaaatatataataacatcataaaaaagagtaactcttttacaatactttcagaacatgtgaaatcagttttgaacctttgaaaaatcttaataaccgacctatgaaaccttaataaaacggaaaaaaaaaatcacctgtcccaaattttcctatgccaaccatgtccctccaatcaataattgccacataattttattttttccacctcatttattaatctttccaaacaaaaggctctattagtgcccgtttatttttcggtaacctcagaacaacttttttcacatttattaccttttttattaattaaatatctataagttaataataataataataataataataaaaaaaaaataaccaatgtatgtcagtgcacattctattaagggaccttctattaaatcattatattttttctttgtaaaactcaaaataataaaattatattagtaattttttaacgaaaaaaatcattaaaaattatacggttattatttttttaaaaaaaataaaatatatagtttacacagactaaataaaataaatttgtgatacttttataagtgtttagggtacaaataaaatttcttttaagcaatatattgaaaaaatgtgtttttgcaaatgtcagttgtatata

SEQ ID NO: 26501 - DNA, 2166 bp, Cannabis sativa
tgaaccatgcaacataaaagcgtagggcacaaaacccaatagaaagggctacgattgacacgcaattctccctccgtgtcacatttgctctttgcggacgatagcttattgttttgtctaactactaagctatctgggatatcgatcaaaaggtctcttgacatatatcataaagcttcgggccaagttctaaataatgacaaatttgtgatgtcattctcgccaaataccacggtggcagcccataatatctttgctcaaacactacaaatgtcaataactgagtgtcatgagcggtattcagggttaccctcttactctggacgtgacaagcatgagctttttagcaacattaaagaaaaagtctggaaacttctacatggttggaatgagaaaattttctcaataggggggaaggaagtgcttttgaaagcagtagtacaatccatcccaacttacgctatgagttgcttccgggttacaaagaaattctgtaaccagttgaagagtatgatggctaacttttggtggggaagtaatcaaaatggcacaaaaattcattggaagcgatggaaatctctattcaaatcgaagcatgaaggtggtatgggattccgatcctttgttcactttaactagacacttttggccagacaagcatggaggatctttgatatgcctgattctttattaagtcaattgctcaagcataggtattgttcaaacacctcctttctcgatgctaacattggccactcgccatctttaacttggcaaagcatttgttggggcaaggaattgttgataaaatggctgcagtataaaatcagaaatggtattcatattgcaagtgggcatgatccttggataccgagttacaatgagttcagacctgttagtttctctggacctccttcgatgcctgtatcaagtttcattacagaggaacgagtttggaatgaatcactgttgaatatgttttttcagccaatcgacattgaacgtatattgtctattcccctgagttactttgctgatacagaccgattaatttggcaccacattacaaatggctcttacaccgtcaaatcgggattccatttagccacttctttggaagaacaacagagttcctcaacttacaatcagcatagagactggtggaaatttttttagaacctgaatttgctgcctaagatccgaatttttgcctggaaagtcttccaaaatgtgcttcctatagctactgctttattcaaaataaagattttggattcaggcgaatgctcactgtgtgcttcgagttgggaatctattggctatgctcttttcggatgtaaacacgttaaagccatatggaaactttctaagttttagcttgactttcgacatgctcaaagtatgttcaatggtaattacctgcatcatttatctacaatccatgatcagcaagattttgagctcattatatgcttgttgtggggaatatggatggatagaaacagggttgttcatggtggtgtttcacggcaacctgcttctatagttcaatataatacatgatatcatgaagacttcattcgagtcaaagtccctccttcaactgctgctgtcacagcaatcaagctgctgctatgccacgatcagatgctattcaacatgttcacaaatggcagccaccatggttacatgggtttaaattaaacgttgatgcagctacaaatttggagcaaaagagaatgggaattggggcaatcattagagatcataatggaatggtggttgctgctttttcaaaagctattaaaggaagtttcagatcggatgaaatggaggcaaaagtacttttccatgctcttaattgggtattacagtcacaacttgctcttacttatattgaaacggacgctttgagagtctcctctgctttaaatctttcctctacaaatttttcttgcttttcgaatcttattatggatgttcgttgtcttttattctttttccctcaagttttagtctcccatgtgaaacaaactgctaatcaagcagcacataacttaactaaatttgctttaaggttgaatgatgacattaattagataggagaaatttcctatcttataaataactttactttataataacagtgaaatttctcaaaaaaaa

SEQ ID NO: 26502 - DNA, 1574 bp, Cannabis sativa
tttcgaaagtaatgtagtataagaaagtcaaatgaatagccacctcttcatatgcttcaaagttatagggacaaatgactaagtgaggacaaagagccttggcatctctaacaaacattccagctcttactcctgaaaaatagaagtaaaattttgatatagaatatgaggtccagaatatattgcacaagtaactttaactaagatgacttggtaaaaaccctaccataaacacgagcaggataattggcagatgaaatttcagcagttcctttgggactgtccgaatggcatacagccacaggtttatccttcaatttatgatcattcctgatgacaaccgagacaaaaaaacagtcctgcaacatcaaataaggattattatactctctaaaatacccaaaataccttggcaacttctaatatttggatttccaaaattgcaccaaacccaaattttctagctgctttagagcatcaccagtgagtgaagtgctatagaagtgggggatgctataaaagtggtgcatatgaactttttagcatatctttataaaattgaactccaatggtagtgtataaggtgggccaaatttggcacataataaaagttgtgccaaatatagcacaaaatatagcataagtcaaatttgtaccacaacaaatataacttttttatttactcttttgccattcactactataatttataactttttatattttatttatatacttaataagggtttttatataccgtcaataaaaattccaattttttgttgactttctaagctaattttacacctaatgcattggagtgcagttgtgaaatttgggacaaatatattcttgactcgttttcgaggcaatttcagcacaaattttacagtcctattcttttatagtattttatgtttgatcatgaaaatcttgttcaacattttctagaactatgaataaaaagttagtcaaaactactctgaaaaatcctcagaacagtaagtacaacgaagtcattttgccaccctcataattaaaaacaatataaaaatgaatatggttcaactttaatattaccatgtcaatgtggataatagctgtcctgagcgaatcagcagaagaatgattggaattggtattcttgaatccttttgactggcagggaaaacgcctacgatacctatttctccaggtccctataaagtgcagccttgagctctgcagcaaattcaaacaggtaattgtgtgttgcaaaagctacatgaacactatacttggggatccaacataatgctttttttaatggaatatgtctaaaaacttctgaattccagataatccaacaagtaacaacatcagcattcagaaagtacttcgtacctaataggcttatacagctatgcagtaagataaacaataggggtgttccaccccctctcaccgtgcgagatgaaggaggaggagggagggagattaatatagctttttaaataaatgagcgggggttgaagctaataatcagcagacattgtttaaaacaagctgaccagtaccttgaaataattttccac

SEQ ID NO: 26503 - DNA, 2581 bp, Cannabis sativa
ccaaatacaaatttttttgtcccacagtgttgctggccttttgaagctccaatcttacctcaatttgggcccgtgactcactttcattattcatcaaactaatgtcatgttccatgaaatcatgatgggccctctttttcaaccacatcatcttcaaggtccacaactgaacccattcccgcccaaattattcccctcatttgccacctcaacttcactccttcgaattaaatccagttcaacactatatacagccttattattcaaatcctttaaatttgaatttttcccttgagtcccgccacttaatctgtgatctttatggatagtcccctgaaaactcgtggcattaaccgccagagatttcctttgattcaccgccatttcaaccactgtcgatcgaccaccattgaaacctgcttgaggttgaccactacattccccatcatcaatgccagacctgagccattgagccccaattaacttagactgttttcgatatagtgctttcatgaagatcccataaggcttagcaatgtccgtctccggtgtatcgaaaagctttggacaaaatcgttcagaatgatcgataatgccacaaataaaacaaaatgttaggacattgtcatatttgaattttatccatatccaatctgagtccgacttggtaagctttatttgtctcttcaatggtttattcaagtcaatcctaacccggaccctcatatactccctccactaacccatgaagttttttggataggattcaataaactcaccaatgtaattagctgctgccatattgatctattcagacctatacccacttagaagctcatgcaaatgtacccataaatctatcttattcagaggcacatttttaggtttttctccatgtcagagccgatgaacaatcaatgcctttctattgaaataccaaggactcccatccatcaccctcttgatataaatttcgtgataaaactggaaagatacaaaattcgcacccaattctttgatgtagacacctttccctggtttccagagggctgacattgtttgttacatagagaagaaatcaactaatcctcctgagagaaaactccccactaagcaccatcgggagtcatattccacttcagcacttcctccattatcccctatcaaaactcctcccgtctcttcttcatccagtataacctcttccaaaccattccttacgcttcctgaatctgccattgataaccttttacaaaagaaccaaaagaagaaaaaaaaaacagagcactgaaacttgaaaacaagggctagcagatcactcaaaagcaatactttgcatgtcaaaagacaagacatcatgacttacaatttatactttaggtcatttagtcacaataggaatatgatttttgaattggaattggattttggaattggaattgaattttggaattggaataggattttggattttagaattggaattggaattggattttagattttggaattgtttcattttttttcccaaataccttcgcttgaactgtcaattaccgctgcaaattaaatttcagatccattcccaattgattcaataaacccgacgaacagggttgcgtgtcggagttcatgagtttcgtgactggggaggccttggagaagcgccgacatgagaggcggaagacggtaaacgaagacaacgtgtgctgggctctagccgccttggaattcgatgaggggtggacctctgttcctcttcttctatcgtaattaaattaactaatcgaagtaatctcatcttatatgacaattacgtaaattttggccgtcactttcgcttcagtagcgaaaatcgaaaccaaaaggcctccgactagaaattttgcagaagtgattctgcctatatattctcctacttaattaatcttctgttgttttaaattatgtcttagttatgtaagtgtgtgaggattatttgggtacaatactcataaaaagatgtatgtttgaattaaattttatttggaggtaaatttgattaatgtataaaaaaggagtattcttcaacttctcccattaaatttccctttccttaactcattttatattttttttatgtatttattaattaaaaataaaaaaaaacaaatatgacttttaaaaatttataaataaaaaataattacatgttctaacaatgacaatttagtcaaattaaaatattttgattacttttcctaattatgtaaataaaatgaaatatttatggtttcctttccggtcaatttagtaaacaacatactaaagtattatttttaattattttatattttaaatcgattcatttcttccattgattatttcgattacaattacagtttaataaacatgccaatacagggcaacacacggagcaaccaacgaagcaacttaactcgcaacctaattcaaaccgcaatccacgcaacaattcagatcgcaactaacagagcaacctaaatcgtaaaaataaaaaaaaaaactaaaaaaataacaaaaataaaaaaaaattaaaaagtgatatatatatggtaatttt

SEQ ID NO: 26504 - DNA, 1925 bp, Cannabis sativa
  modified_base (450)..(459): a, c, t, g, unknown or other
aacgtgttagtacgttatgtccattctattatggcccgatggtaataccatgcattaccgattatataatttttattatatgttaatacccacattgattgagcaatatttaattatattagtccatgtaaaaattctaactagcaaagccaaagctctactagcttccttccctgtaaacattgcgacatcttgtaaaatgcattttatcacacacttggaagatcagagacaatctcttcttccattttgtgattttccttttcttatccaatcaagcataaaaggatcggaagatctcttcgccatcaaagccaaccaagcaatgaatttatattttcgaacacaaaatatgtcccaaataaaagcataattcaggcgttggttggaggtaataaaatagaatagaatggaaaagaaacaatttttattccattcttttgtttggtnnnnnnnnnnagtattggaatgacattccaatggaaggaaagaccattccaatgtaacaagagaaaaaatttaatgatttttttatcaatttttttaatgcattttaaattttattccattctatttctattcttattcacattcccattcctattcctatattttcatttatctcaaccaaacgccacctaagagtttgctcatatttcctaaacatggcaacaatagaatactgaaagttattaaactcagcacctgtataatattgcttcaacaattcttttacctgtacggcatttatattttcactcagactggtgtatcttagttaatggtaaaataaattctgtatttatgaaaactgtacaaataggaagaactaattttttgttaaaataaaacttaataataatttgatttagagatgttataataaaattggttacattttctgtatctgttcgtattaaaaattgtcttaaagtttgttatattaagaaataaaattgttgaaaattgaattcaggatcctatttttaccattttagaaaatacagggtttattttgtcatttaacaagacagaatatttaattggtaatttttgtaaaattcaatgtccaaaataatatttacccctaaacaatataataacattttgaaatgttactaaatccttattttagtgactcaacaaagaattgaggaagaacgaaatccgtttcttacaaagtcaagtcttttcgctgcttttaatttacaaggttaatgttagttgtattgtttcttagccttatagtatataaatatgagagtaatataatatcccattgaaattcttggatcaaaaatatatattcatcctaattaagtatcaaataacctatccaagttttttttttttttttaaaaaaaaaaagcaacgttgattcattcataatacattagacctagcggtcattacaacacatgttcttagaaatagtagtaatgtcaatacaaccatataaattatgggtaaaagcccagttggccacattatgggccataaaattacaggatctagccgaaaaataaaatatgcaagaagcaaaggaagaagcgaattttttacaaaataaagagtagttctcaatttcccatcggggatccaagccattgagagtgttgatcactatctttgaatcgctctttccaccaggataaattggtgacctttttccttagccacctcaagcgccaagcaaaccgcaacagcttccccacacagggcatcagaaaaatgcattttggccgtaaatacccacattaacctgctcaggtaatccttagcaaccactactacgcacatatgctcccctccaactttagcatcacaattaattttgatccagtcctggggaggtgggttccagtccgcagggggggtcagggagaatatagggataatggaatctctgtaatctgcataagagt

SEQ ID NO: 26505 - DNA, 6144 bp, Cannabis sativa
  modified_base (4872)..(4874): a, c, t, g, unknown or other
aattattgttcatcttcttcttcacatcctcaacctcttactcttctttccttatttgttattatagctatctcttttctattttctgatgacttctattgattatagtaacttgtttttctatttccattaatatattactcacacatactatatatatcattatgtatacggctattttagaaaacttgttcgttttccatcttagaatatagtgaatttcctttatagtgtgatgtatttgtttgtttggcttggttgctgtttgtttttctaatataatataatattatatatatatatataactttatatgataactctaagttctataatgataactcataattcttttccgaaattaatcaccaaacttgaacataaatgtaatttcctgtaaatggattctggaatctaaatacttagaagtccattaatgatttttcttccaagtgaaaaaatgtatgtgaaatgtaatttataagtaaacaaaagtatggagcaactgggaattgcgcaaagtatacgttgtgcaatttctaccgtttgggttaattctatcatagattgagaaaggtgaacttaagttatgggatcaggagttgaatgtttctgaaagatcaatttaactgctggatcagttggccactacatatatagagccaggctgatttcgttgttgttttactactatagctgaagatgttattcctatagttatggaccggatcccaacaattacttaatctagtatatctcacagtttatggagtgtgtgttttttttcttcttcccttgttctactgcattttccaactgaaatggaatactacaactgaaattgaaattttgaactcttgtgaagtttcatatgaatttcagctaaactgtcttttacaatgcacttttctcaattaatttacattaaaaataattatcataggataggaaaggtaagatgcttcagaaactaattggagaacaatctattcccaactgatggttaaacttggttcaagtattagctttgtttttcaccatgccagtttcagtcgtagcaattgtttcctcttgatgccccgttcttctatcatcttgctgccatatccaaagatgcagcacccaaaagctccccctttggtgaattcctatcataaagtacatcacaaaaaggtaaaataggtgtttatgattaccttgttaagagtggcaaattgcttcattgattgcaatattttgttaaattggagtgtttcttatactcttatattcttttatggcatgtgtaagcatcattagtaaatagtctcagaatctcaggtaataatgtcattgaaagtagaagcttgtgataataagaggtttaccattgacaaattctgttttctcatttgaacagcctttcttcggtaactcctcctccggctcatcattatcaactcccctagtgtttgtggccttcttatcatgtgtctgtcattactttcatcatcgaccttttgattccacacttcttctggtgtcgagactcttctgaaggtcgaacctttccaagatatccagaattaggtggaaacaatgggaagagacattccaggaaagaagcctccacaaggcttgaatgtccagtttcatagctgcttgtactgctgtctgtatcgctgttgttgtcttcagtagaagaagagttgtgtgctggaacagctgtagaaatggctaccgatgacaccaggcagtttgctaggagagagggatcaggagtatatgaatagtctgtttcaaaaccaaatgtttcaagatccaatttaatcagacttcgattttcatgttgtccattaatatcaccactgatgtaataatcttttaaattttcatccttggagttggatgaataaccatgtagtgggctgtgaaaaagaaggtagtggtgtccaaggcttttctttccactggaaaggaaccgaggcaatgagcttgagtggagtcgaaactgaaatacgtaaagcaacctctggtaatttccagtcctgcttaggcatccctggccttacttcccatagaaatggaactgaaagtggttgcttcaccttctttcttgaagtctgtccccattctatatctgccatttctccaattgataacatgataccatgtttcaggccactttcatttctgtagaaggtttcctaagtgggttagaaaagcttgctaccaactttgtttaggctataacaactatctaatccatctttggaagtgattaggttcacctgctctttcactgtctctcacatgttagttggataaataacaaatccataggacccttggtccagtagtcatgtccagggaaccgaagtaaggctacgagaattttacaaaggggatttctcataaatatggcttatttctaaaatttttgggaaaagattgaatataaaatatttagtagctaactggaagttgaattttaaaacaaactcataataaaccaaaaaaaaaaaaaaaagaaatttacggacaggctcctttattcctttatgttttcatttgtatacacttaattcatttattattattattttgtaacataagtttatgttttacccatattttgaaaaagaatatgatcataacacgtgtacgaaagctaaaaattaaaccagctcaggttatacaagaataaatacgttcaaaaaatataaagggtagacattcaagcttctccttaaaaactttaatggtgagtcatgaataataactactatctcgtaagaccagcgaggtgaacgattaatgtaaaaaggccattacaggatacacaaagtaaaataataaaactacagtaagttagaaagggtagataataaattttttaagagtttaccacttattgtatcacatactcgtaagtatgttaaaagactaaaagatgtacacaaaaagtgattttcctcggaataagcacaaacgacacaaggtgatcacatttcatgtaaaagaatgcgaggagcacactttagaaataacacctcagcacaaaaaccatcttcaagataaacttcaatgggtgaacactgataccgcgaggcacagaagcttagtcagcaactgttttttaaataatgacaaaagcggttgtgacagttatctatttatcccatgtgttataaatatgaaatgtaagaattgtccacattttaagagcagttgcaaggataggatttcaagagaataattgtctatcccagaaatctataaataagggaagattttccacaattagggatggccaaattgagaattatagagaaagacacattgcattttgtactctgtaagaaactcatcaaatctcgataataagatgactcgtggactatgaagaattaacttcaaaactacgtaaaaatcttctttttgatatatattattactattattatttattatgtttatttattaaattaggcttgtttattgattaacaaaaatcagcgttaacagtttagtaattttattgagagccttgtaaaaaaaaaataaactcgaaaaaacacacctacctcaaataatattcaaacttttcctattctccaaccatgtatgaggatgcccatcaaaatgatgacaattagttgagggaaataactcagtgtcctgggaaagaaccctagggttcccaagggacaaaagcaactgagaacgcacactctagaagaagaaatactaaaggggtttttgagaaaaatagtgatgaaatccctgaaagacgtagtcaggatgcatacaatcccaaaagatacgtactattggtgaaattagaaaacagataacttcgacagagattgggagaatcgaatcggagaaattttgagttggaaggtgaggttgcgactgcaagagcgacatgtagtgatgcacaccctaaccaaccaaaagttcggaattatgctctgcaaatcctgtaaagatatttttatttttttaaaaaaaaagttgaacattttgatacatacttgaatgttaaattattaatattttatattgaataatttatatatatataaaaaaaatttcttatacaaacatgaggttgtgaattgtattgtacggagaattaagatcacttagccatgaacaaatcaatcatcaacaaattaaagttatggaatctttaattaatggttactagtatggtttcctaatgtccgttacttggtgcaagcaatctcaattcatattattgatttagtatgacatctaagtgaaggtgttgtatataatagagattatatataacatgtactgatatttaattaacttgtctttatcaaacatacatggcgtttaccataaataaagacctcattcatatcataaggatgatcaatagtagatcaacctaaatcttgagtaatcatgaactcttgttcatgtattagtttcttttgattcaatcgttaaacttttttagaaaaaatgattcttacaacttctattttgggaatataataaggtgaatggctaggaacttgatttataattatgaaatcttgattttcttaacagattgaatgttggttccctttaaatgttcattctggaactaaaaagttgttcacaaatttagattggatctaaattatactttaactagtgaattaacggtactaaatgataaagaagtatttagaagggtaaaatagtaatttgaccaaaattaattacgaaccgacacaaaaagggctaatcactagaattcattatattaatagacattgtaataaactcggcaaatataattctataattactaagagttcaattctatatttgtgatggagtaatcatggaattaataaaataagnnnatttggttgatgagattcaataaagaatctaatttattgaagcttactattataggtccatggtctccggatcgccaccttgcaacactgtcaagaagatggataaaactatacaatgatgtttggaaaaatctattttgaagtgtcaaaatagtaattattaatcttgtaataactaatttgttttaaatttattatttaaataaattggagaaaaaaagtgttgtctaggataatatatcactatttactggttaagacaatggtggcaccacatttactgtgttaagagtcaataataggtgcctataagatatggtgggcactatattggtgggcactatatttattttcactatatttatttttggatttttggattaattaattttggattaattaattttggattaattaattaattcaaaagataaatatttatttaaatttgaattaaaaaagtagttacagatatttatatttgttgagatattctctcaaaattgttgagagattatctcaagtgttaagagattcccttaatcggttattagttatttaatttaaactaaatatttaaatttaaaataaatatttataataaaatcgattaaatatatttgtttaaatattattattttagtatttgaaatttatttaattaaaaatttattattattttattaatttgaattaatataatgttataatcctgaatctgtatatacgtataatttaaaaaacttaaaaaaggttaatcatattattattcactctagaaaaagaaaagttcttgctcatgtgttgagataaattcaagaacataaatataattttatcctattagcccacactcatcctgtgtgtgatggaagatctaaaaaatcaaggtgtgagtttaacgttacaaggatacaatttgtgaaaagatttaaggatacactgattcacatcaaaaagtaaatatttcctttcatgtttttatttaagatttagtatatgcacatatggaaatttttgggatgttgtacgatgatcattaaaaaatattttttcgatgcgtacttgatttagtaccacaaatactaacaattggagggcataatcgcatgatggtaataaaggaagaagagcgaggtgacaggaaaataaaatcaaggaggaagctttgagaagaaggaaagttaattaatttgatttatttatttaggtgacgtttggtaacacttttttaatcagttttctgtttttaaaagtagaaaattgaaaa

SEQ ID NO: 26506 - DNA, 2614 bp, Cannabis sativa
  modified_base (576)..(576): a, c, t, g, unknown or other
agtgatcttgtgtgactaacctccaagcttgttttcccaacatggctaagttaaaatcccgtaaatgtcgaaagccaagaccaccatgatgcttatgacggcatagcttattccaacttgcccaactcaccccacgactctgattggaacccgaactccaccaatatttactcatcattccttccaacttgttacaagtttccaccggcaacaaaaacaccgacatagcataagtaggaagagcttgggcaactgtttttatcaacacctctttacccgcttttgaaagcaaacgaccttcccaactctgaattcttttctgtatcttatccttcagaaagccaagaatggcattcttattacggcccatgacgcagggaagaccaagatacaaactattctctggagcttcattcatacggagaaggttaaacatttcttgtctggaagccgaagtagtcttgagactaaagaagatagtagactttgagtaattaacacactgaccagaggcttgttcaaatagctggagcaaaagaagaacactatgcgcctccctatcaatagccttacaanagatatagcagtcatccgcaaacaacatatgtgaaataattggggcaccattacacacacgacaaccatgaagagctcccctagcttcgaatctccttataagagaagaaaaaccttcagcacacaagagaaataaataaggagaaagaggatcaccttgtctgagaccccttccaggaacaattggccccatctcacgacccccatgagtaatagtgtatgtgaccgttgagacacaatgcaagataagatcaaccacccgaacatcaaagcccattttgatcatcatatttctgagaaaaatccactcaacacgatcatacgctttactcatatcaagcttaagagccatctaaccttccttaccaactctcttccgcttaagataatgcattacctcaaacgaaatcataatattatcagtgataagtcggcccggaatgaaggcactttggttttctgagatgacaaaaggaagaacctgcttcaaccgattagctagaaccttagagcacaccttataaaggacattacaaagagcaatcggacgcaagtcacccatagtagtggtggttttcttcttagggattaacaccaaatttgtatgattaagaccattcggcaaacaaccaaataagaaaaaagagcggacctgtttgatgacatcatcacccacaattgcccaacacttttgataaaaaccaggagtcataccatccggcccaggggatttatcaggatgcatctgaaatagtgccgatttaacctcttcatcagtcacaggttgtaaaagagaatcattctgcagaggagtcacagttgtagaaatcccagcaataacatcatccatagaataattggaactagtgaactaattctgaaagtaagagcacataacatcagataagcccgagtcccaatcaacccaactcccatcttcgcattgaagtttatcaatagcattcattcggcgccgagaagatgcagtggcatgaaagaacttgctatttttatccccctcttgtagccacaattgcttcgatcgctggcgccaaaaaacctctttctgagtaagaacctcaaatagttctgtctcagcctccttatacttagcaatagcatcaggatctctaccttgtttccaccgtcaaacctcattcttccaatattttatacgagaagcaaaattacccgagtaatctttgccccaaaccgaaagcaactccccacacctttggagcttttcttggatacccactaaataatactcctcccaacactccttcactacttgataacagagtggttcccgaagccaacaattttcaaatcggaatttacgattcccaggaacaatattatgaataaccacatcaagtaaaataggacaatgatcagaagaagatacctcaaggttaataagtttggcttgaggaaaaagttggagccacctttcagtcaccagagcacgatctaaacgaacctctatccagttatccgtcccacgactcttctcccaagtaaactgatgccccaaaatgtctaagtcaatcaacccacactcctgaatagtatcccgaaaaccatcaattaaccagttaggataggggtgtccccctcttttgtcgtcctgagagagaacattattcatatcaccaatcacacaccaaggaagagtgttcccatgagccaaagtccgaagttgctccaaagaagacccacgcagacttcttttcgactccccataaaatcccgtaagacgccactccccaatattactagaccgaactccacatcaacaaagtttgttgcaaaattcagaactttgacatcatccttattcctccataataaagctacccccccacttctaccacatgaatcaaccgcaaacactccttcaaatttcagcttcactcgaactcgctccaacacatctttacgacacaaagtttcacacaaaaagataaaatcaggtttcttatgggccacggtatcaaaaaggaattgtattgctcgtgggttgcccatcccacga

SEQ ID NO: 26507 - DNA, 5096 bp, Cannabis sativa
agtcgtccccattcttttaaaaccaaacacaggattactttcagcataatccaaaacaggccctaattgtattttcgaggcgagtttattgagcacatttattattttataatccaaactggtttattttctaactttttaatgtgtcattagcatattaattgctcgaaatataagtataacacttgacaactctaaaagtttcttacatagttccaaatcacattaaattaataacttttggtaaaaattaactttttctcaaaaaaaaaaaaaaaataaaataacaaaaagaaagaaagaaaaatatcatgtgaccatccatattaagaacattttacataaaattaattttacaaatacatatagtaagagtaactacattagagatgctctaatagtattagtcttattatttttcttttctcttattgcgaggatattggaaactcgtataagaaaatgtcgaataaattttttgccaaaattaaaggaaagacaaccttaataagagaaacaaataattcattttataagtttgttattacgggtagtttctacaaagtgaacgattaaactaataatgtagtatatatataacacttgaattctcgatgtaaatactattatttcaaagattaaaaagaaggctgtgactatgactatatagcatatcaatatggtaattaagttcacaatcacaatcacaatctcacatatcaaaagtcatattattatatggtttggttcctaattaatttgtatatatagagagatggagaaccatagatcgagggtagaaaattataaataaggaaattatgaaacccatatcaattaatatattaaatttaaaataaagaagattgtaaaataataaattatatgattaatttaagtatataataaaggtgagttgatttcctagagaaaatttccttctttattttggtatcattttgtattttcttgctctactctttcttagactcacaacataacaaatcaactgtttcacacctttccacaatcaattaactatataaaaaaaaaaaaattggtgtcaagtagtaatttaaatgcatatatattcgatccatcttgctatttgaccacgtcatttattttatctttttctttattttttttttttaatttttatcttcatttctttgtatagatctaaaacaacaatttttttctcaacttggtgttcatttataacctcttcttctttttttcttatgtaattttaatgtaatagttttatttgtattttaaaggttattttggttctatccttcctattccctcaaactataataagaaaatttctaacaaaatttttaaaatagattttgtattttttaaaatggtaaaaataagacattgagcttaagttttgataactttttttttaaaataatcaacttgaaaacaatccctaagaacagatatagaaaatgtaaacatttttgtcataacaactttagatcgaattattattaaattttattttgcaaaaaatcagttcaaggtcctatttgtactatcatggaaaatacagggtatattttgtcatttaacaaaatataaaatccaaaattagtaatttttacaaaacacaaggtcaaaaataatatttatacaatttttttttattatatctttatataaattataaaattatgtaataaataaattcaatatatatgtatatgatactaattttttttttccgataaatattcttaatttattatgataatcatgatatttaaaacttgattttgttttgaaatcataaagaattaaaggattgatcttgtactctcgtatgtagctcgatcaacatatgcaattcaactctcgatatatatatatatataatatatatatatatatataaatatgatatgaatcaaagaattccatgctattataaagataattaaaatacatgggaaactgtgtgggtgttttgaaaggtttcaaagcatcatcatcatcatcatataataataataataataatgatcagatggtgatagatgatcatgatcatgatcaagatggttcggtcaaagtcaaagttatgacatcaaccggtggcgtaatggagctctatgctcccataacggtcagctccattaccgacgagtttcctggccacgccatattccggcgaatccaaagccctaataatggtgacttagtcttctccgatccattactccccaacgaccacctcaatcctggtgagctctactatctcctacatcatgatcatcatgatcatgatcttatcatcatcactactgatcaaaatagtagtagtactgtgccgtacagaatctcgtcttgtgatggtgatcatgaggaattagggaagaaaaagaagaagaaaaagaagaatttgatgatgagaaagatgatgaagaaaaatggaagtagggtttggagagtgaagttagctatatgtcctcaacaacttactcagattctgtctagggatgcacccactctggctctaattaatagtgttcggacggtggccaagtgtggcggtaaccgcggtggtgccgcctccttttgtgccagctccggttgatgtagtgtgtgtgtgtgggtgtagctagttttgatggacaaaagtgatcatgtgtcacatttattttgaatattgtcttttggtcaaataaagatttacattaatagctacaagcctacaagtaatactaatgaggttttgattaaactgtaattacaatcagaataattaatgggagaaataaattaatttaaactaaaaaagaatcgaaaacaatattttattatactatttactaaattgtacggaaagaaaatcaaaattatatattattttatttatataactttgaaagataattagaagattttaatttgaaagataattaatggtaaatatgttttgtttataaatttttgaaagcatatttgtcttttttatttttaattaataaaattaaatttaaaataaaataaattaggaaagagaaatgtattctctatcaaaatagggagaacttttcttttattttttctctagtttgtgtgagtcccattacattttacctttttaaaatttagtaaacgattgtatagatattaatactgtggggtttatagcctggtgcaagtaatattttattggactggtttttctgttataacagttagttataactagttatgtcagttagttttgtactctcttttgcctatgtatataaaggctattttagttgtaatattctgtgagagaatttgagaggctgtgagttgtgagcacattgtaaagagcatgaagagtttaaactcatagctctcgagtgagaacaaaagtcggagcaagactccattgtgtactgtgttctgtagtccaattctgttgtgttctctgagttatcttcatcaagaaataaaggcaaagcctcaaggcggttcctcccaaggattagatccaagtgttattcacttgtgattgaaccttgtaaaccttgtgttcttactgtttttctgctgctttattaattcttgtttctggtttactgccaattgatttttctggtttgtgttaattgttcagctatctttattgatctgttttaatgttcttgaatggtgattgaatcaccacaagtaccatattattaattctcattttttttaagtaaatatattaaggtaataattagagtgttcataaaataataaatccaatcaaatccgcacactcgtactttacaagaattggattgaaaaatttaaaacttgcatttgtaaattggatgttaattgtaatgtgaaagtaattaatctaatctaatctacacatatttatatatatatatatattttaaaaaaaactatatatacaatacaattaacattttaataaatgtggattgtatctttacaattaacaaacacatgaccacgagtctctccctgtagagagtgttttgtccctccttgtagagtgattttgtttttgtgtgtcgaagggttgattactggctccaaagttttgctatggcctcctctagcaaagaagattatgctttgaccaaaaggtgggctgatatatgcctagaagatgaggaagaacatgaagtctccctggctgacgattgcgacgaggaagaagaattgaattttgatgacagatggtgcctagtgggtcgaatgctgtctggaaaagtctctgatttccagatattccaaaatattattgctgatttatggaagcctggaagaggtattttcattaagattctggatcaaaacaggtttctttttcagttctatcatgagatagatatcaaaagggtgattgatggcagtccttggacgtatgatcgcaaacaactactcattgaaaggcttgaaccaggtggaaatcctagaacgattgacataaacacgttagacatgtgggttcaaatccacgatctgcgaactggattcaaaactgaatgggcaataagggaagcggctcgctatatcggtcagtacgtggagtccgatcctaacaattttcaaggcgtgtggcgtgattaccttcgggttcgagttcgagttaatgttaatgctccattgaaaagacgaatgaagattcgcagccgcaatggagaagctttttatgcttacttcaaatacgaaagagttccgacattttgtttcatctgcggagtcatgggacatgctgaacgtttctgtgagaagatatatgataccccgattgagaacatagtgaaaccatacagcatagagatgaaggctccgacgagacgacaaagttttttgacagcctctccatggctccggtcaggcaagggaggtcatgctccagcgaagcagtcgacatcagcatctccctctgttaatgctcctacggattttaggggcactaattcagttaattgtgatcctcatgatagtcaatcaaaatcacgtgattatgggaatcagcaatcaaccttaaaagagcatgttgtgttggtcaatgacaactcagcagatttcaatagtgaggagataattgaaatctc

SEQ ID NO: 26508 - DNA, 970 bp, Cannabis sativa
  modified_base (44)..(48): a, c, t, g, unknown or other
  modified_base (236)..(263): a, c, t, g, unknown or other
aataagaaaaagggaaactaagaaaaaaagaatgttgattacannnnntggtaataaataaaagatttggacatccacataattactaatatttataacagtattatatatttttgtctcgtcagttttgttatagttaaatagtacgtactatatatattctataatttttatttttaaaattctaatattatatatagattttattggcaaaaccattattattattattattnnnnnnnnnnnnnnnnnnnnnnnnnnnnttattattattattatatacataatattttttttcttaaaaaaaaacccaactgacagtccactaaataccagctgatcccttttaatttctaacccgagttttacaaaaacaaaaatattaaattttaggtaaatttttatatttatactgtcacatggcaaaatttacatttttactatcctaaccttttttttcttttatactgtaaaggccgaaattaaaaaaatgacgcctccatcttccatacccatgaacagaaccaccgtaaaaatactaaaatagccgaaaaataaccattaattctaacgagataaagcaaaaacataaaaactattaatattcgggttgtcatggtttttctaatattatttttgggttgtactattgtttcgtatgtttagcaaatgttagttttcaattacacaggttagtgtacccaataggacaccaaagtgagcggatgtagcacaaaatgtgaaagatgtaatagtcttacctcccattgaaatggtaaaatctgaaaggcaaatgttaggttatttttagtattaaatttaaattaagtttaatatatttttaattgagttttaatcgtatttggagcattttgacgtttgttatcttttaattttgcagatttaaaataaaagaagattagaaaaatattaagagaaaaagatgggaaaaaaagataaaaatatctca

SEQ ID NO: 26509 - DNA, 4181 bp, Cannabis sativa
acttaggtatttatttgctactcggcataaaacttaagtatttatgtcgcaaattactctaaaattaatggtataatttaattttttatcttattatttaataaattataatcaagattgaagagtttactcaaatgcaaccataaacattaactagacaatcaaatatagattagggtatatagatataaataaataaaacttaattgctcgaacaaaaaaaaaaaatagagagtgagagatctacctttaatatgtatttctatggcaaggtgttcagcatgatctgtggccttgattatagcaatatgtttaagttctgaaaaatattattactcaataatgaaaattcattgtaatttagtttgtcacacaaacaaataatactaccaaataaaataatttatcaagaattcatattttttcaaaagatctcacaaatataaataaaacataaaatttcaacttaaagagaagaaaaataatataattgcttaatcatctatatggtccgtgtggtaagaataaaacataaaatttcaacttaaagagaagaaaaataatatatttgcttaatcatctatatagtctgtgtagtaaggcagaatagttgagaacaccacctttttagcactttattaaaaatgctctaaatagacattattgatttgtaaccttatttttttacttgaaaattttatgaatgcaaggtattagttgagaagattaaaaaaataaaaaaactaaaaaaaaaaaaaaaaaccttgaaaaatttagaaaaatcacaaaataaaaaaattaaattattaagataataaactgccacgtcatcaccttaaactgtagcattgtatagatatatagatagagaatgaataatcaaatctccaatgtttacttgaaaagaatggaattaattatatgatattgactacattcatttgtttactaaacttatgataaattagtaggatctactaaagtaagggaaagaaagaaaacaagttattctcctattttctttttaaggaattacattctccttcctaatttatatgagtattcttatgggatattaatgtgtaattattagtatgagatggtgtcttataattggttagacattctctataattttctattaaattagaataaataggatctcatattgaattacactaataatgattacatatcacaagagtattagacaccataagtgccatttaaaagcatcctcaatgggagacaacatttataattttcaaaatatacagatcatcttaaaatattattattattttttctatttttttttttattcacataagcttcaatgctctatttatttttggggtaagttgaaaaatactattttttttaatcaattaatcaaatttacctctattttcatatttaattgaaatatatctctttttgtatgtgttgtacccaaattaccctgacataaaagagttatttagagagtatattgaagtgacatgggtaaaattagtacaatatttaaagaaaaaggtaaaaataatagactttaagaaagagggtaaaaataaaataagaaaatataaaaagggtatatagttttattttcattgctcaacaaaaaacgattggacacctatagtagcttcataggagcaacggtcatgtctcactttttttagtttttttttcttttctaaataaaaattagagattaattcaaaaaaataaacaataaatagtaaaataaaatattataattaatagtgtaaaacatttatagtgataacttttagagttacttggcgttagaatatttaataaatgtgcataagataaaaaaataaaatatttatatgatgtgaccattatacatattaagcaacactttccattaaataagtcttgagaattaaacaaatatacatattatgtgcaacccattggggatgctctaacatttctcaatttatattgtttgcttgtattttgtttaggttctcagatctacacgtgtaactgctcattcagtctgtcagttctagcttcatctccttttagctttgggaagaagtttaagttatcctgtggtgaccaagatttcggctgatagccttaacaaacgtccatattacagcccaaacatctacataaaatacaacacacaactactcgggaacataaacttgtcattgtgtatacaaataagtgtccatccataaaataaatacatgttattaaaactaaaagtgtctaaccaagactataaagtacacaagccaagccagttaatgaaaaagggcctaaaagatcacaattcacaacaacaatgtcaaacataatactccacccgtacaacaccaccaccaccatcaccaccccttacataatctagaattgatgaaagattttcaagttcgcactgctcttttttttttattattattattattcgtttgattaaattaagacattcaaatacaaataaagggtacccactacttgtacctcaagggaaagataggtggtattatagcggagaaatcataacgaccactttgaactgaatcaaataaatagcaataagagaaacacgaaaagttcaaacctaaacaaaggttttcaagccttgccagtcttctggttgggcttgaagacatacttgatgagggattccttgatgggcaacatttcagggaattctttgctcaattttgtggtatcaagctcgttgttgctccttggggcaacaattaccttggcctgctcctcaagatcaaagtttttccatgtgtagttggggtcgatgtattcacggtacaattccaagacctcattgtggctgaccacaccagggtttgtgaagttccatattccagtgagatttctcttcgccatctcaaccgaaatgggaaggagttcatccaagattgtcatggagttagggatattgacaaccttctcgtatcgagagatctttgtaatgaagttgcgagggtttgataaatctgatgagatgggcattcttacacgcaaaatgcagacattctcatagttcttgagcagttcctcaaccttcacaattaccataaagagtatccagagtcagtaactttagtccattgagtgttccaaaaagcatataaaagtactcaaaatagagaaacaccccataagttctctataccagaaggcagaaacacatcatttatgataacaggggcaaaacataaaaggaagaatggtagcaaccttgacttttaaaaactcaactgtaatccccaaaaaaacattacaatcaccctgaatcactaaggtcagcttaacagattcaagctaagtcaactattggaacttaaattctgcttcacagatcaatcattgaagtaagacccttttcatgaaaaagttagttcctgctgttagtacgcaaacacactcacccatgcccatgggccatgacttgagttagccttatcctagccataaatgggtaaggttagatctcttggccactcacgtaacaaaacgcaaatagtagctgtcccactcaactctagaatctttgtgactctagcatcacatttctaggtaagtgcctatgaagaatctaaaccctccaaccgtattgagaacaaactacttacacaaaacagggaacatcccaaaatttacaaaacacaccctttgacctttcgaagtcaacggcactcttactttcttcacaccaaatttaacagattttatttatatacatactataacagatttaatatgagtcagctatacatgaacttgaatcataaaatcaagtacaacaaaactaaaaatcacatatttaatccaaaaattgagagcatgccatagatccaaaagaacaaatgccagatctaatacatggccataagcaaaatagtattcaaacaataatcaaaagttgataaatgacagtgctcaccatggccttggtatttgaatagaaggatccgatgaagttaggcttatcctcctccttgaatccgatacccgacccgagcgggtgagccgaatcgtactcaaatatacatccagtggcatagttgagaagaagaagtcctcgctcccggcaaatgtcggcgaggttcaaggtcccgacgacattagtacggatggtctcgaccttatgtgactcacaccaa

SEQ ID NO: 26510 - DNA, 3276 bp, Cannabis sativa
  modified_base (2900)..(2901): a, c, t, g, unknown or other
agggcacaaaacccaacaccaggtaccaggagcaggtctcggaatcagctccacaactcatcctccaaggctacaaaacgctccttggattagcgcctatgaccagatcccacctggggagcctcgcatagagatttatgaccatgaggaggccgatccttaggtccctagctcagctaaattgtagctgacttataatagcagttgtgagactctcttaataattaacacgaattgtttcaacactggtttatggaaatggaggaacattgaaaaccagcgagttgagtaggaacaatagagatcttacaatggaaagctgacctgtctcaatagattagagaagcttatcgctctggttgtagaactacttcccgtagggatctttccaagttggtgagagagacttctagtcaaccaactggtcatgtgggaactagtgctcaaggggaaaaccttaacactcaaaatgccacaaccacacatggtaatccagtaggcactaagaaaacatcaagtctggaaacctcccggagggaaagcaccttcgagcaagagcctgaaaggactaaagctcgtgggtgccaaccaatgggccctccatctgatgttgaacgacctcacaacaccgagagagcaaacatgactcctccaccaagtccttctcaacgctctcatgacaccaggcctggagaccctgcaaggggaaatgaacctactattcaaactaacagaggtaataaaagatactacttcaaaactaaaggctattagattttgcgagcaaggaccaatgaaccacttcatactcaaaagtactttcgagatgaaaggggtgaattatgccattattttgctcgtggccctaatggccaacagtatgagtacttccctcgagtgcatggaaaggagttgaacttgagcaactagtccaattctcttcacacttgtgatctagatgaagattactttaatgaagtagccactacaatgctcttaatgaccatccaaatagaaaattgtcttgagatgatctagagttcattctagagacttcactagagttgtcttcacaaccccatggttaggaaacagcaacaagacccaagctgactagagtccacgattgacttggaagaccaagacacctccatgacctcttgaccaagaaacggtcagtggaagcgataacttctaaaggggaccctactcgggtaatagatggtccaactaggatgcagaccactgcccatggggttaaccaagcagaatttgacaccttagtagccttagtgaagggaatcatgactccttagatgtcagaattcgaacttgacagagagcggcactcaacactctccgaacaaatcaaagctcttcctatccctccaaagttcaagaatccttcgtgaaatcagtacatcgagaagaaagatctattatctcacatccactactttgaagtgtagaccaaactgcaaggtgtgagagacgatgtgaggtgcagaacttccctacaacactgacatgcctagctcagcgatggtaccttaagctctcccctggatcaatcaactcatggaaagatctggtggacacttttggtaactaattttctccttcctgacaatgcaagatcgaatccattaacttggtgaatttcaagcaacaagaagatgatcccttcaaggactacattcaatgattcttagaggcggtcgctaagaccaaaagtcatagcaaagatgcaagggtaatgacacttacaggtgaacttaaggagatgagtcctctgtggtttgacctttatctcaaggcggtatacaccatgaatgactttcttaatagagtagatgactttatcaaactagaagaagctatcacccaagccaagggctcaaagggtggcaagaagaagtcaccagactcccaaacccctactactaaggcgcagggcaatggaaagaaaggagaatcagatagagggaagagatttaacaacggtggcaagccaagaaactcccccaattgaaagaagcccaagactgggggtaggcccttacgagagtatgagccttactacaacacttactccatcctcttggccctaagagaggagatctatacagccacacaatcaatagtgtcgtatcacctcttcccttcaaagagttagggaagatggacatgaataaactctatcgctaccacaacaattacgatcatgacactaatgagtgtaatcagttgcgagtcaagatacaatttctcatcaatgaaaaacatttttctcttcagcggtatgtataacctgacgctgcagttggggcaatttgggggccctcacctagttggaaattcaaggaaggccttagaaaggtatgcaagatcgctctaaaatgaactgagagttgaagtcttggaagttgcagaatgtcctccaaagcctcaatgttatgggtgtgaacctatcaccttcagagactttgactcatatcatgcagctaccctcataaagatcccttagttgttgaggaacaaataactaatatgatagtggctaggggatgattgatgatggagcatccttgaacatcatgtttaaccaatccctaatcagatgggtttgacactagaaaacctaaaaccatgtgagcagctaatgtataatttcagcatagccagtattgctccatgtggcaagatcaaactaccattcactgtcgaaattgcccaaagcagaccgccatcatggccatattcatagtggtggatgtgaagtccccttacaacatgatgcttagaaggctagccctatatgtaatatcctggtaagcctaatggtaaataattagtatatatatttatattatgggctaatcaggtaataagtgggattnngatcctactaatctatttcagcataaaatttaaattttactataagtgagaaaataagcataatttataaattacagatatttatatagcatgtgtgaatgtaataggagctatatgtgaaataaaatactttcaagtttggtgatccaaaagactcgataagtggataaataagtgtaatctgttaattacagagatttatttgaaatgcgtggatataatatgagttatttgtgaaataataatatttttcaggttcggcgaccttggagactcgactggaagccaaaattgtcacaacagttttagttagaaatattgatgggattattagaataagttgattttaaaaataccggagtattttggggtact

SEQ ID NO: 26511 - DNA, 4716 bp, Cannabis sativa
tggaggcttgaagcggggacgttacattactagccctattgacccagccatgaagtacacacatgatcaactgaactatcttattcaacaaaacatccatatgcaaaattatatggcgcagaggagaattttcgatgaagggcaagttcaacagctaaattcttcgatcactcagatgaatatcaggatttaggaccctaattacttaaaaaatccacctcgattttacccttatgaccaaccatcactaccaaaccccttctgatgggggttgcagataagtccctttttctttattttgcatgacacattggggataatatgcactttatttttggaggatgggacttataaatttttgctatttttttctgtttttgcttaatgttatgtttatttttttagttaagtttaaagtgtttagagtattaataattgagtcgatgataactgattaattgaattaccaatgttatttgtagaatggattgagatgtaaacattgtgcttaatttgtaaactttttagattaatttagttgctatttgaaattgtgtatcgatgtaaatgatcaatatttggagaatatcatttgtattctagtttagttcgtggaatgtttgcttggatggaataaaacttgcatgatttatttttttgagaaaaaatcctggatgcatattacttggaacatgattaaggtaattttattagaccgattgagccttttgagcctacccttgtgttgtatccttagtttacttgaactcgagccttagcctgttataaaattttaactactttttaagccgatgttattcccattcactacatgtattctcaatgaacctatgccataagtgtactgataagtttaggggagtggattgttatggagaaattatgtgaaaagtgggagattgagaaaaagttatttaatgtgaaagtgtttctaacatcactgaaaaaaagatactttctcgctaagaaaaagaagttcaattaatgaagaaaaaattagtgttgttggattcaaaaattaaactgtctcaattgttaaaagaatttttcttgagtaaatgtggagaattgggaaattatatgggttcttaattggtttatgatgtgcttatggtataattaaggcgaaatgacttttcatctaccttttacctaagccgtgatattacaacctaaaaagaccttttaattctaagtgaggattgtcgacattagtggagagagataggtcatgcaagcatattaaacattggattgtgaaaaattggtgagatgtataatatttgtaatgcttttgaaatattgatgttaaatttgcagttatacattgtatttcaaaagaagtatccatgttaattgttagagttttttaattaaaaatctggtttaacctattgattgaagtttcataagtggcggcggtagtttgattatttggaggcttagttatcttatagtttgttagtttatttttttgtttgtctttagttttagttttactcaaggacgagtaaggaattagttcgggagaatttgttaggctatttttagcctaagtttcaggttgatatttagagttatttttagtattattaatgcttttaggacagaattatgcatgtaatctatattttccaggctctcgtgatttttacaagtcaagtgcatcaatatttgaaaaagaatcgaggcaggacaaatgaggcttaaatacatattttccatgtaatcttggcccggcaaccatgacttatggctgcagcaagatcactacagaatgggggttttcaaattttgtttagtggccgcagcaaggaagaataaggtcgtagccaggcaatctcgccatgacaaccacgacttatggtcgcggcgagatggtgggtagagacatctaattttaactttgtgaagtcgccaaggcgaggacattcttggccactgcaccacattcagatttaccttctgcagctcaatgtcaaaaactgatttcacttttgagtcaacaatgaaccaaagattctcctaacacttctttagctcaacaagtggccactaatttctttggtaaccatgtttctcgccataaatattagattaaagacactggtgctaccgatcacgtttgttgtgatatgacatgtttttcttcttttacacatacgtccattaatgataaacatgttaacttacctaatggcacacttgttcccattgtcaacataggcactgttcatctttctaatgccataatgttgactaatgttctctttgttgggatattacgtttgatgtgatataacatatttttcttcatttactcataccattagtgataaacatgttaatttacctaacaacacacttgttcccattgtcaacataggcactattcatctttctaatgctataattttgattaatgttctctttgttctacaatttcagttctactttttttaagtgtatttatgcaaaattcttcttattccatgatcttcactcatgataaatgtttcttaaaggaaccccgtcaaattttgaagactgggattactaaaagacatgggaatttctattatcttcagcaaatgtctactttttttaacacaacttcttgtaataatcttgagcaaaaattatgttatgatactactatttttttataatattcaatgtaaaaatcaccaatggcattcttgccttggccatccttcattgactgttacaaataaagtcaataaaatgtttgacattcccattgattcgcatcattcatttcattgtcctacttatcatcttgcaaaataaaagaaactttctttgtttctaataataattttgcccccaacttatttgatttaattcacattgatatatgatgttcattccatgtaactagtattatcttaactatagataaatcacaatttacttggatatatttacttgctgccaaatctgattctcaatcataattttttttacttaattaattcatacataatatcacactactatcaagtctgtctgtacagataatgccaaaaaactcaatttaactgccttttttgctagtaaaggagtctttcagtataattcttgtgttgataaacctaagcagaactttgtagttgaaagaaagtatcagcataaattaaacattgctagggtactcacatttgagtctcatactccccttgcatattggagcttcatttttaaggctgctgtttatctacttaataaagcttcatctattcttcttaatgataaaacttcatttgagcttcttaataataaataaccaacttatgcatacttgagacattggctgccttgcctatgctttcacattagatagaaataggcacaagttctctctaagatcaaaagcatatgtttttttaggttatcctgaaaaatatgaaagcttattgtcttcttaatttacaaagtaactagatttctacttcaataatagattttatttttcatgaagacatttatccatttcataattgccttgctaattatcttgttgataacttttatcatacaactattattcctactaatattgtagatcctagttcacaacctgatgatattatatcagaacaatagaatacaaaaacatggcgactttttaaacctccttcctatttataaaattatcaatgtgatcttactcaagtttcatcttctactacttatcctatttcaatatttttatcttataataagttttctccatcatttaaagcagccattattattgctaacacaattgaagaacctacttcatatacccaagcatgtagaattccaatatggaataatgttatgaatcatgaaataaaggtatcagaagataataatacttggattatcatctcactgccttctaagcaacacacaattggttgtaaatgggtcaatcgaatcaaatataaagtcaatgaagaagtagaaaggttaaaagcttgtttagtggccaaaggctatacccaacaagaaggtatagactatttcgacacttatgctcgagtagctaagttcaatactttaaaacttctatttgcacttactgctataaataattggagcttacatcaattagatgtaaataatgtcttttttacatggagatttaaatgaggatatttacatgaaactacctcaaggatatagtactcctaagggtaaactccctcctaatctggtatgcaaattacaaaatagtttatatggtttgaaacaaagcctcacgacagtagtatgcaaaattaagcaccactctcctttacaaaagatttgcacaatctccttctcggccattctctctttatcaaacataatttcaatgtgtttttagctattttgatttatgttgatgatataatccttgtttctaacaatgataatgctcttgctgatttcaaatctcagttaaatactgaatttaaattaaaaaatcttagtccgttgagatttttttgtggtcttgaaataggcaggtccaacaaaggtatctccgtgtctcaaagacccttcactttaaaacttcttcaagaatctagatacctcagttcaagagttactccttccccattggaacctaatgtcaaactcaacaatgatgttggtcaatctttgtcaaatcctactccatatagaagtctcattggaaaa

SEQ ID NO: 26512 - DNA, 5987 bp, Cannabis sativa
aataatctaaatttataaaattattaataaacaaaaagatattcttttctttgattttttattttcccttactttctctctccctctcaacgatttgtttcctaccctctctcctcaagtatcttgcttccttcccagatctgaaaagatcccaacattcaacaccattactcagacggtggtagttcaaacgagatgggaaagatgaaatggtggctattgttgtctccataggtgggcgagaggaatgaaagagagcgagagagatgaggggagtgctatgcgaatatggctgggcatgatggcgttttcaggcgagagaaagtggtggagatctggagagctaaacggagttgaagggggaccgtggctcaggcgagatagggtggtgggggtgaagctcatcgagaagtgggtcaagcgagatggaatgggtagggatggagttttgggcgagaaaaaaatgaacaaaaggtggctggaatctgggcaaatctgaggtggattttatataaatatggtggattttgttctgggttttttgatgttgatatttgtgttttagatttgtgatatttgggtttgatttttgtgaaaagtttagattttttttttttttgatgtatacgattcagatgggtggtggatggtggttttaatggtgattggtgatggggtagtatgaagaagatgaagaatgaagtaatataaaaactgaaaaaaaaaaatatgaatgaagaacacgagaaaaaaaaaagaaataataaaagaaaaaatatattattttttattattcattaattggaaattatttgttataatttttttaaataattatattaagtggaccaatataaatatgctatgtgtacatgatgtacacgtaggcagtccatgtcagcagttaacggagataaatagatggcaccttaaattttctaagagtttagcactttggagggttttcccacaaaaatataaggttggatggttatttgcaagtgaattaaaagttgagggagttttgccgccaataactcaaaagtaaaacctgtgtcacaaaatagctcccaagacaccactacacatattgctaaccctgaagttacatattgtcatctgagaattattataatgtgaagtaaaattgcacaacaactaaaataggcccccaagacaccgctacctatgatttcgtgtcttctttttctcttttttggacgccaccaacacccttagcatcaaggacttgtcttctctttctcctctttctctccttctctctctttggcatcaccaacacccttggcgccaagggcctctcttctcttactcctctttctctctttctgtctccttggcaccaccaaacctcttggcaccaagggcttttctccaccatccttttctcctcccaccaaggaagttcaaaaccccatttcttttatcttaccacttagtggtaaaacaaaacacaagtcttgtggcataaagaaggcaagttagaagccaaatggtactagagtagggggactgaaaggacagacaaaatgtcgtttggagcgtattctataacaacctgacctcagcacctgacaagtagtggctatagaaccaaacgccttgtatttatgtaaggggaaccacacaaatgtgtcgagtggacatcccttataaaaagacaaggcgacattgtctatcacttcgtcagttaacggaggcccaccacctcaaacatgagtatctccaccaagcagcatcccccactacccgttccacaggatctgagagtccctcaccattgaactggagaagaaaaacaagtctactcaatgagcttgagcttccacactcgaatccatcaagaacaaatgaatgacctcttgattaaaaatcaaagaatggaggagacgatggccaacatgcaagaagtcttttattttctactgcacgggcactctcatgcacccattttcatgcgcaaaggcaaaaatgctaagggacgcagccgcgcccagccaagtggggggatttccatgtagcttactaattacaccccctagttgtccccaaaacaggcaataccacataaaaacctgggaaaagatcagagattagagcccccaatcacctgaagatcaccgagacaaaagtcaccacaccagacttaaggaaaactcttaatgagaagtgtgccctgccactacatgaaagtggacttttgctggtgactttttatgctggcaaaagtagactaaatgcgccaacaaaagaagtcagcgaatcttggtcggtaaaagagttttatgctctggaaaaacttgtttttgtcgacgagaattagcaccggcacaacttcaacgccggggtaaacggataccctaatctgctttgaaccagatttgatacctttttgccggcgcgttactgcgccagtaaaaggtttgcatcttttcctgtaattggcgcagaaagttttaccgacacacctattacgctggtaaaatgtttcacgccaatgtgaggaaatggtgcgaaccttttagggtcgagctttaccggcgcagtaatgcgccgctaaaatatttttttttaaaaaaataataaattaattataataattataattttatcaattgaaaatataaaattatattttatagtaacatactttgaaaaaaaaatacaaacattatttacattgataattagaaatttttttaattgaactaatataacgaaagttatgtactaaaattagtaagtaatgtaaataacaaaacattaaaagatattcagaaaaaaaaaaagtaaagttctaattgtgaataaaatatgtaatgttctaaagacaagtaatgtcatcgtcgttgttcctttgagtctcgggaggatgcgttgacgatctagcaccaggagtagtggggaatggtggtagatccatcgaaggcaagttgaaattttggcacaacctgagaaaaatactaaaactgatcttagaatcgtctaaggtagatctattgtgtttcatattgctgcctcgtatactgagttgtttgctctgctttctccactttttttttgtaaggtctcgtactgttccataataacggttagtggggcagaagaattcatggcaggtgctcttttgaccccaactgcctttaatctcgggagattggcaaagcctcttagatgtagacatcactccctgagtacttgcatcataataggtaagtctcgggggtactgtgtggaatctacaacagtctcatcaggctgatcctcagtggacgctggttgacttacagctaattcaattatttactcctaaaacaaacaactaaattaaatagttaatttaaatacaaaataaattgaaagaaataaataaaaatcaatataaaggtaaacttatgtaagcttgttgcacgtattcgttgcgctaatttttgtctttatggtgaaacttttgaaaagtttccacagtaattggaagttctcctgtgtcggagttagctatatttaagaaaaaaagtattattattgaatttaaaaaaaaaaaaaaacttatcaatgataatgtattatataatgttaccctagagacaacatgtgaaacaataggcttggatccccagcttccttgaagtttcatcttaccctgactttctttattttttgttgctcttgcttgaaattaatattttttcttacaattaattatttattattgactatataacataaagtattactaaaattaaaaattttattaagtaccttttgtttttctgtgttctagtaagcaatgcaatcactccacacctcctgagttacttcgtcagaaagtaacatgtatgtcctctcatgtccaagctcctgaatattttctatctattttcttaattacaatcaaacctccagtcacgcaaatcctttgacatctcgtactcaccatagtctacgaacgcaagattatctcatgggaggacaaaatttatctgcaaaaaaaatacacattcacattagtacattaattagaaatttaagaagaatatagtaaattataaatttaaaaataaattatgaaacacctcaagtctatcccacaatgcattaatttcagctctagaaacatcttcccatttgaatttattcatggggatggacatgcgaaccatccatttacacatattgttgaactttttttccatttttaccgacaggggtgcccatttcttcatgaaattcaatgtgtagtttggcagccgatatttttgaaagcgctttcccaacatttttgcctttgtatctacctcttactctttttttttcgaagtgctgccacctagtgtagacgtacaatatataaaacatatattttcagatttaaaataaacaaccatattgataacatattaaataagaacatatgtaatttttattcctattaaaacattgttacatttacaattcatcatcatcagttacatatacagcattatcatcattgtcactctctaattctaagcaattattgtcttggtcattcccttaggtgtgatcatcgacaatgaaattatctaactgttgaggctctgaattcacacgatggatgtttgcaacttcagtttggtccacatcatggcgaacatagtcaacatcatccaactgtgaaagttgaacaactaacgtagtttcaactgaattgttttcctatataaagggtgtatccccatcattgtccgcgaagtcccaaacattttgtgggatgtaatcattcacaatcagatagtctttactgttcttaagatcagggatgtaagatatcaattttgcttgagatgcaagtatgaacggttcattttggtactactctcggttgacgcaaatgctagtaagaacaccatcactatccattctaagtgtcaaactacttacacataaataagagaacactgtagtcctttaaataagtgaactccataattttttcaagtgtgccataaaaattttgtccatcttcactgggcaccataacattgttattttgtattatgcagttattatacctctccttaaccgaaaatttaataccgtttactatgcacccaggataaaaataaattgttggattcgatgggttagcaatagcatacaactcatctgacactacaccatagttgctcaaccgtagttcattaatctacaatttaggaaagatgttaattatttagaaaagtttaagagttagtgtgaacaagattatgaatattgagaggcaacaatgcttactcgagttttaaaccatttagggaactcaatctcttgcacatttttaatattgcctacacccctagcttgaagcaactccttgtgctcactacataataacacacttggtaagttaaattttttttaggtgaagtcaaatattgttagagattgtttatggaatttatacttacttgatatatggctcaacctttgtgcagttgttcaatatataccactctgtcttatgcttacttatcattggtaagtgtcaactgtcctcataaccagtggtcggccaacatgcttgaatacagaaaattatcgagttggcatgttttggatgatgtcattgttccgttcaggatggttgaatcgagtttccacttcttgaaaatacatagaacaaaatgttaatgcctcattaaccacaaaagattcagcaatagagccttccggacaagcacgattcctgacatattgcttgtacacagacattgaccgctcgatgggatacatccacctgtactgcactggtccacctagtatggcttctttagggagatacataactacgtgaaccgttatgtcaaagaaagctggtggaaaattatttctaccttgcacaaaatatttagaacatttgtttgcattttttccaaattagaaatattaagtgttcttgagcataattgtttgaaatacacaca

SEQ ID NO: 26513 - DNA, 991 bp, Cannabis sativa
tggtggggcgtggttcgaagcaatcggagatggtgacaggtcgaacctcggctttgggtagacaggcgaatcagaaagtgtgggttcccaagctccttactgtcaatcgacagcctggggtttcctctctgggtaatatttgtaacgttggagaagatgaagggcaaaagggtatgcagacttttcctccttctaatttgaataatacttatcaagctttgactttactcaaaggcttgggccaaggtgatgggactcatagagaggttattgggcctgaattatcctctactgggccggccttaatttcaaaggaagaaactatgaagatgggcccttctcgtgctttagctatgggtgttaagagtggggccgacccgtttggtgctaataataaagaagtaaatggtggtgagttagatgtgggccaggaagttaatgggccggttgatggacacttggaatcatttgggccgtgtatcaaaattaatagtaacttgaacaatgggcggccttcactatttctaatgagagctccatttgtggtcaagaggtgaattttaatcatgatgtaaaattagctttgactaatttttttcaagctcaaggcactcttttacaagagcttaagaattttggaaatttggatctctatgagattaaatcaattggaggtgacattggggttcctacttcctcggaggttaatgcaagaactacccctttcaaaaagagaaagtttgaggaggcctctgcatcactttgctctcgcccttggaagctccttcgtccgcatccctgggctatccgtgactttccatgggatacggagggacgagctaatggtactaaggatacggaggaagacccctccgaggaaatctctctatccaatgatgactttactggcccggatgattggaagtccaaaggaaagaatgtgatctcgtcgagaccaatggagggtacttttgtgattgaagaatctggt

SEQ ID NO: 26514 - DNA, 1272 bp, Cannabis sativa
taataatttttcccatatttttgaaaatagcccttaatttaataactaaataacattgggagtatgtcgtgattaaaatagtatatggtttctgtgcaagttatctttctttggtttgattgtccaagattgttgaattattcttttattttctttgcttaatatttatttatatttcattagacgatcaaaaatttagtttgtagcattttttattttcctatttcgattaagttgtaaaattttatgtattcagaatgctaagatattttaataagtttgatattttatttcaaaaaacaaaaatattgcactaaggtgacctggtggtgttattgatattgttaggggtacgtaatgtggcagctaaggccgacttaagtattgggcagcttgggtcattgcacaaaatttccatttttttaaggtccaatttttttttttaaagaaaagacctaatcttgtccttttttttttcctattatatatacataaataaaaaatttataattaaaaatttatgaacaaatctttaaaaaaagaaaaaaaactagtaagagaattgtagtttttaatgtacacagttttttttttttttttctaaagagcctaattttaaaattttgcacaaggccaccaaaatgcttggaccggccctggtggcacttaaagttttgagtttgtaaccagcataatttaataattttttagcggcataattgtaatttttgtcaataaaaaaagacttaaaagtagctgatactacatatttctgtttaaactaaataatttacaatctgagctttataagtgttttgtttaaaatactaacgaatttcgtagtgacgaaattgaacgaaaattaaaattttactaacatttggtatgtatgccgccaaaaaataattattagatttataccgcttacaaatttaaaattttaagtatatataccgctatatatctaaataggcattagtagtaccgattattatcacgaggtagtctcttgtaaacggctaacaatattttataataattatattcaattgaaatactggcttatattaatagggcaatattacacctcatcatatagtgatgttgggcagtatatggtgttttttagcaattctgaatagtggtgtccaagtggagttaatttgcttattctcttagggtccgtttggtatgcaggattggattggattagacaggttaatttgtccaatccagtgtttgggcatggtagaagtctggataactaatcca

SEQ ID NO: 26515 - DNA, 2360 bp, Cannabis sativa
  modified_base (29)..(29): a, c, t, g, unknown or other
  modified_base (58)..(73): a, c, t, g, unknown or other
aaaatatatggtctattttgtcatttaanaaaacagagggtccaattaataacttttnnnnnnnnnnnnnnnnaaaatagtatttatcctttataaaattatcccatgaaataaacataaaacatacaccctatctgtcgcttcccaacttctaaattgcaaatttgacatatgagttacattagagcatctccaatgcgggttactcatgcaattatttttgccatatatgtaatttggtcatcatttttaatgcaattttatcaacattattgtctagatttggcaacagccatgtaacattactttatttatttttttcaaaaaaaaaattattttatggtattattttatagtatttaataaaatttaggcttttttctactgcaggtccctaaattatataaattttggtaagctggtctccaaattttattttttgagcaaattggtccccaaattacataagttttggtaagttggtccccaaactttattttttggtaaattgatctctaaacttttacttctttagcaacattaagtccccactattaaatattgatatttttattaatttttatttattatacatactttatttttgtgtgtgttaaaaattcaaataattttattttttttaattttaatactttgataaaaataattatatttatattttttaagtactcatataatatatactgtataattataatatttaatttttttgagaaaatatttaaaatatgctttattcatataaattattaatttgaaaaaatagtatacacactaacagattcatataatggttacagagaattctatctcccttacatttttaaattttagcatttataatatattttattatttatttatgaatatgtagttttataattttaataattttttaattgttatatatttattaattatttaaattttgtaaatttcatgagttcgtcacaaagcataagttaaaaataaatttaaaatataatttatttcaatagtttataagaaaataataatattattattaagtcttttcaatatttcttttcttcttattttgtcatatttaaaaaataatatacacataatgttaaaaaaattatttaatttaatattatatcaatgtaaaactatttaaaattaatataaaaataaataaataaaataccatggactttatgctttcatgaaaataaaagtttggggaccaatttgctaaaaaataaaatttgaggaccaacttgtcaaaatttatatagtttagggactaatttattaaaaaataaagtttagagatcaacttgccaaaacatgtatagtttaaggacctacagtacaaataaatctaaaatttaatcatttaaatggtgatatgtggaactatggtgagcaacttttagagttgtcaatcattggagtaatttttgtatgaaaagttatcaaattttatgtgtaaaaaagaaaataaaaaaaaatatatcttaaaatgatgtgttaacttttgataagtataagtgttgtctgaagatgctcggcaacataatcaaggtccagattaattaattcatgcttcatttactagtcataaatgaattaacagaaacttgtccaatttctgcttattatttcatgcatgtttttcttattattaattatttcatgtatgtatgtactatgtaggaataggatcaagtacctacctataaaaaccaaaatggcaaagctgataataccatagctaagtgggataggataggagacaatagatgataacaactttagtattaattatttggaattcaaaccacaaattatcattgcacttcatgtacaataattctacaactttctgatttcttattcataaaaagactagatttgagctgataactctatctcccagatatgatattaatgcaagctaattcatcaaaccaccctgcaaatgatcaattcacaaacataaaagagttaatactattttgtggtagtttaaaatgttacaaaaaagtaacgagtaataaagtgttcggtataaaattatagtcactcgctacactcattaccaattaattttattttatcaactaaacttaacagattgtacaaacttacttagagcaatcggtggaaggatagactttgtaatgacaagaagtgccacataaagtaggaatattgttaatccgatcataatcgatcccggggatcatagctgcacctttctggatgcaactacaagatgccctcatgtcatctttagttcgcttggcagcaattagatctttaatcccttggcagcactcgggggaaactgttcccccgaacacaccgtagct

SEQ ID NO: 26516 - DNA, 1182 bp, Cannabis sativa
  modified_base (498)..(500): a, c, t, g, unknown or other
taattatttttttaaaaaaaataagtaacaattatttttaaaatgaataataaataaaaaaaatatttaaattatttatattattacccaatttatcaaaaaatttgaataaaaattaaaaaaattcaatttaacaaaaccaaatcaactaaaattctttttcttcttcttcaccacctagtggtactcatctattttttctcatattaactttttgttgctattgatttgagtttttgagtttttatttcaattataattaattttacatgtttatagatttgtatttcaattttaatgttgattattagtgttttatttttatttttttttaaaaaaaaaaacttaaatttcttgaatgaatgctagatatgattgtttgtgtttgtgaccatgccatcaaaaagtaattatttggtgccatggtcacaaaggaaggaaatggcaataaaaatattagagatttgaagaaaacaaaattttattattattattatnnntttttttttttttgaattaacaaccaaaatcaaatagcactaacacccctatttagtgtgtactttgctaaacaatgaacaagatcaccaagcaatatacagttacaatgattttctattttggaaaataaagatatattgctatagtatcaaagtgtagataataaccttaatagattaatgtaatatacagttacaatgtttatattactttagtcaaatctctaaaacatgtatgattttatttttctctttcttttcatatatggaattaattaattatttgtgaccatggcaccaaaaagtaagctttaatttcagatttcaatatttaccattagtagacacaactcaaattagcttcatcatatattccacaataagtagtgagcaaccaattaaattttataatgaaaggcaaaatcgaaataaaataaaaatagtgagggtaaatttgtaaagaaaaataaaatataaaagagaaatgttatttacacagtgcactctaatattaaaaatatttaaattattttttttaaaaatcacttttaatattttttaaatttttttatattattttcttttaatattaatagttaattttaatttcttttgcacattcttttataaatcgtgtatgattttcttaaaaaaaaaatcaaataaaatttcatataatttt

SEQ ID NO: 26517 - DNA, 2044 bp, Cannabis sativa
  modified_base (1705)..(1714): a, c, t, g, unknown or other
agagggtaatttggagttagcacaaaagttagtttatactaccaatattaggtaactttaatttaggatattaattgtaaattatgacgcatattaaatcgaatttcccattttcttctgtgggaccatatttattggttttttttactagaagatttcatttaggggagcatataaatttagcgatctgccgttgagtttaccaaaccaaccaaatctctgcggttcatttcatttcaccaaaccaaccgaaagatctacagtacgggtccgtacgtttatggttgtcaaaataatatgtaacttgtttttttttctcaaaaaataaaataaaaatataaatttttttaaataaatatgtgagatcaaggtcaagataagaaactttaacacttcaattttttaactaactaactaactaaatgtgagataatattaacaacaaaaataaaagaagttgaatcctttgtaaaaacaaatacaattacactttaagagacaaagaaaagttatttttaaagataattttttattcacaatattaaatttttgtgactaaatatgacttttagttacaataaaaaattagttgtgactataatataatatttagatagatagcattgttattggatactagtggtgcccaacacctttcataagtgtcacttacgattggttagcgatattccctaaaattaacttttttaagttatatgagaccctctacttaattacacaaatatcggtttgacaagaaggagggtgattggcactattggtgccttttatcaattctcttagatacaagtgtaactaatttagttttagtcacaataaatattgtgactgaaaacacatttagtcacaacaatttataatttttgtgactaatacttttagttacaacattggaatgatgatttataataagtcatgtgttttgttatgactaaaaataagactttttgtagtgtaagtaaaaaatacatttttattttaattaaatatccctttttgtcacatcactaaaaaataagagtgcacatgggctagatttgctgggttggaggtgttttaatagatcaacccaatgattgcagtttggataagctataaatcattcagaatgtacaacctaaccctacttagtacaataataagggttgttctaaaaaattaacaaactgcccaacctgaataaaccgctcaaaccaaaccgaataaactgacaaaaaatacaacccgaataactttatgaaaaattcaaaccgcccaatgaatatattgggcgggttaaatattattttaacccgcccaaataacccgaataaaccgatttacatattttttactaaaattatttacaacataatatataaattacatttaatagttaatctattttatagttaaagtttgtatttatggtgtttaatttaaaatttagaatttatagtagataattttaattgtatttgagtattgaagttgaaatttaaaatttacctatgagtattttttttattctactttttttttttaaaaaaaatattgtttaatactttaatgtttactcaattcatatttattttttaacgattaatttaaaatataattattttaatcttgaaagacatatagtaaacatttattttttctaatcaattatttgaacaccaaatactaacaacaatgaaaaaannnnnnnnnnaagatcagtttaaacgggttaacccgaccaaaccgacgaaaatcattgggcgggttgcatttttttactttttcattggatgggttacaattaaatatttgcaacccgacatttatattgggttggtaaaaatacactataacccgaccaaaccgaccgatgtacacccctaacaataatatagggggtgggttgggttgggttcattggattgagatgaatattttaggctttaacatttatgttacaaacataataaaattatttagcctagtacatacacaaaaaaaaaaaaaagatacatataaatttatatatatctattctata

SEQ ID NO: 26518 - DNA, 4440 bp, Cannabis sativa
tagtgaatttttccatggttgcactaatattttctttgctttcaatattttttagattcccacattagattgcagtctttttggtatttttatctgcttgatattcttcgaatgtataatacgtgatttcttgacaaaaaagatttgattttgaccttcattgtaatttttggctctttgagttacaaagaacacaaagaacgtgttcgagttcttgaaaaacacacgattagatccgacatgcactctggccaaccatagaggtcttgtttaagacctggcctgccatgggtcttcatcatggatttggctggccatagggggtaccccaaaagtttgtcagcccatgcctaggcataaaggccctggccgacccttggctgggtcacgggacctggccgatcctctctcaacttgggaaccctggctagcgaaagccaaggttccaagcaagcaaccaagtatttatcctcttttgacctgggcaagagtctcatgacagccttataggcatatacaattgtagtctcatacgttctccccttgggaactctgtataagacttgtcagcgaagttaatatagttgaatgcacaacttaggattcaccataggtctaagtagttataaatgagacggtagttcactgatacccagccttgtacaatgcaatcctcaagtatggttggccagaaccttgtctataccttgtagatttgttaggttgctctcccttgtctcttttatgcaggtgattttaagtgttggtctagggaggtgacaaccactttgtcatagctccaatcggtcttacttttaagatatagcatctagtttgtcctctttctacttttttagtgatctctagactaatagtgatatactatggctagaactaagcagtcatattatagtgcaccaccatctgatcctcatgtttccagggtggaaacaatgagtagatttggcatggtagaggaggccacacaacctctcaatgatagagatccagaggtcagccaagtagaggtgcctggggtcgactagtgtgttgagagcttggacactgagtccaaggtgaaggaggttgcgcttgttaggaggaggacctataggacttaggatgtattctccaatagccctctaggttcatatgataatgataaggagccattgaacgagcttggtcagacctcggtaataggtttagaccatgtcttggtacagtcttcagagcctcaagttcttgatgctacgtcacagggagatcagtgggtctctccttaatctattttcactgccaaagcttttgacagagtattggagagtcaactggtgagaggcgtccaatgtgagggagggatcaacgagcacattggctggcctttgggtggatggtatggtcaaagcgccatatccagtagggggtagtgctacctttgcacccatattttagaaatatagccgcttacttttggatgtgtccaacacaaatcaccccaaagaatattgaatacctctcgacgatgtttgttctctatgcaaagctaagttgacctcatcctactctgtatgagattgggtattattttgatttgaagtctgctctaaagcaaaatcggattgggtacttccacttcaaccaggtcacctactagtggttgggtgacaccaacaattaccctctatcaaaagttgggggatatgcccaaaattactttattgcataagatgtctaggaggtttgacactaccgctttcaacaagttcctacctacaagcgctccatccctaatctacaaatgagggatagagtgaatcatatcctatccctctctatagagaggaggaatatacttcggttggctagtgtagccaactttcaaagatacgatttgtaccctccgcatccaaagttgcgggggccaagggcccattaggtggtgttgatggagccccaactactgaggaggtcagcccaggcagtggccatgctccaaacatggatgatgatgtaaccttatccctaatagccaggggtctacagaagagattgagggccctccgccatcacttggctcgtggaggcaccgttggggatgctactctatggatctgacttggaggccagagttatattgggcctacttgccctttaccaacaactaaaggcaagggcaaggcgggtgctgctgatttagatgattcctcttctaaggatgatggaatctaatagttgattgcaccatcttttatattattgtcttgcattgaatattttgtaacttgtattctgactttgttactttcttcttgtagatatgtcttccaaattcagaggtttagctgatggaccttcagatgagtcttcgggtcacccgagggccaaggtggcccagaccctccattttggtgatgttacggggtcatctcttcctcctcctcctcttgggcctgcactagctgggctcccaagatggtcgaccctccaatgaagagggatcagccttcgagcaagggtggctagaaggctagtaaaggaaaaggttcaaccatgggatagagagccatgtaggcagtttgtaggcgcctagatagagcttttcctactatggatagtgaacttcaaaagcttggtgatgacgagctggagaggctctcatttgtcgaccttcaggagttagccttggtaagttacacatttagctttgctcatttctttttgtgttgttgtaggttggcttgccatagaggttgttgtatgaagctggcaggccattactgtgtatttgaaagactggccaaccttgacagcatcgtagatgggctggcctgccaacgttgtcttctggcacaggcctttatgaagcttagcttttcacatgggaactccaaggggtcctcgagtgctctccgagagtaggtgaagaccttggaggctgagctcctgaagaggggcaacgctgtgacaaatttggaggcccttgtccaacaaaattgggacatggtttctggtttagagctcattctcaacactaggaatcaagacaatacctcattcactgctaataactctaggttagggactgagctcaagaggtgtgaagacaagctgaaggctgccctcgatggccaacatgccataaaggacgagtatgtcaacttgtcttcaaagctcatctacagttcaagctttacaacccaaaagctgatctttcttacatgggggacgcttctttccttgagagcaccttggctcaagggaaggagctgtatgagagtaggttggaagcaaaccagaccaccgttcagccagaaggatcatccttagggaaattcgacgaggagatggatagcccaccaattgaggagctcgctacccaagactttgaccaggtgattggccagcttacaaaggctatggtcggcccacactttgacgattcggactctacagcttgtgattcaaccccacctgcacctacacacatgtagttgaagtttattagtattttagcttgatgatttcattagcatagaaattttatttcatgctctgtatggcctattggccttttacttttgaacactacttattttcagcctttggctttcatgtttgtacttttagcctataggcactctgttttttagcattactactgtttagccctaaagctttttattatggatgtgtgactgactaggcaatctttaatcctaaatatctccttatttccttgacatataagtatcaggatttacttttttttatgccaagctgaaatatgcttgcacctgaattagaggcagatttagtagtttatgctaaacgttaaagtttctctacataaggtatgtgtgctagttcgatgcattgtacaaggtgggtatcccccaagtgagcacgcagacttatggtctcttggtcatttgcaattcaccaagtttcataaaccttgcttgggaattttcttggggtgctacttgttgtaagcatgtggaactaaaaaaagaataactttaagaagttaatctcgttagcaaatggtttagagacaacatatttaaacataaacattgttttttattcatcaattggtcattgttgctgtgcaactttcataaattgaacctattaggctacataaaagtgtgcttctagatatcaaatggctacctctacttgacctacaaaggagaggccatcattttttaacaataggaggccacgcctataggccgtgggtactagctcttttatactctaatgatcagttactagaactactactgttgagtagcattctataagctagtcactggtagtacatgtgaaggtactctccatttcgatatctttgtaggagaactagctccatgttctcgttgtaccttcccagcttgtaggctcccttactagttattttgtaacttgata

SEQ ID NO: 26519 - DNA, 4057 bp, Cannabis sativa
  modified_base (3989)..(4010): a, c, t, g, unknown or other
ttgatttttagttttttttttttttttttttttttttgtattagtggggagctagtagtaagttgttactagtcaaagggaatacctttgaattagtggggttacacttgtggctgggtctgtgtaggttttagttgagattttattttctttttgtagttgagtttttgtttatttgagttaggtgtttaaatttgaatttagcctattaagtttactttaaggattgctcttctaatacttgttgttttttggtgctctttagttttttaggtagtatttcagtattacaagttgaaactttagctcttttagtaggactcaatcgggctcatttgtgcgaaattccaattagagaggtttattcagattcactttctctagtaacagctatcaacaaaggaagagtattttttaatgagctggaggtgttgtttgatgatgttataactttaatgtttaaatttttaaggacagttttgtctcatgtggctcgcgattagaattctgcagcttatagtttggcaaaacatgcccatcgattagacgatgaactatcctgattcgagaaagtgttgctgccgattgtggaatactatatcgttaatcttgtatgattttaatcatcacataaaatatataataagaagtatttcatatatatatataatattttagtataaattaaaattttaatatacaattatataaaaaagtgatatatatatgtatataatttaatttaatacaatactagtacagtatactaaactaactcttatggggcgcgtttggtatacgccgtatacgggtcgtattgtattaaataataaataacactatgtttgaataaagaaatgtattgtattaattattaggactaaattttgtaatacaatgtatgttgtattatttaatacataataaatggtccgtattagcttgtattataatatttacaaaggatttgggtcaacaccaatctctgacccggacccgagacccggatcgggacccgaaccggacccgacccgaccccgacccagacccagacccgacccagactcagaccgaacccagacctgtagttggtgttgggatcgagtgtattaaaaatatattataattttacacaatcaattaatacaagtcaataccaaacattatattgtattaaataatactaatataatacaatacaatccaacacaatacaatacaatacattacaatacgacgtactaaacgagcccatacaatacaatacaacacaatctaacacaatacaatacaatacggcgtaccaaacgaggtcatggtattttatgcaatacacggacaacctttttaatttaatccaaatgttcatatcattatgagctagttaagtgcaaacacttctaggaagaaggctcaagtaattgattttacggtaaacaataaattcgggactatttactatcatgttatattttagatgaataatcaatacattattatactttgttgatttttttcaactacatctttcattaaaatagtactaaattaattcattgaattgaagttgtcatctgtcaacttttttttcactttttccattgggcactccttatccacttttttcttccaaactttgttataaggaatattgtataatatttatttaaaatatgggaaactttaatgtggaaaaacattgaatggattttatgtaccttaactgattcaaagattgtgtggtagagttaatgacattgaaagttaagagttgaagcttgagttgaaaacatttatggcgatttcatttttattcatttttttttctttctagacaacataatggttccaatccaaactgattaaggaaaaaaaaaaacaacaacaagtgagttgagagcagtaaatagggtgggaatgtcataaatctgagagcagagtagactattcaaatcaattgaattcaaactagtgcaaagtcagttaaaaactttctgcatagatttttacctatttcccatatttggggtttaccactctgtaacaagtaatgtagtactatagcgtagttgtagtagacattcagtcctttcagcctcatctcattaatgagtttggtgtctcaaattccatagataaatgaacccacaaaaaattcatttttaatttattaaaaaaaaaattatttaagagcagggcatagaggagggagacaaacgaatgcttttatttaattattgcatgaacttattattgttgttgtttattaggaattagaatagcttgcgtgactagtactctatttaacagtttgttttgtcatattcatgttgatattggtgagttttgtaatgctacttattttttttaatgttacatgttataatatgaagtgtacacattaaaatttaagacttgttaaaatgacctctaaatcacttttcacactaataacagtgatggtatagagctttctcagccgagcagtattgcttttatttttttgtgattatttctcgaatttttttctttctgcttgttctacgcaagtggaattagattgtgtgtgggcttcggtatcttcgaaaatttcgggtcctatgaatgctaagttaactaggtcgttctttgttgatgatgtttgccaagcattgtttcaaatggacccttccaaaaatcttgctaaagttggtatgattgcggggttctatcagaaaaattagaataaggttggtcctgatatggttgtggctgctgtggaattcttgaatagtactttgtgtttaaaaggtattaatcacactcctatatgtgttatttttaaggtggatgctcattcacgagttttgaatttttaacctatcagtctttattatgtactttataaaattattacttaagtcatgactaatagaatgagacaggtgttgggagatattaaatttgaaaaacctagtgcttttttttatctgatattgcttttattggctttaaatgtattaatgcattgaaaagaaagaagaaggagaatgagaagaagaaggagaagcagatgaagaaaattggggaatccggtttctatgctcttaaaatggatatgtctaaagtttatgatagagtggagcagtcttatttggaacaaatgattcctaagttgggtttctatggtgaatgatgcctaaaattcttgattgcatttcatttgtggaatattcagcattgattaatggaagtgtccatggttgcattacacctcagtgcgagctcaaacaaggggatcctatgtctccttatttgttccttatttgtatagagggactttcttcattagtaaagagagattgtgcgaagtctcttttgcaaggtttcccttatggttgtggggggtactatcatctctcacttattattcttcgatcatagttttctcttcttgaggacgtcagatgttatacgtactcggttcacggttctactagattggtatgagcaagggtcaagtcaatttgttatttttgtacaagtttgttgtgtgctttagtcctaatgtggatcaggttgaccgggatagaatgatgaattttctttgggttgctatgatagagtgtcatgaaaaatatttgaggcttctgttctttgctaggagtactaaaagtggtttactcaattcagttcgtgatagaatttggcacaagctcaatggctagaagtctgaattcttttcaatggcgggtagggaagtgttgattatagcagtaattcagtccattcataggatgtctgctcgcttttggtggggttgttcaaatgtaaaaaaaatacattagcgtacgtgaaaatagttgtgttggcacaaccaagatgggggtatggactttcaaaatatttatatgtttaaccaggcgatgctggccaagcaagcttggcaattgtataaatttcctcactctttagctgccaaagtgatcaaagtgttgggttttgtgccnnnnnnnnnnnnnnnnnnnnnntaatcagatttactagttaataaatatcagaaataacattttatgtt

SEQ ID NO: 26520 - DNA, 2976 bp, Cannabis sativa
acacccataataaatggacacatatacatgatgatgatgacatataatttgatataaaaggggttaaaggtatgagcctttttcattgtgaagtcatacacatagaaatatgactagtactaaagaaaaacaagaacaagaagaaacttcattatcatcttcaaaagtagttacaagagataagtatagatcattcttaagtgaagaagataacacaaacactatttggagacatggtgttcctcctacctatgatgatgttaatctcctctttcaacaaggaagaaccaaggtcatatataaattcttaatcttatatctatatatttatagaaaaattgttggtaattattattattattataatatattagtatttttagtattttcggtagatgaataaatttttaacttttttttttcattcatcttttctaatcaaaactaaaatttcgaaaattaggaatatcagaataagaattacacttgatattattagaaataatcagaaagaacataatcatatccccattaatgtgaaaaatactagattagtgaaattaatttcattcataactctatttagtcacaataattattcattttaatccaatagtttaaatttttttgtcgcggtatatattttgttaatatatttaattataagatatatatatataaataaatgtatatatatatatatgttaattatttgcaggaatgggcaaaaggatcattagaagagatagtacaaaatgctgtgaagtcatgggaaatggagctctcacacaagattcgtttgcaagatttcaagagtattaatcctcaaaaattcaagctctttgttaatggtaattaattaaatcttattttgaggtatttattagatcaaatctaatattttaggtttatccaattttaatttattatatattagatattaaattttatcatctaatttgatccaattaatttcaatcatttaatgaatattagattagatcagttcatctaattagatgtacttcatatatatttattaatttaattttagatttatcaaatattttagactagtattttaggttcagtatatattggattggactaaatagtaaaattctaatgttaatttttatatatacatatatattttacttataacaatataaatttaattactcacccaaaataaatgaaaatactaatgagttcgattggatgttggatgatgtatttgaatttttggacactctatccaacatctaatcttatccaattaacattcgatctgatccaatcgcaattaaatatctaatgtttgactattaattataattagattgatcaactatcattgaattagatcgatttatgcacattcttatataaatatataaatatatatatatatatttctttgtttatttatttggggtacatgttgaaattgttggaaaaataaatttgaatatttttattaaagagatgatctccataaaacatatcgagtatattgatgagtactataaattctaatgttataatagttaattttataaaataataaatcaaataatcatagttaattacatatcgaaattacttgaaaaacaactatagatctctagaaaaaagataatcagcattaattttatgggcattcaagtaattaaactttcgataataaatgggtttcaatgtctttaataataaatttctaacatgttcatcataagttcattatttggttgaaaatactgtttcctaaccaaacaataatgatcactttgattctttttgttcaagtttttaatgaattcaatttaaattgttttctcaaaaaaaaaaaaaaaacaaacctagacaaatctaaacaaaataatacatagataaattactatttatttatgatgatttaaatttataaaatacattatttcaaataataataaataaacaaaagggaatataccttagcatatatttgactaaaaaattggatatattttgcaaaataaaataagtaaccattttatccaataaatacttttcccattttatacgtagtttattttcaaagaagagaaaaatgtgtgtatagaattaatgccaaaaaatcactttagttttataacatttatggaaaattgaatcacatgtcactagcaactatttaagtttcaagtatcaattatttttgctataaaaaaagtatcaattaattatttcgaatttgactaaaaagaagatattttgcatatggatacctaaatgtgtgtaacattatttagttgataaaaaaaaatgacatccacaaatttaatactaaaatttgacaaaattatcttattttaaaaataataataagaaaaaaagtacaccatttttttgttgacaaataattgcatatgtaattgtgatgatatttctaaatcatatgatttttgtgattaaaaattgtgtcacaataatgttgcaaaatatgtttttctaatgtatgacacgtacatgagaattgaaattttaaaattttaaatgttttgattttttattatttaaattgattaattgaataatgtttaatatcctaacttcaatttcaaaaaaacaagaatctaaatacaatatggctattcttttaataaatacaaattgtgtgttctatctgaagagtatacacaattaatttatgtacagctaaatttgtcttatgatgaatataaattatttaaattgtaagtgttgtatttttcataaataaataaatgcccttggtaatctatgttaataataattattaacattttattttactttttttttttaataatgtgttattttataatggaaaatcaacaaataaaaaaaaaaaaaaaaaaaaaaaaaaatccattttttttttttttttatttatttggaatattatttattttcttaatttgtcttaatttagtcaataaattatatttattc

SEQ ID NO: 26521 - DNA, 2453 bp, Cannabis sativa
  modified_base (2406)..(2407): a, c, t, g, unknown or other
cttaccaccataatctgatttttgattcagattggatgcagcagaggttacatggttgctagctccactatcaaaataccacatgtcattatcaacaacttctggcgtagcaatgaatgcggcatgacctccagcttgctggtttgattgagcttcaggttcttgacccatataagcttcattgtatcgattatagcagtgggcaacactatggccatacttgccacaaacttggcaagtaggcttagagttattagacctgcctcttcctctagctgatgtgtttccacctctgctgttgttgcttgaggatgaacctccccgagcattagaaaaattattgtagttgcccctgccacgatttggagtgtagggtttgcttcccatacttgctgcagcaaggtttgcagtgggattcattgaagatgttgcagcaccatttgcttccccccttattgtttccttctgtcacaaagagtcttgagagtttgctgtcaatactaagcaacatatcctgcacttcctgccatgtgatattagatctagcctctatttgaacaacaatggctagatgccttgcatccaaaccagatgtgacattcgaaattaagtgagcttctgggtatggatctccagctagggctaaactatcagaccacattttcttttgccttagatattcagtcataggagtgttaccttttcgagtggtttgaatcaaaatctggtttcatccatctttgcccatgagtgagctccaaacaagttttcaagagctctccaaagtgcagcagaggtggtacagcccatgacttcggttgctattgattctgtcatggagctatagatccaacccatgaggagttggtcgctgactatccactgctcaaaatctgggttcattgttacttcgatgatgggttgtccatcatcaccaatggcctctatagcagttgaaatgtactcggttggacagatcctggaaccatttataaatccatcaagcctatgaccacgaatgatagtcgacaccatagttttccataatgtgtaattgtttcgatctaatttcagagagaaaggctggttgagggtattgaaaggttgggtgaagtttggggtgaaagtagcactgctgttaatgacagtggctcctgtaccattcgagttttgaactctggttgggttctggttcacctgaggtgaagggggagtctgagaattgtcagtcgacatggcggcggccttcttggctctaataccaagtgagaaaataggaagaatgacaatttggaaaaactcaactcaattgagtctgaggagtgtatttcattatatagcagaagaggaatacaataaacctaacaaaatattgacaagtgtcattacatgatgaaaagagaatattctctctagcagaattgtgaaaagcaacaaatgaaatcacaggtggattatattccaacaactttggagagacaatgattgcctgtgatgcagagacaccagatcagtgcagcaggggaattagcaattctcaacactcataatttagcaaagttaggcttaggattagataaagagttgttatggaatggttctttaccttctttgtaatagcttgtatgctttgtttcttctctgttaaatgaagcttcaagttcaaaaaaaaataatttatagtcatgaagattaattttgcaattgatataccctcctccttcaccacaggtagttttgaatttgatgttgctactccagacaattgctccttgttgtaacagcaatagtgaataatcttctaggcccctaaatccattagacatgtcttcggaaatatagttgtttataaatactctatgtacaactacaaacccccttccatggtccaccacaatactctatgcaattcttattccagtcatggacaagatgaatagacgaatagatctcgaagaaactgggattattattattcagacccaaaaatatatgaaagcaagagaataaacaaataattagttagctttttttgtttaccattttcaagtcaattaagcttaataagtttattaaaattacacataaaatcactccaaaatattatttattacacaatactattagctgtttattttaattttaatacacttaatttttttaaagctaattaagattcatgtcctgtactatgaaagttcattattagtaaaaaaatctaatatggatagaacacgaacaatcactgaaatattaaaattgaataaaattagataaaaatttttaaatccaacaatcttaataatacattttcagacttgtacatgtcaaaattcagagcaaaaaacataattagttttttttttaaatcacgaagaaaatataaaggtggcgtttggtaacacnnttgttttctaattttaaaaactaaaaaataaaaagtagatttttta

SEQ ID NO: 26522 - DNA, 3182 bp, Cannabis sativa
aaaaaaaaaaaaaaacaaagcttatatcaacttgaagcaaaaaaaaaaaaatcaatcccaaacaaaatttgcgtggcgtggtacactaagcggactgaatttgttttataaaaagaaagtattaaaattttgatttaaaataaaaagtattgaaattttcataaaagcaaaaaataaataaataaataaataatgtgaacataatttgctacaactctttaatgggataatatctacattttattttttttctaattttctattagtttaatttactttcccaggatgtcccaactgagttgctaccctacttggtagctgaatttgctagttaataaaagtattttccttaaaaaaaaaaaaaattacttccccatagtatgaggacaaaactataggtcctatcctaccctaggttttccctataactatatatgaaaactttctaactagtatagtaaatactgttgtttaatttacgtggttaaacaagaaaataattgttgttttatgtcaaatttggaattaatttatcatatcaaattaaaatagaatatattacaaaaatagctattatttttttgttgtttttatatttttatagtcatttttttaacatttttattgtactaaatttttaaaaatactgtgttaataatgtttcaagattacaaaatatcgtgttttagtaaaataaaaaagacaacaaataagcaactctaaaacaacttaataaacaatataaaaataaatataaaacaacaaaaaaataattgcataattaaagcaacaaaaaaatatccaaataatgatctaattacaatatgcgaaacaatatcaattcttcaatatattttagtattaggaatttattttacttagttttaataacttgatttattttttgtacaacaaattaattttctttttatagaatttgttattagaatttcatactttcaactttttttctcatttcttttttaagttagctagtggcaattaaaataatttatttcttaaaaattaaataaacaattacattaataatagaaataataaaatcttatgatttccaaatgggatatataatataatcggtaatatatatataattaatatgtcaatatttactacatcctattgtgtcaattgaaaaaaaaaataaaaaatcttgtattttaataaaatgtgtcaaattaaaaaaaaaataaactaaatatatatatataaactaccaaacaacaaacatacaacaaaaaaaaaaaaaaatactatcaggaagaaactaaaaatatacaccataaaaaaatacatataattaaaaaaaaacaactaaaaaataactgtttaacaaaaaatattttaaaaaccacttaaaaacaattaaaaaagaacgtaaaaataattaaaaaaaatgcaaatatatatatacacaacaaaataattgcgtgtaataaactaaaatatatacaccataaaaaatacacataaactaaacaacaactataaaaaaaacacaccataaaaataatagaaaaaaaaaactataaaaaaattataaaatacctaaacaaaaatataaaaataactataaaataacataaaataacaaaaaaacatttataaatcaatagaaaaatcaactagatatcaaccttatttataaattaacttcgaataaactacaaaacacctaataaacattaatactcatgtaaaagagagaaagatataaaaagagtgctcttaatttttttgtaagatagagaaagagtgttaaagaaaaataaaagaaaaaatatgaaagtaaaataatcatattttattaaatgttaaaaaaattaattaatatttttttaataaaatgtgattaattaaaaaaatagtataaaaataatttgagtgtgaataataaaaaaatataaaagagagcaaaatgaatttaataagtgtttgtcacgaagtaggttttgaagctccccaaaaatcaaaattctcttttggtgtcttgaagaaggttttcctttacaccagattgaaatagactgtaaaatcaaggttactttgtctcattttcccaaaactaacattgaaaaataatgggtgataggaaaaaaattatttttgaaccttattttaaaagaaaaatatatatatagtattttttaaaatcaataaaaaaatatacattatttaaaaagaaaaaaaaaatgagttattagactaggtagaccctaacacaagtctatgtatagagacatgcctgtattttgaatttaatttgatgatatacttgtaaaaatttacaatatggtccgatttatctaattatttatgtgaagatggctgaataacaagactaaattgagtagctttgtaaaatatatatccaaattgtcaaatttggggccttaaatattacaatttggaagagtttattataagagattattcaaggtaggatcgtcatgacgtacagtcgaaacacgttggcgattgggattgtgggccaaagaggatgatgagtcaatgacgtagctgtaaactaataaatgacgtaggtgacgtcatcatgaaggtggcaatttcacaatctgaaccacgtggcgtgtaatgacggaatgcgccggatttggaatgatatgatcaaggtccgtttttgtttgacgcacgcgggaacaactttcattccacgtggtggggccaacccctcacattgctcaactccaaatatgatgtcactctctttccatctctaccttcttttacataaattttaggcataaattttagcattaaactaattaactaaacaatactccaatttaatcttatccatttttagatgttaaattatatattttataatggtggcatttttttttatatataatttagtattgaggaataaattttagtttattattttttttttttttttggggtaattaggtaagtagcacttatttaaatttatttgtatgttttcaaaacattcaaaataatttatattgcaaaaaagtaaaatttaaaattactattttttatacatataattaatgagtaaggtaacatttagtcggaggtagggacagacccagttgagttattgtgggggttatagctcccactaataaaaatattgtcttttaaaaatttaaattaattatttttaattt

SEQ ID NO: 26523 - DNA, 3124 bp, Cannabis sativa
aaaaaaaaaaaaaaagttacaaagttaatttaataagtacttagaacctatatgtcaccaaccactaaaccttacatctccatcttaaatatgaaaagagcattgctattcagtacgagtggtgtctagcaccttctcgacatatcgcattgtaattgattagcgatactccataaaagttattatattaaattatatgggacccaatacttaattaaattagtagcgatattaacacataggagggtgttaggcactactagtgcactttaacatttctcatatgaaaaaaaaactcttttatattcatttcaaacttaataatactttgagaaatgctaaaagtatcaatggtgcttagtacttttttatatgtcaatattgctattagtctaattaaatatcgagttttatatagtttaatgtaataacttttagagaatatcgttagtcaatcgcaaaacaacatatgtctagaagtactaggcaccactggtgtacaataacaatgctctactactttaggtggagattgacttataataaggctacatttatggtaacccatgcatagctagtatatatataattggaacatatatatatatatatataatatgtatgtgtctattgtcaaccctaaaaagctatgggctaccataaataccataaaggctttgattaaatattggtaggaaggcaagagctagagagtcaaatttgggtaagctctattattaagtaaggtagatgttttggccattgcattgtgaaattataagaattcaaactatgcatgtgtgactttttttttgttcttcttttcctcaaaagtcaataatattgtaagaaatagcttctagaaagagattgcccaactttaataatgtgaaaatctcctcatgtttgaagagtgttactaatgaatatttttttttttgaaaataattttattaaggaatagcttcagccattacaatgttctttaaaaagatgggagcattccgctcattaaacaaacaacctgacaaagaacaagatgcccgaacaagagaatgggcagccttgttagcagatcgatacacaaaggaaataaaaacattctttaaagaggacaaaatcaaacgacaatcctccaccaataagccaaagtaagaaggcatatgaacagagctgtttattgcttgaacaaccattagcgaatctgtctcaatgaacacatcctcccatcctttcctcttaatccagcttagtgcttctttcataccaacaacttctgcaatttcgggcagcacccctccaattcttgaatccgagattgcttctaaaagctgacccgtatgatcacgcgctacacaaccaaaaccaaacattcgttgagattcaaagatagcaccatcaatatttaccttgatcttcccacccaatggtttgcgccaaatgttgctgttagaaagtacaccagtagcaaatgtagttgctgtgttcttgtttgcaacgcgccattgatcaagagccttccttgccgactgaaccactcccaacgctgtacaatttttgttctgccagaagacttcatttcgagtcttccatatactccaagaaatcattgctgcatcgactataacctccggttgcttgctgtcctggagccaaaatgtcataacctcatttgttgttaggtaacttaagtaataccctttcaggaaccataaaatgttatgaaaagtttattgaaaatattaacgatactttaaatgaaatttacaaaaaatacttataattgcattattattatttttttacgaatttttcttatatttttaagaattgttgcttctttttttttcttataaaaagcaatgttgttttcacattacaaaaacataaatatcgcagtaatgaaagtaatattttttagaacaatcaaaaaaaaaaatagttcgtatttttctataaaaaaatccataaaataataataataaaaaagttgtaaatgtaaaaaatataatttttttattatttttaagtatttataaaataatcccatattttaattggagaatttgtgtaaaagttctcaatattttcaaattaatgtgcttaaattcctaacaaaatattttgatgacaatagtttttactaggactgaacattttgagcaggttcgacccggacccgggcaacccgctcgcacctgacccgatcaacccgcaattcgcaaaaaaatacatattcaggctagtcgggttcaacccggtacctcatcgggtgggtttgcatgttaggttttaaggaccaccaggtttcgattatatatattgtttatttttttattacatatattattatttatatattaattaaaaaatagaaagaattaaaaaatcctaaatttttcttaacttttcagttttcttttctcatttcatttcaccagcaaccagccacacacacagtcactgagtcacacactcagacacccacccgcccaccatctcttctccaggtcgatcgacgatgaccaagggattgacgacgacaacatccatgaccagatcgatgacggcaacacgcctccttggacctccacgactccacacggctccaggctcctccctccacgtacgaccatagcacacgactcctcaatgacgtcgagtcgttgacctcctttgctcgctcaatcattcacgactcacgcagtccttgctcaagtaaggtctccgaatctctgtttcacaatttttttttctctattttttctgttaaatatataaaaaaatattatattttttatgtataattttttattaaaaattttatatatattatataatatatttttatattctgaaatatataatattcatccatattgacatatgtaggtactgtgattaactgcgttgatgggttggttaattagattaccatttttatattttaaatatataccgttaattacattataattaatcacaaatgaatcacagaacctacttttttataaatgaatatttaagatattcaaactcctctaacatgcatattcgacattcactgcagtataattaatcacataacttatttctctatggatgaatgtttaagatattcaaa

SEQ ID NO: 26524 - DNA, 3942 bp, Cannabis sativa
  modified_base (32)..(60): a, c, t, g, unknown or other
tttagaaagttcttatttaggatgttaataannnnnnnnnnnnnnnnnnnnnnnnnnnnngtaaaataaattccaacactaaaaacgtgtacgtattaatttttgggaagcctaaaagaattaatcagattaatctcttttccatcatcactacaaaaagagttcttacttatgtgttaagaattaaactaagaactccatgtacattatatccttcaagcccatactagtccttgtatgtggtggaagattcaaaagactatagtgtgagttcttcgtcatcatccaaggatacaacttacaaaaaaaaataaggataccatgataggcttcaagaggtaaattttcttttaatctatttatttcagatttaatatatgttcatgtggtgatctcaagaatatggtacgataataatcaaaatttattatgttgctgcatacctgatttagtaccacaaaactaacaacctcctcgaactaattatacaatgcgacatgttgctctatttcaaaaagtgaaaagttgtcaaccacaaacaagatcagtatggaattcctaagggatccacctttagcctctacctgtccattcgcgagcaagagtgcaagttttcgcaaggcctagagttctagaagcttagggtaaatgttatatgtgtttccggatggggacaagtggaattccaacagcgaatacaatttagttattttaggaccactaacaggcccaaataagatattaaatcgggtccacaagcaaagttaatcctttcgaatgatgagtagaagattcgtccaggcgagatatccgtctagcaatatggtatgcgtccggaagacattagacagcgggtgggagaagtaatgatcagcgagcattctgtagacgtctaatactgtttcccatttattaattattaaatcccaccatatcaagaattaactcctaaggatctcattcaaagaccttatcttcctaaatataggaagatagtaattgacaatcaaacatttaatatgtgtctcattattatttacaaaaatatgacatatcttttgacaactgttaacataatgtggcatccacatcgacatacatggtgtgcccataggccagacttcactagataagtccatatcaatatattacttgtaattaccctattagtgggcaaagactaatactcaagaaccatataaacactataaactaatacacgaagaacccttcatgcaaagggttaaaaactcatttctcaattgcttataagcaaggtttagagttcaaacattcttaaaaaccttagattttttctaggtttatagtaataatattgacctgtggattaagactcattaacgccacaattacgtaataaaatctttattattattttctttatctttgatcaatctctttaactttcacatatattaaatctgttttcaaaaatcttgaaaaacataaattttttcaatattaagtatatatttatgtgaaacacacaacaaatattttttatataataacggtaataacgtacgtcatgacgaaacatacatatgggtctctcaggtctcaccaaatgaaaaatcaactaataatgacatcagatagagcattttagctttacatgaaattaaatagtgaccaatatatatagcttgttgtatagtagtacatgcaagtagtagagacagcggaagctcgagtgactgaatatggataaaataaattatccttattaatttcttcacacacatataatataaacgatatatatggaccccttttatttgtttttcattaattcatttttcaccaaacaacggtcttagtttgaggtgcagccttctcaaagtgagaatcgatatctttggtgatgttaatcatgagattgaggtacttgtttggagttggaacagaagggtcgagcttctcatattcgatgctgagtttggccaaggaaccctcgcccttgggattgggaaccgcctggtatataacattgaagcacttgtagtgcttgaacacatcaccttcaattccaattagactcaccttattgttctcatcatctaattccaccttctccttgaacgtctcctcttttccgtctacatatatatgtacagtacaattaattaatttacacacacaaaataatacatatatatataacaaggaatggatacgtgtatagtaggtaggtaggcttaccaactgtgtatttccaaaacttgatagagccatggctctcccagtcaccttcatggacatcaactccttgaatatggctacccgcacagtgaggaacgatgtgagcagttttccggaacatgtggtagaactttgtaggagatgccttgatatcaacatcaatctcaatcttacccttcaaagcattgctggtggctgccatttttacttttagtgatgatattataaaacacaactagctacagagtagagattatctattatatatatatgtatatgatatgatgatataacacagctcgggtttattgatgacaacataacctctcccttccattcctttaatacacaatgcagttactcactgtactgcttactattttgttcactgtagcttttaaaattatataatatataagactcatccattttacccacgtttttcaaaataattgaaaccaaaacattatattgatatatgaaaattctatgccactaatgctttcggcattcagaggatttttcattctaatttttttatttttttttataatggtataagttagagttattaaagatattattatactaaattttaaaaaattaaaaaaattatgcaggaaatactaaagtcttttattttatatacacatgtaaaataaattatttgaaaggtttttttatattataaattactcaaattttcaaaacttagttacattcataaaaaatctttaaaacctaacctcttaaataattataatgtagatcgacattaaaatttaaagtacaattttttcttatatatcgaaacaataaggaacagatcacttcaccatttttattgggtggtacaattgtagaaacaatcagttatattaaaagctaaagggccgagttacatacctggattgaatatcttcttgagccacatgtaagtgtgctatttactcagtgctagtgggacccaatgtattgaccttttttacttgggatattggccataaaattatccaaactacacgtatggttacacttaaccccacaaacttaattttttatgataaaatcctctaaacctcgttctgttttgctctccatactattatgttagtgaattattgttaaatgccaaaataaattgtctatgtatacttaaatgtacacatattacgttttaattggtctacctaattttcaatatataaataaaattaaaataagttaatattttaaaaaaaatagttaaaaagtaaaaaaataataaaaaaaaaatacaatactagtttttatcttttttcttttcctttttgttttttttttcttttttcctttctcttttcttcttctcgaacaatcaactccccaccccttctcaacaattgtcattcctgtgaaattcataaactttgtgctctgtttttgggtctgttgcagttatagctttttaacctctttttttggattttaactgtttttttgaatgttctctttccctcttcctatcccagtttcggtttcctttcttcttttcccactttcagggtttaactgccatcatcctctacaattgtataccttgttttgaccattttgccgccatggatcctttgctaaaccgtcttgattccaccttaactctcactgaggaagagagctctgttgctgttttaccaactgaagtggatcttctcgccaatgtcaacaacagccacattc

SEQ ID NO: 26525 - DNA, 1918 bp, Cannabis sativa
tatacagtaccgatttcttaaaaaaacttatcgtaaagtagatcattatctacccaagtataaaccatagtttatggacctgaactggcagcatgttcaaacaataaaataatatataattggtctaaatgtgcagagtgagctactacttaatattgtcaacaaacatgcattgaaatcctaagtacaagcagtttaagtttggctacttttcatactcaaacatcacatgtgtccaacgtatcttcacacacagtcactatttttcttttcttttgtttctttttcaatgttttgtagttattgaagaagcgagcaagacccatactgcatagtgtatacacattgaaatgcatctaataccaataaagatttcatatatattgcatattttatactgaaatgtgactgtcaatagatggatactcaatactccatcggattatcctacacatttaagatgtaattgtttttatacaaaaagcatgaggcttttatgacttcttcattgtaaaacaaatatcgaatttgtttctcctttgtcatgtttgtttctttcaataaatttaaacccgatagttctactgggactataggagacctcatagcagctctcaatgttttatcctttatcctttatcatacaagttatgaaatgagttttatcagccttagtatgttgaaaagatattaaaaatatcagtaggcatagttaaagaaagttttttagcttccactacatttctaaagggtacatctgtatttatctacactgaactgacaagccagtgtttcctgtcaaagcatcagtaaacatatttgatgaatcatcatctagaagtcttaaaaagatatcgcatatcagaatgggcatgtgcatccacctctaaattgtcaaccaagtgagcagatcggatgcttggtaaatattgagaaactttaaagacacaaatgcctacactgtgatgcttcctggagacattttcacataaattgtgcagtgaacccaaaggaaaagcttaatagactatttcaatcaaccatttgaagctagctcacgtggtctggtgggtaggtttttgtgagactgagtagtactaagtgcaactccacataatgtattttaagaacataaaaaatttaaaaagtgaacaaaaaataccagcaagagaaaataatagtgacactaatgagacagttgcaggtggttcaatcttcattcagccattgataaacctataaaacttgattttgaaaaaaataaaaatggtagtttgctgactcaatgaaattcatgtgaaagttaaagaatataatcaagtttcctagagtggtttacaaaagtttcaagctttgtataggttccattcaatcttcttacagttttatttaaaacactcaaccttataggctaatcgatgattacaaatatttgtttgtcatagatttcattggataactaacaaaacaaaatagacaggcaggcaggcaggcaataagttgaataatcactgtaaggaatcatgtattctcacctagcattgcacgaactttttcaaggctttcttctgaaacagggccattcggggaaaacgaagctttgcaagtgttaaagagtctctgaatataatatggcatggtgcaaagacggtaccaacttaactgaatggacagcagccctgatatcagtaagctggtaacgccttcgctaaaagaaactgttttgatttcgcagacaatccaaaacacagttggctaaggctatatctatttatactgcataaccatttctttgtttcgaaaaagtaatccaatgacaacagatctgcatcgaaagttacatgttcacactctccctcctaggctcattaacaagcaactgcatagaaaaacacattaaactaagttaaacgtattc

SEQ ID NO: 26526 - DNA, 1464 bp, Cannabis sativa
cctttgcaaaaatgattaaatcatctgcaaaacaaagattcacaagctttaaagacttacagagggggtggaatctgaatcccttcaagttggaccttggcatcaataatctcgtcaagtactccatagttaagataaacaaaagaggagacatcagattcctttggcgaagacctttctcccctttgaaagtaccatgcaaccgcccattcatcataagaacataagaagcaccaaggagataacttattatccaagaattgaacttggagggaaaacaaaggcccttgagcgaatcagaaataaacccccagtcaactatgtcatacgccttgctcagatctattttgaagatacttctagttgaaatattattccttgtgtagccttttagaagatcttgaaaaattaagatattgtgagccaattgtttatttttaataaacgcaccttgattatcatgaattagacttggaagcacctttgaaagtctcgcacagatcatctttgaaatacatttatataatgtattgcagcatgctatcggtctataatcactcgcatttttgggactgtcattctttgggataagcgaaatagtagtctcattaagctctttgggaagaatgccattctgaaagaaacccaggactgctttggaaacatcctctccaatctcattccaaacacctttaaaatatctaaagcccaaaccatccaggcccggactcttggatgtgtggatatcaaacaacgccttcttaacatcagctttattaaaaggccaaataactggatttgttgcagaagatccaatttattctcattgtctaaacaactctcatctatccttctagtagttgagcttttctttcccataaaattacaaaaatgatgaagaaaatgattaactactttgggataatcctcgataattgtatcaccattccagtaagccacaattttattatctgattttctttttttcatgatgtcatggaaaaaactagacttttcatccccatatctcaaccaagttactttcgaattctggtgaagatagcgaatatattattgtctagtggttaaaaacctttgatacattaccttctcaattcggcccatgatatgacaacttgggttggcagccaaatcttcccgagccttgtcaaactcctcttttgcttccttgtactaagttctgacatcattcttctcagctttagactagatttttagagagtgtttgatcctataaagcttcttcacaatgttgaagagattatcttccttggagtccgtccaccctttagaaactacctctttaaacccctctttaagcaaccagtaattgcagaatctgaatggccttgaacaagaaccgcctgcttctaaaagtttgatgagacaaaaactatggtctgagatagctccccaatcaaatcttacttcagtgttcggaaa

SEQ ID NO: 26527 - DNA, 3007 bp, Cannabis sativa
atttcaccaacaagcaggttttgattttacagagacttttagtcctgtgattaaacctgttaccataagggttgttttaactctagccttgtctaatggttggaaaattagacaactagatatcaacaacgcctttctaaatggtgatttgcaagaggaggtctatatgactcaaccacctgggtttgaaatccctggacaagaacatttggtatgtaagctaaacaaagctttctatggtcttaagcaagcaccaagagcatggtttgacaaattgcaacagagtttaacatcctttggatttgtctcttccaaatctgatcactccttgtttattaaccacactaatacatcaacaacacttgttcttgtgtatgttgatgacattttaataatggggagtgaccaagatcttgttgacacacttgttgttgatctgaacaaacaattctctttaaaggattttggtcctttgagatactttttaggcattgaagttgcctattcagatgaagggattcatctctgtcaaacaaagtatgcttgagacttactcatcagggctctaatgcttggttcaaagccttctccaacaccaatgacaagtggtcttcgcttatctgctcaccagggggaacctcttgctgatgtccaattgtaccgttccatagcgggagccttgcaataccttataattacaagacctgagttgtcgtttagtgttaacaaggtatgccagtttatgcaaaggcctctatcgacacattggcaagatgtcaagacgattttgagatacattagtggtactatggacttcggcctcagatttacaaaaccagaaagtcaagaccttgttgcttactgcgatgccgactgggcttcagaccccgatgacaggaagtctacctcaggttatgccattttccttggttcaaacctgattgcttggaagagcaagaaacaacagaccatatctcgctcaagtacagaagctgagtataggagtgtagctaatgtgactgctgaactcacttggttacactacttgtttactgaacttcacattcgcatacaccagccccctacaatctggtgtgacaacctaagcactataatgctcactcaaaatccagttctgcatgctagaactaagcacatagaattggacctatactttgtgcgagaaaaggtcatgaacaagatggtgcaaatcaaacatgtagcaacctttgatcaaatagcagatggattaactaaagccatttctagccaaagattttccatgtttaaagacaaactcagaattggagaccatccaattcagagtttgaggggaggtgttaagaccaatcaaactgttagcagttagtgttgattagctgttagtttgttaatttgttggtttgttatttttctgttatttcagtttggctttctgttatttggttttggttagagttctgttatgactcttgtatataaggttgtacattgattagatcaatgagataactctttctttctccattctttcactgatcttttctctgctctttcttcttccttcatctctctttttctgcaactttgttcttcatgtttcatggtgttacagctcaatggatcggaggtttaacagaatccaagctttccaaaatgatcgaatattagtttccttaaagtgttaattggattaacattaactgatcattatgacttaatgatacttaaggaatcaagagaaaattaaaatgctataacggtaattttaaccaactctaattataaactaacaaatacaggatgaactacttgtattgatcatatcaatgaactacaagaaaaagttatatagatataattttatactgtttaagagtgcacttataaagccctaatttctaggaacactacgtatgtgctttgataaacaatcttataataataagcccaatttcaaattattaaaaatcatgtttaattaaaatttgataatcaatataaataaattatatatttgtttaaaaatttaatgttacaaattttgttgatgcggaaccccattaaaaccaaaaagttttttatataattttttttttaataaatgactaagttaaatatcacagtctttaaaatatgttccgaaccactaactcaactccgtatgctgagcaaactagaatatgtacaccagctgcgcgcctcactcgccaactcttggctgaactaaattcttttgctcttacttgtgtaataaagcatatgaggagtcacaaagactcaacaaaaaacgcattagagtactcaaacaatgttgatagaagcattctaaatattccaaaatgatcataaggtaataattatctcactacttacaaactaatatattatcaataatcatatctataacaactaattcactaaaatctccaaaataatataattaataccaagtagtatacaatcgttgcctgatgaggcaacccaaacactattacttattaagataaccaattattactgttacttaataaagtaacaagttatcacatgttgtctaattagacaaccatacacaccctataatagatttatagtgtattaaatctattatctatatggtaattaccatatcgtattgcatgctcattactataggttcattattctcttttcttacatgtttatccaaatgagtgtgctagttgactcgagtggaatataattcagtgtcgataaccctaagttacatattagtggtaaaaataataagtatctatctaaaacacttctaaataatctaataagcatgaaatagttacttgtttgatcctaaatcatatatcatgttgtagaacttcttacaagctttctaataatatatagaatgttcaaatcgaacattggaataaaaaattatggccaaaattcaaaatctagtcattctcgaaatggccaattggatgactagatgttacaaaccagaatttttgtttggaaactagaa

SEQ ID NO: 26528 - DNA, 2765 bp, Cannabis sativa
gagagttgaagagaagggttgaatgcttttctctaaggttccattggtttcttctaactttaagcaaataaatgaatttcttttaaaaatctataaacttatattcagcaatagaaataaattcaaataacacaaatgaagtcttacccaaagacctttttgccctctttactaacataggtaattacaaacttccaagggtaacttagtcattttcaaacctcaaaaattctaacacctccaatacccaacaatgatatcccgctaataatattcaataacatataaaacgcgactctctaaaagcccaacgtcgctttccaccgctttcgagcacaatcacgaacattaagaaatttacataaatagcataataaacatatatgaactgaaataaatttctagaatatgcatttttataaataataataaaatctcatgcataaaccctaattatttaataatcgaacgtgttaatcttaagtggtctttacaattcccatattcatttggctttgagtacattcttttggcagtagattatgtgtctaaatgggtagaagccattgcagccagaaccgaaaattcagaaatggtggtggatttcattcgctccaacatctttgttcgctttggtacacaaaaatgtatcattagtgataggggcccacatttttacaataagagcattgaaccactattttgttgttacaatgtcactcacaaggtggttttaccttatcaacaatggacaagtagaagtctctaactgagaagtcaaacttattcttaacaagacacatatctgtatgtcatcatattgattggtgtatggaaaactgtgagtccaaacttatgtatgcttgaattgcatgaactggaagagattcgtaatgaagcctatgaaagcttgagaatttacaaagagaagaccaaggcttttcatgacaagaacattcatcaaaagaatgttgtagaagttcagaaagttttgatgtatcattctcgactcaaactcttttcaaggaagttgaagtcacggttgataggcccatttgtagtcaagaaggttttttctcatgctgtagtggaggttttgagtccaagtagaggaaaggttttcaaggtgaatggttagaaattaaagccatattattatcagtcaacagttgaggaccaagctgccataatccatcttgttgacccagtgtatgtggaagaatgaccacaacatgtagtcgagctaacgacgttaaataaagcaaacttataggagtttttcttacctttttctttttatttttcattgattttatttgattgagctttgaggacaatgctaatattaagtgtgcggggtgggggagattaactgtcgtgtctatcaagtttttttccttagttatttagttatttatttatttatttttaattatttttatagtttatattatttttttttctttatttaattttagtgtgtgggttgaataaaattctgttgacaatgattgctcgtatttaatatgtgttttaactttgatgtcttatgcatggtcttgtggaaataaattttgttgatgataaaattcttgattgtgtgatagttataattctgggaaaatgatagattctcataatttgtgtgcttaactcatgattaattattgctcaagcttgattcttttaaaaactttggcacatcaattgaaaatctttgctaatgtttggaaagataagtgcatgcttgaacttttaatttaaagtctcaaccatttctagaaacttttataatcatttgaggcgaaatcgataaattacacatagttttgagatatgatataggcaatctttttttggatcattgagcatttcaagcctaccctatttgttaattccctagttttacccaatttgagcctaaatgttgacatcttatttttattttaaccctaaacactaacctttgagcctaaaaaaatccttattcatcctttttcacaccatagtatattgatgttttatgtatttgtaaaggtgtgagagttttgttgtggaaaaaatattcatggttatgtgatgataagaaaataattactattcccttagaataaatatttgtaagttgtaagtatttccttaaaaaaatgatgagaaatacgttgaaaaatgaatgaatacttacaacaatttaagtgcgggggaatagaagttttatgaaaatcaaaagataccaaattgaattttgaggagagtgattgaagaatacaaatgaaaattttttgagagaatgttgtagtattatatttgagcctaaattaaccttctttatttacctttcagcctagcattacattataagcctataaactcctattgatctttagattgtgtgtaattacattagtggataatggtttgataattaagcttatggagtagatttttgttaaaatacacatttcttttaagatgagcattgattgttggcatgcatgaattgattttaatgttagtaatatgatgagttgattgaacacacacacacaaaaaaaaaaattgagttaaaaaagtaaatatcttgagttgaaattctaatgattgaagagtttggattttcttagaattaaaaacggatgtacaatttttaaaactaaaattatctttcataaagaccgatttttttaagtatcattcattttatcattaacttactcgaggacgagcaagagtcaagtgtaggggaatttgatgagtccatattt

SEQ ID NO: 26529 - DNA, 3088 bp, Cannabis sativa
atttactctatggctaatataaacgtttaaacttaggtggcgcttatttaagagaaattaaaatataaaaatagaaataaaaaataagaatagaaataacaataaaaataaaatttaaaatacatgcaaaaattgataagaaaattattaaatttttctcatgtcacattggattatctttcgttccgtttgaaaaaagaataattattatacttaaagagtagaaagaccattttattagaataacattctaatattttaaaatacaactaaataaataaataaaataaaaattatatcatttatattttattttattttattacctctaactaaataccaccttaatcttgaggttaggagcttacattcaatggtgaaaagaaccttacctaaggagaaaataggaaaaacataatgaacattgaatgctagttgagctctcaattttggttattctattttgtctttatctggcttctttttcttctgttattttttattttttatttatttatttttttttattgtagaaggatttgcttctttatttgtaattaactattagtatgaaaaaacgagaaattacgccataaactatttcttttttacagtttgagttgctctagtagttgttgtgtaaatttaggttacgatttaagttgctctattggttgctatgtgaatttctataaaaaaatacaaaaaaataagctcctttcaaatgtaaaaatacaaaaacccttaaaaaattaatagcaaatttgtataagtaaaattattttctaaaaataaatatctatacaaaaataatttaaattaacttcctttttttaaaaaaaaattaataataattcaaataaaaaaattaagaattttttatttactaatattattttatttttttaaataaaatatataattatatattattataatatgtataaaaatttaattggatacaaacagacttatcgtaagagtatacaccttatattttaatgaacacatgatttaaaatcaatagtgaaaaaagctttcttgccagtaaaagatttatgttaactcctagcataatcttaccatatatagtacacttcatatacttcgacattcatgcacacttgtacttgacattagagtaaaaattgattactttgttatgaatgttagaataatatatgaatttaaagggatatgaacaatcctatatggtaaacatatgcaagcttaaagagtttatctataaaataaaataaaattttcacaattggtattttatcttgttattttttcttttagttttgaaaagagttatgaattaattatatatcacaagaccagagggggtaatattttttatatatataaacaatgtgttacttgcaagtgatgataaaattttcatagatatggtgaaataatttatatctcaaattattattttgagataaggaatataaataacatatataattttaattaattagagagaaaatatagcatctctgatttaataaaattatatattattcatctcatattacttttatccttaagtgtgataaattcaactcaaaccaacatctgtaaagagatctggaacgagaataaattaagaactcattcatttaattctagttttagaagcctaatgtatgcgtaagaatctaaatatataagactttgcattacatttatttcagatttgttaagtagtatcaaaataactaaagttaagaccactttattttttatacaaagtggtaatttatttttaagatactaaagattatattgatacatattttattgagaaaaagtggtattttagaaatctagttaactacttatgttatgactccactagttatattgattcacgtaaatcaacatttgattacgttcttaaaattactagtaagttgtatcatagagaatcttaattgttatttctattagattcatttattattttgaggatacatctcgcatgatgtattatagagtttcatactagacctagagttcagaattacattttaggctattaagaaaatttagcgataaattcagctacaatatttatggttaagaactataagagtattgaccgaaactagcatatcgacattaagtatttagccataaagaggctgataagtggtcattaagcacgtaatattgaattgggtgatcgcttatttgactaaaggcatgccacaacacaaatttaaggatggtaaagtaaatatgggatttagctacccttatgaagtttttggttgtacaactagaattattcaatgaaactttgatttcgatatctttacatattcacgtgcaccgatttcatctaagaaaattttcgtaagaggatcagaataaacataaagtttaggatttgttcgcttaagtacattgccagattaaagtacattgttatataataaatatatcgtaatacatggaaaataatacttgacatataatgaggacctatcgctatgattcatatgtttattgtgtaatgaagaacattgagtttacgtggtaaatctaaatgttgatcaagtgggagaatattagaatatttttatattaagtataaaatcatttaattgatttttggatgtatgaatattattaaatttgaaaaaattatcaccacctacgaagtcagttatttttctaatttaatttcttaattaattgtcaaaatattttgataattagttgtgctaaagaccttgatgtctttaagctcattacttattttgtaaacacagtaaattcatctaaagatagtagagagagttcgaaagtacgattacccgcactaatcaattttttttcttttgcagatccaaagctcgtgttggattaaagctcaaaaaatcaataacttaagatatttcaaatttcaattccttattcatattgtatatatatttaattaatttctcattcatacatcatcatatatacttaatattactcatataaaatttccaacaatgagtatatatgtagtattttagaattgtaatttttaaaaaatttgtaattaataatgttcctagttagt

SEQ ID NO: 26530 - DNA, 3037 bp, Cannabis sativa
  modified_base (277)..(280): a, c, t, g, unknown or other
  modified_base (507)..(514): a, c, t, g, unknown or other
  modified_base (1953)..(1960): a, c, t, g, unknown or other
tctctcaaatacttgagagaatatatcaacaactttgaaatatctttaactacttttcaaattcaaatatttatctgattgaattaattaaataattaattaatccaaaaagagaaactccatagggcataggcctctaccttgtcttttttaggacaatgatggtgtcttttgtcatgacaagttttgtctcaacaaatattgtcttgacaattttttttaacttttttgtctttccctttttaattaatataaaaaattatttatttattacaannnnaaataattactatttttccaattcaaaatagatttttctaaacgatattatactactctttatcccttcccttgacattgtttgaatgtggcaatttggggaccgtggacctataattctatgctccaataaactagattatttattgagtctcatcaaccaaataatatttatttattagttacactatttctctactaaatatatagaattgaactcttagtaannnnnnnnttatatttactgagttttactaccagtgtccattggatacaatcaattctagtgattagccctccatgtgttggttcaaaattagttttggtcaaattacctcttttcccttctaattacttctttatctttaaagtaccattaattcactcgttgaagtataatttagatcccatctaaattggtgcacaactttcaagttttagaattaaaacttaaagggaactagcatttgatccgttaggaaagtaaggattccataattgtaaatcatgttcccaaccatctatattattagattcccaaacactactacaaaatttgtaatttgcatcgttcaatgcgtctcactaaaatggttgatcgaggcaaaaaaataggcagatattttatgcttcagtggataaccgaagctaaaagaaaataattagcgccagctactacagtgacgctaaaagaggatccgatggaaaaagtaaaaaatttaaaaatcctcttttacattttgcttcagtaaaagagagatgcaaatttctttggcttcggttgtagatagaggttaaaaagtttgcgattgttatccactgaagcaaaattgtaatgggctttgggcccaattaaaaaaaccctaacttaaaagataaacttaacctaaatatcacacacagctgcacctctttctctctctctctctctcgctctctctacactagtctcaccatggcatctctttctctgctctctttctcggcaaagccaagccatgcattagccctagcctatcgttagaggagagaccacactgccagtcgcacagcgtaacgacgatatagtagagagaaacgtcgaaactatgttatgttatcgacgattgcaggtaactctctctctttctttttattctttctttcttctcgtcggctgcttctctctcacgtcggtctccctctctcattttttacatggtttctctctccggtggtcccatcctcctcagatctatatcaactcccttatatatatgtttatactaatttgtatatataaaatttatatataatatgatatgatttttgaaatatatttgtatttatattattggaatagattttggatttgaaatagatatttttagttggtattattgtcgttggaggttgtagttttttgtaaaaaaattgatttctcgtatgaaaatggtggtggtggtttaattttattaattatgaactgaagcaaaaactctttttttttgcttcaattcataatcgaagcaaaaaacatttggtgtcggttctaaaataaagcaaaaattgactatttacatttgcggtcattacgtcggttactctaactgacacaaatagtttgtgtcactttaaaatcgaaacaaaatgccatttttgtagtagtgtaaaacagaagttgtaagaatcatnnnnnnnnagaaactttaacgagtgaattaaagaaaataataacatgaacaggagatcatgattactcaagattcaggccgatctaccattgatcatcgttatgatatgaattaggtctttataataaacaacatgttagataaagacagcttcattcagattggtccttattatatataatttctattatacacaacaccttcgctttgatatcatactacttcgtaattcgaatcgagattacttgtaccaaagagcgagcatcagtgaaccatactagcaatgattgattaaagattccataaatttaatatgttactgactattttattcataactaagtggtcttagttctttgtacagctacaagccatagcctcatatatgaatgaagatttttttttttttgatatttatatataaattattcactaataaatgttaacaatttaacattcataaatatatcaaaatatttgactctttattaataatcagaattatcattataggcaattcagggcataaactctaacaaaaacaactccccatagaattatatgtattcatgtacctagtttgatataataataacatataatttagtgatattagtggcgaaattgcctgaactatatgattagtgacacttaatctcacaaattaattttttggaggtaaaaccttccaaactaccattttgttttgctatgtacacttccatccaaaaagttaactgccaagtagactacccaagtgtacacaaatgtacatgcgacaaatttttaattatccacgtcatattaattacataaattataaaaaataatttaaaatatgaaaaataattaaaacataaaattaaatattaaaaataaataaaacatttcctttttcatttgcttttcttttctaatatcttcattcccttccatgttgacaaaccccaccaccacaaacaccaccatctcagccaccgcctgaaaaatatcacaaacaatatcaatcaccaccaacactcaacttcagccgtaaaatgaaaataaaaaattaaaatcaccacagtgtaacgtccccgcttcaa

SEQ ID NO: 26531 - DNA, 4610 bp, Cannabis sativa
caaacaactctcgattccaatgtttccgattggcccatttcacaaatacaacttagcctattcttcaagtagcttgttagtcgaagaccaaagctccatctcatggctcaacactcagccaccgaattcagtcatctatgttagctttgggagtcttgcagtattgagtgaggctgagtttttggagatagcttggggtctagccaatagtgaccaacccttcttatgggtggttagacccgggtcggtccatggctcggagtggctcgaaccattaccaaatgggtttttagagaacttggggggacgtggacacgtagtaaaatgggctccacaacaacaagtgctgggccacttagccataggagcattttggactcatagtgggtggaattcaacgatggagagtatttgtgaaggagttccgatgatctgtaggccaagtttcattgatcaaaatgtgaatgctaaatatgtgagcaatgtatggaaagtgggagttcagttggagaatgagattttggaaagaggagagataaagagaatgattacaaaattgatgagggagaaagaaggagaggagataagatacagagtatcaaagttgaaggacatggcaataagctgcttgaaacaaggtggttcttcatacaaatatttagagagcttggttaaccacattcattcattaggtcattaatttatgttatgtttactacacattattcataatcggtgataaaaaaatgtcacagaataaatgaaaataatcgcaatcaatatatataatatgttatttattaaaattgtttaaaaatagagtaacaatgatttatcttgtttactttattaggtaatataatgggaatgtttaaactgattaaattatttttttgagttatactataatatatggtaattattttttaaatatattttaaaaaacaaaatggttattatatatttaatattacaaaacaaaataaaataaataaaaataattatcctttatgacatcccttgaaaaaattagtggggaaagtatttattttttttttatcttttatttaatcaagttttctatttcttaattttaataaaataaataaatagatgtaagaaaataattatcttatcatttattcccattatgtattagttcatcatcacttatgtatattgataataatctttgacttatttatttatttatttatttgggaatgttaccgcgctttgcgcggttttatattttataataaaatttatatattttatgatttaaattcatggttaattttataggtgcgatttaatttaaataattataaaaataaattagttaatatatggttaatataaaattgatttggcacattagatcttagtgcgttttagttatattaatacaatgtgtataaaataaataagtattttgccctctaattatttcaaaaaaaaaaaaaaattgtactatctaaatttattaacttttaaaaattatttaaataaccagattaatgaaaactcaattatttttatgtgtatacatgaatagttagagccaaaaaatataaatgcattgtatgttaagaaatgaattaattataatttttattttttaaagttattattatagttaaaaattatgaatttattattatattttgaactgtatattatgagttaatagaaaaaatataaaatatgtgaagattaaaaaagtcaatctatttatattatataaatgttttgttgatgattaatatttttataagttatatttatattgttgtgaaacaacacctcggcaagaacaaaataaacaagataatgatgaatgaaactaattcaacatataacactaatatgacagcaatcttaaaccagcaataagaacattaaacaattataaagaacaccaaaatgaacgaggttcggacaatgtaatagtgaatcaccttgcctacatctctggccagaaaaaaaccataataatggccttagagaatctttattaattgatcttcaatgagagattacaacagttcaattacataacgtgagaagcttgatttctgcaactgaacaaactagtggtagtgatgacaaacaatgtatcactccattacaacactcaagggcaactcatctctctctctctaagcaaaatcagctcataaacatctatctctctctctctctctcaatctattttttttaagatcagccgccgatgtttaatccaattgagccttaaatagtaacgctggagctggtgtgtaaggctcgtttaccaactgtcataactgacaattggttaattctgttatgcacagtaggggtagtttagggactttgatatttggccaacacttcaacaattatccaccttggccatatataaaaaacaatagcatcaaaattggttgtagctattctggtcttgacattctcagcaagtgagaatgcatagtaagttcaaacaaagtctgaacttagcttgtggaacatactgagttaacatatctgcaggattctctttagttccaatcttcttgacttgtatttttttccttgtaatgacttctctgataaagtgtagcttgatatttatgtgtttagacctttcatggtacattggattcttcattaagtgtatgtcactttgattatcacaatccactgtgatatcttttgctttgaatccaagttcctttgagaaaccctttaacgagattgcctccttaatggcttcagttgcaaccatatattttgtctcagtggtagatagagctaccaccttttgcaaatttaatttccaacttatgcatccaccaaagattgtcaaggcataccctgtaatagaccttctagtgtctatactcccagcataatctgaatcaacaaaccctacaatttcagtgtcaaacattgcattgttcttgtacaacaatcgtactcttgctgtccctttgaggtaccttaaaatccacttcactgcatcccaatgtaccttccttggatcagaaataaatctgctcaccatgcttaattcataagccaaatctggcctagtgcagatcgtacaatacattaagctcccaacacaggaagcatagggtacagagtccatgtacattctgtcttcttcattatatggtgcttgattttgagcaagtttgaagtgtgaggcaagaggggtagtgattgtcttggcctcactcatgcaaaacttgtttattatcttctgaatgtactcttcttatgacagagcctggtctttgtctcttaatgtctatccccagtattcttttagcttcaccaaggttcttcatttcaaattcagagcttagttgatcctttagcatgttaatggcctttctgtcctttccaatgattagaatatcatccacatagagtagtaaccagataggtgtgccattgtggtatacacaggggtcatactcactccttgagtaacctgtttgcaacatgaatttatggaaccttaagttccattgtcttggtgcctgcttgaggccatatagtcacttttgaagcaaacacacttgttcaatcccctttcttttgaatccctcaggttcttccatgtagatcttctcttcaagtttcccatgcaaaaatgcagtctttacatccatttgatccatttcaagatcaaacattgttacctttgccatcatgattctaatagaagtctgtttcaccacaggagagaagatatcattgtagtcaataccccctctctgattgaaccccttagcaaccaatcttgctttgtacctcacttcttcaccatgtatcccttctctgtgtttgaaaatccatttgcagcctatgatcctttggtctctatgtttaggtactctaatccatgttttatttttctcaagtgaacccatttcatcattaattgctccaatccatttctttctattcttcccagcaacaacttctatataagtagtaggctcaccatttttaatttctttagctgctgcaagtgcaaaagaaatgcagtcagcataccctagcctctcaggtggtctcacatctctcctaactctctctctgacaagttgatagtcttgcagccctgaaggtatttgttcttgtccttgttcttcatctgaactatgctcactgtgtgctgtaggtgtatccacctgatctgcaatttctacatcctcctttcctgtttgaatttcaacactttgtttcccatgatcggtatcagtattggtagctttcattgccatttcatgctccttaaacaccacattcctactgatgatatatttcttgtatccatcttctaagcaccacagtttataccccttgacaccatcaggatatcccaagaacaagcatttgatggctctagtttccaatttatcttgtctaatgtgagcaaaagctgtgtagccaaaaactttcagatgatctaccttggtacttcccctgtccaaaactcatgaggagttttaaatttgaaagttgttgatggacatctatttatgagatagcttgcagtttgcaaagcttctccccaaaatttcttgtctaggccagcacctctcagcata

SEQ ID NO: 26532 - DNA, 2439 bp, Cannabis sativa
tatggacaatagtctcctcttccctatgacaaaagaggaactcaagttccacaaaaatatgctttgaatgaagttgtactcgagtgggaagacaatcagacaaagctttccattgaaaaagtaaaactcttggagggaccttgagattccaaagaccacaccacatattagactccatattctcatcctaatcaccttttaactcatgaaggtatttgtatgcactcctgattgtataaaaattagtcggctctttcttccaataccaatggtcaccaagtgtagaactcaaaagaatacccaagataaggtcacaatctctatcgtcacaaagatctcacaccacctccacaccccactctctttgaccaacaaccattaaaatttgcaccttatagtcaactaaagtaggaccaaataacaaaggggttatcatcacacggtagctaatgagggacaagaacatctacactagaacctgaaccaatactcactctagcaccaactttgattaaattttggtactaaaaaatgcttcgctagataaaactaaagttattacttaagtcgacgttcaaaatatacccatgaggaaagtaacgagccttattaatcctaccaaccaaagatttctcatacaacgataatcgtcggctttgtttctctaagagagaaaggttataatcatgaagactgtgaaaatcaagccccccattactcttatgcttacatactgttttaacttattttatcaagatcttaatttactaacatgtatgtttgattataaatctataatctaacatcttgaatataaataaacctaaaacgataaataaacacatataaagtttaggatttccttacattgagaaagtatcaaaattaaataactccttccattcaattactctaacccttgatttttattttgtagcagggtatagccaagtaatgaacctgaatcttcttttccattaatgagtgacatataacattctacatgatcttccacaatggtcactgtgccatcttgaatagtctgggttggcactcaacttacttaccattatatttgactaaaattatcattgagtaagagaggagcaatttttgaactctaatgctattttcaaaaattgcaaagagaagaggaaaatgaaacattagggttgtttagtttcttctcttctgttttatacgcacacatttggtttaggtttaaatcatttatttaattaaaataataagttaaattattttgagtgactgagattaaattaacttaaatttaaatatatacctattatatctttttaatttaaataaggaattttttatttttacatttcaaaagtttttttttttttctttttttttgtatttttatgaaaatctacatgaaaactaacagagcaacttaaattgtaattaaaatccacataacaactcatataaaaactaccataataactcaaactgtaaatttaaaaaaaattaaaaataatatatacagtgattctcttttaaataaaaaatatattattattattaattaactatataaatataattatatatatacacgatttaaaaactgtagatattaaggtttaaacaaactttaattatatatattattataattatagttctaattaattaaataattaaatcttatataaatccttattcaattcctaattattataaataattataaattaaaacttcaaatgtattaatttatttaacacaaaattgtcacaattaacaataaagcttgtatctttgttatcttctcaattcagcctaatttagttaaaaattctaaaatttgacatagtcgattttaaaattctaattgattaaataagtcaattaattgagtctacaagataatattatcttaaaaaatacaaggatcctggacctatgtaaccaagctcccaataagtatatgaaatttagcagggagatttcagaggaccatcaattacagaaagctctctagaagcatgacgctgcgtatagaagaaattttctaattgactgaagaaaattctctgagagtgggacgttgcctcaattttggtattctttcaatggttaagctcctcctatgtatgagacgttgtacttagcaagggttattccaatttatctttttttgtttccttccttcaagtttcttctttaacctttaacaagggtttatgagttgaaattatcaaattaggttcttcaaataacctatgattttgcctctatacagaagatttagcaggtttttctacactactcttcaacagtgattcatctcacttacgatcataaagtgaactcatgcttgagcaccaagcacacaagcaataacccactacacctcaacagtggtctatctcactcatagtagatagttttaacatacaaacttca

SEQ ID NO: 26533 - DNA, 2231 bp, Cannabis sativa
gggatcattcttccataattgcctataagagccactcttaagcactgagagaggaagatcaatgtcagtcatcataacacttctcacttacacttcattctctctgaaattacatactaattatttcacaatcaacataggtggtaacatagttcagtcattcattttccttcaccttattacattattaacttgaccgtcagagtcccttcagttagcaacatcctggtctcccaaggtttcttggtaactttattattttttctacaggttgttggtgcctgcatatgatcatattcaattgattgtggattttagcatctacataaactacttcaaaccaatgccaaccaaaaggtgaaggggtgggccatcctaaagataagatttcagaaacgtgttaggctatttttagtctatttgttgtatcactgtttagagttaattatcttctttgtgatactttttggatagttttacgtctatccttcctttgtgttaggttcacagagttttaaaataaaatttgtcaactattggaagaacaagacaggatgtaaattggcagacttttgtgctgaaaaattgaaggctcgttgtggtgaattatcgcctccgggtagtcacagcgagatcactacaaaaatgggggatttttatcacctacaatcgtcgcggcgagacttatggtggtcgcggcgacgcctacgtacgggacaaggatattttcgtcttttctcaattttaagtggtaaaactgttttataagaggaggatctcgattttttaagaaaggcaatcagaaaagaaccctagaaaaacaaaagaagaagactcttggggcgagcatggcgacccgatcgagtttccgacctagtttctttctctgctctttaatttctttatgtttttatctatctctagtttatttatgggtttgaatgttgaaattatgaactaatttcctaatttagagatatgatgaatattgactgattttattccatgcgttgatgtgatttgactatttcttctttcttgttcttgtggtttgttcatatgtgcacaacttttcagttccaaaattaacacttaaaggaatcaacattctatcggttaggaaagtcaggattccataattgtaaatcaagtttccaaccatccatattattagatttccaaaataaaagttgtaagaatcatcttttttgagaaaatttcacgagttaatcaaagaaattaataatctgaacaagacttcataattactcaagtttcagattgatctactattgatcatccttgtgatataaattaggtctatatagtaaatgacatgtttgataaaaacatcttaattaatttcggtctatgtcgtatatattttctattatatacaacacattcacttagatgtcatattacattagtaatccaaatcgagattgcttgcaccgaataacgggcatcagtgaaccataaatcgttgattaaatattccataactttaatatattgttggttattttattcatggctaagtaattataattcttcgtacaatacaagtcacaacctcatgaatgaataaagaatttttctatatttatagataaattattcaatattagatattaataatttaacattcaagcatgtaaaaaatgttaaactttaatttataaacagaaatgtctttacagactttttaggacataaaccctaacattcagctctataaaacacctatcactaaaattcctgacatagtcaatggttggaattatctgaagagatcaactaatggcaaggcaaagttacaacatgcaaccaagaggaaagtccttaacacattaaacgttggtcataatagcttaaaccagttctgaaagaaaaatggaggatatagatcctcgcataactaatgaccaaacagccctcggacccatcgaggaactcgaagaagttttgttatacccaaattttggttgtgtaccagaagctgacacatgtcccacaaaagaaatatgaatcaactcaaagaatataataatgacgttacatcatcaaatgcaattaaaataactcgttccaactaagtacaagtttgatagaaatatttaaactcgctgactgcttagtcttatgcgagatagaataaaactattaaactaaaattggcgagacatatgtttgcctcgggatagacagagtaataaaatgaacaagac

SEQ ID NO: 26534 - DNA, 4037 bp, Cannabis sativa
  modified_base (3972)..(3978): a, c, t, g, unknown or other
tttttgagaaaactctttgattaggaaaggtgtgcaagataattaaaaagtcactggagcgcgcctaatcattagggcattacaattttggtgtcagagccgtcaggttgtctattgaagattgtcgagacatctacaatcatcatccaagataagctcgactcactgttcagtaagcctttacttgtttagcaatttttttgattagaaaagtatgaaaggaagcatgttagtaatatgttagttgtataatgacttgcctaaaattcctagtatgcggtatttggtttatatatgatcgatgtcttacctacctcacctatcgattcgaggctaagtcctataatatggactcctgatgaaacacaaggagtcagggcaatatggtttagttcgaaggcggtaggaaaggtcaaaatcctccaaatccctatggatgcggtagaggccgtggcagatatcaagaaggtggttatgaaaatccaaaacaggctcctccaaattgggggcaaaggtttacagaaatgcaagcccaaattgatcaacgtgatgaagagatccaaaggctgagacaacaggtcctccatctatgcctcctcagcaagtgccagccactctggttctagtggtgccactggaacaatttgttgcttgtaactttatggagactttctatgaacggttctacaaataaatgcctctagcttttatgggaggtccagatgtgatgaaggcagagtgtggctgacagtgattgagagaatcctgaattttatgggtgtcaccagtaatgactgggtgacctgtgccacattttagttccaagaggacacgctcatgttatgggaaatggtgtccctcactcgggacatcactacaatgacttcggaagagttttaagatctgtttaatgctaagtactacaataaggtggttcgtagtactaaaagaaaggagttcactgggttagttcatggagagactatgttagtgaaagagtatactaaaaaagtttgatcgactggctaagttgggttcaggtatagtacctatgaatttcagtaagaaggagaaatatttggtggttttgaatgccaagattagacatgatttgatcaatactacaaatgacagaacaccctttgctgagattgttgagaaggctcttcgagctgaaggtgcagttgaatttttgtaggagccacgagggactccaagtgttggtgggactaccatttttcccacacgtggctttggtaggaatggtggttattctaatacggattagaaaaagaagttttcccaaaactaggtggcacagctcagagtaagaggttttgtgggaaccaagatagaggcggatgtcaggcctattcttatcctgagcgtccttgttgtaagaagcatcatcctgggaaatgtaaccagaaaaaaaaatgtttccagtgtggattgatggggtagtttaagaaggatttccctttttttaagaaagatgaactgaaataagaggtgaaacccactccaactctgatgtttaccatcactaaagaaaatggtatcgctattatttctatggtgatagccggagggcgaggaaccatttttatttgttcggtctgttcatggttctcagatatttatcattttaatattacaggctaaggatgtactacacaatgatgtgtaggattttaagtgattgtgattaactccaggagacctgaaatatttggacctgaggatgtcagggtggtaaaagagttcttttatgtgtttcttgagtagttacaagaattaccaccgtaacgagaaactgatttcatcattgacttggcacctagagtagagcctgtttcaatggcgccatattgaatggatctcgcaaacttaaggagataaaaatacaacttcaggggatgctctatctagggtttacccaacacattgtcgccctagggagcttcggttttatttgtgaaaaagaagaatggatccttttggatgagcattgattactaggaattgaaaaagctaacggttaagaataagtatgctttgccgagaattgatgacttgttcgatcagctttaaggaaaaaaaagttttcttcaagattgatttgcgctcaaggtatcatcagttgagaattcgggagaaagacatttcgaaaactgtattctgcacaaggtatggttattatgagttcttggtgatgtcatttgggttgaaaaattatctagaaacctttatggaccttatgaatagggtcttcaaggattttctcaataactgtgttatagtacttatgaatgatatccttgtatactctcagtcaaaagcaaatcacgagcaacatctttcaatggtttttctacgacttcgagatcacaagttgtatgcaaagtttaagaaatgtgattttcggttatcacatgtgtccttccaaggacatagttagacaggatataattatggttgatccgagaaaattatttgaatcaattaagaattggtcaaggccaaagataattattaaggtttgaagttttcttggattggcgagatattagcgatgttttgtggaagggtcttcttagatttctatgcgttaaaagaattgactaagaagaatcaatagtttgtatggtctgacaagtgtgaaacaagtgttcaagaataaagcatcgattgatttcggctctagtgttagctttgtcatcagatcaagagaaacttatggtgtactatgatccatccatacaagttctgggatgtattctagtgcaagctaatagggtcattgcttgtgattcttgtcagttgaaggagtatgagaagctttacccgacacatggtttagaacttgctactattgtattttccctgaagctctggcggcattacttgtacagagaaaagtgcaagatttatacagatcacaaaagtctcaagtacttcttcactcaaaaagattggaacatgagacaaaggcggtggtgggaattggtcaaggactatgattacaaaattttgtatcataccaggaaagccaatgtggtggtagatgctttaagcaaaaatggtctcgagtagagttttattaccataatgatatcaccttagttggcttcatatatggttaaagctagaattgagttcgtggttggaagattacataacctgacacttcaatcagatttgttagaaaggatcagaataatgtagttagaagactttgagctagtcaagattcatgaggaagtattggcgggtcggcctaagaacttctcgatctcaaatatgggaatgttactttataaggctcagtttttgtgtttagagcagtgatgggctcagaaaaaaaatacttgatgaggcttatactacatcttattcattgtacccgagtactactaaaatatatcaagatctaaaaccctattaatggtggtgcagaatgaggaaggatgtagttaattacatgtccaagtgcttgacatgtcagcaaataaaataaaacattagaaactagcagggttactccaacctttaacacttcttgagtggaagtgggaatatattataatagactttgtggttgagttacctagaaccacatgaatgtatgattcaatatgggtcataatggagtgttttacaaagtcagcacactttttcggtaaagataacttacatagtggattagtaagcgcagctataagtaaaagagatagtttgtcttcatgaagctccaaaatccattttttcagacagagatttgaaattcacatcaatgatctgggaaagtcttcagagagctatgggtacaaagctaatgtttaatacaacttttcatccccaaactgatggacaatcctagaggatgatacagattttagaagatttgcaacgagcttgtgttatgcaatttgaggtttcatagaataaatatttgttggaaattatttnnnnnnnatctagatttactatcaagtatgttggattaacaacctaatatgaattctcaaacaatg

SEQ ID NO: 26535 - DNA, 1098 bp, Cannabis sativa
cttcgaatccctcccgaaggatacttgattattagtgtatgtattttcaattcattactcatgtatacaactactgcttctggtttcttataaattttttaccaagtgcccatttttctcatatttactcaaatcttctgtagagcaaaggcaatgtgtgcttgggtattctagatggaagcaaagtacatgatggatcatcaaccatacttggaggtataatcaattttattatgaattgatttagttgaatgaatcctttctaactttgatcttgtcaattcaattttgttcattttttatttctgttgactttgtatgaatcattgttgtattttgatcagtaattgcgaatttggttgtgcagacatatcgatgcgtgggcatctagttgtatatgacaatgaaaatcagaagattggatggaccaattcaggttgtgtcaagcctcatcgattcgacagtcttcctttctttgaatgagggcttctttttcatcctcttttttgatgaattgctgctatagcaatcgaaataggttttgaagtatcttaaaatataacaatgcatcgcttattcgtcactctattggagatgttcttacgatgatatgttagatgatacatacatacatatatatatatatttatatatattaactgtacaagtgaattttcttttgattgaaataaaatgttgacatagtaaatagaatatttgtaggcagccattccttctaaattccacttatccacataagagaatgccactcattcatgtttctttccaaattataaattactctaatttctttgaacataccaaacaactcagttttatccatcattaactaagacatatacaatatatatatatatatatatatgttttatttacaattttataatttaaaatttttatttataaaaatacgattttttcagccaaaagtaaaaaaattattaaaaaataacgaaaaattaactataaaacaattaaaaatgaatatcgaacagtttaataaagtccgtatttttttaaattaaaaatttcaaactataaaaataaaatcttcatgttaatgtatttttgtaattt

SEQ ID NO: 26536 - DNA, 3169 bp, Cannabis sativa
cccctcagttgtttggccaactacaagagtctgtctgtcaacacttgtagaacgtagtgcaaccatcttgtttatacactttcttaagttgtggctctcaatgaaagcacaaaaatattgacttaaaaatctagactatatttttaagccacacttgcttgctagattggcaagaatagaaagtttgtgaaataattaatgagagacacaacaatttatagtagtttatcccctatatcgcgatagtaatggggctacgtctacttcgagattttatttctcacgagatggtaattacaggaagtgtttaagtattaaaagcttcaaattctagagagagaagctttgaccttatgggtggttttctgaatggtcaaaatgagctaaaggagctctccttttataagtgaaggagacccacaaaaatagtagaaaaaagtacaaagaaagcattttccaagtttcaacctaggtgctgacccctcttctgcccctttgcatgttctgtttggttccctgaaatagttgaatctcaatattttctgaagacggagatgatgctcgaaaggattctgggaaaactccattgtttgtggtccaagttggcaaattttcaacctaggcgcaaggccagaaccaggtgtcaacttgggtgccagaccttgttttttatgcctaggagctgttgtttttcctcaaaaaagacctatttccccgttcttaatgaagatagatttaaagcaaaagttggatctttgatcgaacacttggaaggcaccaaaattgtcaaattgtcaatctgggtgttgggtgctcagggctcagccccgggtgcttaaaaatcaagttgctccgaatatgatttatatgcctcaaacatgtgtgtgatatgtcaagtcgatgtcccaatgcaagttttggccactttgcactaatacggtcttggaaactgaaaccctagttgaggatgtcaacttgggcggtggggcggaaccctaggtgcctagattagttttcgagttgcaagttcgtgtaatttcagctgccgaaccttgtattaggttgctccatgtcttcatggtacagaatactgaaagatactaggttggattcaagttattaaagtccaaacttccatcctacagatcccggagttagcttgggcgtagggctagggtcccttcccagcttgattactatgactcgggtctactcaattccatgatgtcatccttcatgccatgtgtcaaacattgatgtccacacgtcaccataaaaagtttttggggtaacaaatataaatatacaccgcactattagtaaatatataatagttctaaagactatacgagcatacatatgatattaatcttttttgtattgttattctttttttttccatatacttttgttaattatttttttaaaaaaactttgtttattagtaaataatagtagaacaaattacatgaacttacatttaaacaagacgactgatgattttagtttcaatataaatagatctatactaaattatattcttgcttaaacataattttttaattttttaagcataattaataaaataatatatatatgattataacgcacaaaattttaaataacctaacatgcatatatatatatatatatgtgtgtaatatgtataggtttgtttggctctaaataatttttaaatggataggcaacaagtattctttttaggtcaaaaaagacaaaatggaagcaaaaattttggtctagtgcaaaaacttaaatgagcatcaaagatctaagaacattaagaaaacttgcccatgttggaggctacaaattatgcagacaatgaggcccttatacaggatgtaaaaggctggattttctttacttgtttcggctcaactaagtaagaaagtcggtgtgtgtttaatttaatttaatccttaaaacccactttaattatccctaaaacgcaaaacacattgtattatataaatatatagatacatataaatcctagaataaagaagaaaaaacaaaaaaaggacagacataagcatctcagatgggtcagtatatattaatttgctctgaaaagtagtttttagtgggagagaaaggtttagagaataattaactaaggataaggaactaattaaggaatattaaaatgcgtagtattcggggtcacatataaaataataaggagtgttaattataatatcttattacaattttctagtcaacctccatgtttgaaattacatgccgatatattttttttatagcgatattcgttatagttacagtattactcctgtaaatttttaaaaaattccgaatagtttacattaccaaaaacagaatttctaatatttcagtttaccacgcgtgttcaaaaaacttcaaatgtatttttgacattataaattattcaaaaaattttaaaaaattacagagctgatgttgtatgtataatgaacactgccgtaaaaaaaaaattgaaaaaatatttcgacgtgtgtcttcaagcctaaaatttgtgatagaaagtcgacggcaacactattcgttaataataagaagagaaatggagaagtaataagctttcacggattgctcaaaaaaaaaaaaaaaaaaaagcttttcatggtttagtggtcccctctttaaatttaattagattagccaattaggcaccccaaacaacttgtgtcagaatttggaaaaaagggtcagctatatctttgcatttaaatccgtgggcatccattctctataatgtagaaattaaattctgtggttcatttctatgaaataatgaatcaatcttctctggctaattggggaccacttttttttgggctcaattttgtgctccattttaaatgtcttctctcttgcattttgtgcctttattccaatatctttcaataattttgaaccaacacatctgtggtttcaaaacaaagcaaaccccactatgtctttctcacattatgctctttaattatatttataaacctgaggaatgaagatttatcatgacgatgttggttagattgatatttcagctcaataaatcactatagtgacataaatttctacaaagaaaattctatcaaggcatatatataattgttttgattgatattatgatttgtgacta

SEQ ID NO: 26537 - DNA, 5304 bp, Cannabis sativa
tctctctctctctctctcctgtttacattatagcttttttttcacttcgtctgcgctctctctctgatctaagaactgaagatatacagccattcacttccatccccctcgtctcttctctctctctcggcaaccaaacgaacacatggatatggctacactcacagttgtcttcggtgtcttaggtaacatcgtatctttcgtggcattccttgctccaatgtaagaaaatcgctttactatatttataattttatagatgcagaagattattattagtattaatatatttaaatttaaattatgtttatttcagaccaacattttacaagatttataaaaataaatcagcagaagggtttcaatcactgccatatctcatagcattgctaagttcaatgttatggatgtactatgcattgattcatgaaggtgttgtgctgctcattactattaactcatttggctgtgtcattgagaccatctacattagtttgtttatcttttacgctcccaaaaaatttaaggtattcatctactattaatatttttaattaatattttattttaacaatattgagttcagaggatataatattttttgctaataattacagtgaagattaataattacagtcaaagctcctttgttttaatttttcttttttattttgttaataattaataaaatatttattaattaaatataattgattaatgcagattcaaactgtgaagattcttctgttactgaatgttttcggttatgggctaatgattttattgactactctccttactaaaggagagagacgacgcctagtagttggattgatttgtctcgcgtttaatattggtgtatttgctgcacctttttctaccatggtacttcttatatatacttaatatatgaatataacatatatatatatatctattcaacttatgtataatatatttattaattattaattattttaatataatatatatgcagagacaagttatcaaaactaggagcgtagagttcatgccatttttgttatcatttttcatcacactaggggcaatcatgtggttcttttatggttttttagccaaagacttttatatagctgtaagtataccctttttttttatatataaaaataataatatttgttattaatttggctgatcatttattaatatatttgttttttgtcttatattatacacagcttccaaatatattgggattttttcttggcattggtcaaatgatactttacttcatgtacaagaatgccacaagtgtaatagtggttcacgaggatcaaccagaactagagctagtataactttatggccaatccttggaataaataatgttagatataaatatttatataaatatactagacataaaaataggggtattttaattagataatttctgagaaagttttcatacttttttttttcttttatttttctttttttttttggaaaaaggtatagttgttaggatcttacttaaaagatgtgtttgtttattttgaatggaaaattgaaaccacgtcatttcacatttgctttccaaattatccctataaatataattgtgaatagtagtgtaaatttgtgtttataattttttcttttaataaattatattttatgtattttaattgttgaaatagaccatatttaatatgatttgattaaataattattgagaatacaactccctattatttaagattagttaccgttaaccttaataaaaataaaacttagatgtaattttttgtattgaaaaaagtgatgcaattctttcactaaataaaaaaaatcattataaaaaaaatgttaattcatcaaaaatcaaactatctttcgaatagtattctacatctcatgtatgatatgggctataatataatacaaaattaacctcactcaaacttgtcaaaaccaaaatagaaatgcacaccgtggtggttagaataaacactaattaacttttaaaatatgtatagtgtttctataaatataattttaattggtaacttatgccaagaacccaatatatatataaaaaatcaaaaaatttgaaacatatccaccattatattgagcacaaagatcataaataataaagctggtttgcatataaaatatgttctctcatacattctccacccagatgagattacaaatacattgcatttgagaattataaaaatagaaaacaacaaaagcagccaatgatattgatatacgtataagttatatatctatttggaatgccttccattttgatgagagttgcatcctaaacaagaaaataatttttgtcaattaaggaaatcatgctaaacttgaaactttgcaagctaagggaagttggtccctgccaaatttataaactttgtaatctcttgtagtatatggagaatgaaaatctttgaagggtgaaattatagatgaatgaagacttgtaattattcaattgacatcaaaaactgaaatcgcttcatctgaatcttcacctttggaaatagatagttgcaagcataataaagattgcaaaacaatattcattaacgaagttgattaaaaaggggtacaacaagcaccacaataattgtgctaaataaatggcatgtattggattggactcttgtgttacatctaatataataaataaataaataataatacagtcaaaatcacacatcataaggcaccaacggtaaaatattaaaaaatagttagatttcccctatcaatatttgtgaggctatagcacaaatttgttctaacagacaaactgatttcaatgaatactattatagactaatattcaaaacacatatttcataattttgaaaaaatgatatagtttacaatcattcaacaatttcaagaattcatggatttgagctttgaaagtacaaaatctgtttttaaaatggaagttttattaaatccctttatcctaaaatcttgaacattaatccatgaagaatcatcatatggatgacattgattacaaagtgatcaaatactaaattaaaatagcctattgtagttttcttaaagtatatatgttactatgatgacacataattaaaacattaatgaaatcagagaatcttcataaaaaattagagaactctaaaagtaaagagaatacctcaccaccattgatgcctgcttcagagaatgtctcaaagtaattgcatgctcaaaataaggtgtacaatggccagtaatagtatatcacttctaatcatatcaacacctccttaataatagtattgtttaaacaattattgcacccaaactcattaaattcatggcaaaattttttatagaaaaagagaggagtaaaccagaagaagcagtgaacattaggttttcttaattacatgtttagaatgataaggagaaaaagtagttagtaaaccaattatacctcaagcacaattcttaagaaagactcttcaaaaatacaactcgcattgacatgtttcatacataccaatcatacaagcaaatgttgttataagaggtgtatgtgtatagctttttaaaatttggaggaagctctttagtgtcaaatgcattaccagacacaaccaaccaaaatgtaaaaattcatctttcaactttgagcatgctggctgcaaaatagaaaaaaaaaaaaaaaacaaagtataatttgaataaactggactcatcaattttgacatgcaattttaaacaaatacataatgtgatataaaaaaaatattgtaaaaaaaaaaaaacttatgattcattataagaaaaagactaataattcattataataaatgtaacttactatttgtacctaatttagcccttgtattaatgaagaactcctaatgaaggtcatacaccagatgacattgaaaactaaagcaacatatatataagaaaattaagctaatttgcccactgaaagtttaaaatagctagcttcacatatttctcaatcccatttttagagaataaacttctactatctgtatcacattttaagagggacatgcaaaaataatcaccaattaagagaataaaactactctctttaaagacatagcacctaaaaattaacttgctaaacaattgatcgatgataatgtccagcagccatgacatactctgcatattgtaatagtgcaaaccaatcattatatagtgattttcttgatgatttcacttatgcatactattatagtcttatagactatattagtaattacttttataataaagaaatattagtttaggatattataatgtatttattgattacctatcaacttatttcgaaaattcggtataaagcatctttacgaatatttattgccaatatgaacacaatataattggttgctagtaataaactccaaagacttaaattcattgacaaactcacctctataatctttgttgggaacgtcaagatatgaatccggtaaaacccaaagaataccaggttgtactatctaagcaaaataacagatcagacaaattctagaaaagggtctatattgcaaagcttaaatcatcatataaaatgaaaggccaagaaaaccaatacattcaataaaaatgataaaaataagatcaaaacacaactcaaaatcttatcagcagaataacatcttttgaaaaataaatggttaaatgaggtcattaataacaataataaaaaaaatacaaaattaacgcaatgtaggaatatcaatatacctttaagcttgatggaaaactcctttgaaatcaaagcaccaaaccagtatacgtagaagtagaaacagagtaaatcttcttcattgcctcctcctcactgaaacacagaaaatcatacaaaaataaatccatttaaatttgtcctcgaatttcaatgataacaataaagttagcatagtaccttcacagaaccaaagcaagggttttgacgaaagaattgaccattgatcttcgaaggtaaaatttgtcaaaatagacttttgacaaattgcaattagcaaaatagatttttttttattacttttattttacacttaacatttaaaaaattaatttaatattaaacaaaattaattaaaacctcataaaacaaaatactaaccctaactttcttttacagcctcctctttcgttttgttcttcttcacctcttctcctcacccaagtcactccttcttgctaataagactaaaaagaccatgaatgctcacaagtgaaccattcttctttttctcttcctcttctcatcctttt

SEQ ID NO: 26538 - DNA, 1661 bp, Cannabis sativa
aaagacgagacgagtactgaatcttcacgttgtcctcctcttcatccttccttcagctccctaaataacatttataaaaccagttttgtcagccctaaaaataagattcagaacagagaaaagagaatcaatggacagaaaattgagatatgggaatgggtcctcgatgccccaattgctattgtgctttcttcttctgacgagcttcgttggacgaatagcttccctctcggtcacggtcaacgatgttgaatgtgtctatgagtacgttctttacgagggtgacaccgtttctggcaattttgttgttgtcgaccatgatattttctggaacgccgaccaccctggcatcgatttcaccgtaagtctctcccttttctcttcttttagttattgcatccctctctttttttttttcttcaatggattcaatttaaatattttattttggagtttctgtgttgaattacaaagttttgtaatttgatccttctttttttttttttggctaaagttttgtaatttgatctgggtttgctactttggtttcaacggattatgtgggaaccttaattatttggcgagaatttgaattttcctccctttctttcagccccattaatctaaatataaattgggatgttgtggaacccaaatctgtgatgtgatgctttaaatgattatgactaagttatattcttcgttttgttttatacaagatgtatgtggacatttgatgcatttcttaatggaaaacttcatcaaggaatgaatctaaagctagtagggatttcgctatggagaactgagaagcaagtgttcatgttttctgtcaatgtcaaatccccttcccccaatataaatatatgtgtgtgtgttgtctgtcaatacaacctatgcacctcttttttcttttcagttttcactcttctctatgtgctataagtctagataacccttttctttttcttgggagccaatttttatgttagtttttccagtaggaggtttctgatatgatgttttcgttttgcttgatgatgattggatgttttaggaacccctttctgtctttctgttgatgtctacatgaacaaaggtttagtcttcagaattattagtcaatataatatatagctaataacttgtgtttacgtacaagttttgcatttcacaagtgttgccattttctacaggtaagtgctcctggtggtaacaccgtgcacacattgaagggaacatctggagacaagtttgagtttaaggctcctcgaaatggaatgtacaaattctgttttcacaatccttactcaaccccagagactgtttcattctacatacatgttggtcatatccctaatgagcatgaccttgctaaagatggttcgtgaaatattcatcattgtctttctttttttcttccttttttttctgttaatgcttgccgtactcactttccccattttattattgcagaacatttgaaccccattaatgttaaaattgctgagttgagggaggcattggagtctgtcactgctgagcagaagtatctgaaagcacgtgatgctcgtcatcgtcatagtaagttttaaatcaatagtaatgaatataactttgaagtttcaatagaacgtgtacagctttgattttagaatttt

SEQ ID NO: 26539 - DNA, 2490 bp, Cannabis sativa
gttataattaaaactataaataaactgtaacatggagaactagacacatgcattgcacgtgttaactttcacctagtaataataaagtatagtatcgttccgagagagagtgattatcaattactaattcatttattatttttttatttaattaataaaaatattgaaaaaaaaaagtaaatagaacaaaatagtaattaaagcttaaagaaataataatgataaaaatgaagattattatgatttccaattgttatgtccatatttccaatcataaatatggacatgacacattgatactggtctaaaaaattaagggaatttataaatataaaagttatcttatctcaaaaggtgcggcaatcaatgaggtattgtcccacattatattatattatagctgtcaatgaaaagtgataagattacgcatacactgattagcgaagataacaatatcattagttaatttcagaacccaaccaaaatgaacgaggcttgcaaaaaaaaatattaaatgatgagttaagaggaaatggtagataaggagttccttaagtgattgcaactcattgacgcacatgagtatagtgaaagactaagggccatggtctaattaaatagaatctgcctcaccatcttccatcaaatgcgagaaaaccaatcaagagaaaattactttggatcgttttctaatgatacgacgggggaggtatcaagttatctcgtgatgttcatctcaattacaaaaggatgtgagacaactctgatcacaccacttcagcgaaaatttgttacttttagataagattaaaaagcaattattatcagttattttatttatcccacgtgttgtaaatatgaaaagtgaggatcatccatatttcatagacagatacctagataaggtcaagaaggaataagtgtcatcttaaagaatcctataaataggaacaaagacctatgaagagggcagtctatttttttagaagcaaaaacactgagagattaaaaaaaaaatctagagatattctcttgtattcagaaatattataaaaatataattagaaacaatattgactcgtgtagtatgtagatttaactacaaaactacgtaaaattcctttttattttatttaaatttgacctaattaatgctttagttttatttaaaagacttcattattgttaacgaatttttatatatgttaacaatttggtactttaattgagagccttttgtttaaaattaaaaactcaaaacacatctccctaatataacaaaacttcctcatcatggaaaatactcagcatgatgaactagtcatggaagaagagataattcatcgatctgtaaaagagccccaaggaacacaaactcaaaacaaatcaagccaaagaaacgcgagcaaatagtattgcatcagatcttagagagagattaaataaaaactctcgccaaacatatgattaggtcaaccaacctactgataactttattcaacgaagggtcattcagttggaggactagtttagaaaataccaagacaaggaatacgagaagctcccagagtatgattctaatgacaaccatgagcctttccatcctaaaattttcacaattttcaaaaagatttaaaaatccacatgtgactccttatgatgggacaattgacccaatgcctcatataaaaaatttcaacataataatacgagctagcaaagtaggaaataacttgcaatgcattctattcccaacattcgtcatcggagctgcgagcagttggtttaacaagttcatcgaatattttattacctcttgggaacggttgtcttaggactttaagaaataattttatgtcgctagaaatagaagacgtgaggcatcatctttaacaaatttataaaataacaacccaatgaatccttaaaggccttcttgagttgtttcaacaccacgacagccaaggttaaatatttgaataatagcactgacctaactaccctacaagcgggaataacaccaggaagtgagctttaggataatatgcaagtatgctcagtaagatcaataagtgaattcaacgtcaggacacttatatacgtctaaaataaagaggcttgatctgaacttaagctattaaaagatggctcgagaaataaacctagctctagcaaagtcaaagaaaatattgaaaacacaagcataagaaatgagccacatgggaaaataaaagatgaatccaatgagtcatccaaggaaaagaagcagaaaaatatgagaaaattcaagttaagcagaaaatccaatgagtccaaagtcaatatattatttggatttaccccatcaatgagtaattaatgtgtacatactagaactctagcaccatatgaatatgagaaaattcattcattcaataggttaaataggttagagtctcattctttgaatgctcaggcaaattctaaagtttaaacacttggcaaaatact

SEQ ID NO: 26540 - DNA, 3852 bp, Cannabis sativa
  modified_base (862)..(878): a, c, t, g, unknown or other
  modified_base (3647)..(3654): a, c, t, g, unknown or other
catatcaggaattgcaccctgaaacatgaaccacattgttcacttttaaggctggaacaaaagtcaaaaacataaatgatcatacttgatatcttacaactgagtttagaaagacagtctatacgcaagttaagagaatatatatgaattatccccttttaggcatatctcttaatttcaactgatgaaaacactatgtatgaagaattatagcagagagagaacgagagagagaaaacagagtgtgttttcttgaaagtaattgaagaaaaaaacttgaatgattttattactgaagcaaacgtttatatacagagttacaagctaaacaaacataacagaaaataacagaaaatagacaagtggaacaactgaaactaacagactctaaccaacatcagttagttggttatcaatgtaagataattgtgtttttctttttctttttttcgaatatttcttgtgtcccattgccactttaattacaagttaaatgatcttcctactgacactaaactaaatggaatgccataaaaaggatgactaaataaaattcctatctcatcaccgaattatgtaattatggacgcatcttgaatttgatacctgaatgaaggtcacaggatcagttgagatatcgagacaattgatgattttcctggttagctgagagggaaaaaaaagcaagtttttgatatcagaaactatgccatacaactctgcttgattttaaacaaaatgggggtacttctaatgtttgtgtgtgtgcaaaaaagttacatgttttgaatataaagacacctaaacaggcccatgcacacacaatagtcaataacaagacacacagagagagagagagagnnnnnnnnnnnnnnnnngagagagagagagagagaggaccccagattttttgaggatgccatcaggatcatttgtcacaatccaaccaagacgccaaccaggtacacccaatctctttgatatagagccgagcgttagaacaggtacaatggatgcataaactcccataggaataaatggtgtacttccaaaacaaatatgagcataaacttcatcagcaaccacaacaaatctaagcttccttgccgtctctgcaatctaacacaatacacaacaaattttgagagaagtttatcagaaaatcacaattccaacagtgtgaatatttggaccaattaaccttctccaaatgctgggcattgtaaacacttccacatggatttccaggattaatcacgaccatggcaacagtattctcatccgaaagagcttcaacatgttgcagatcaacctcccatccttgttcgggaataaggtcatagtgacgaacttcaagcttgctcgaggcagcccgggcttcatagtagggaaatcccggccttggaaaaagaacattggcaccaggacgagcaagggctgttattatcatttctatagcttgtatgcatccaagtgtgacaaaaacatcatccacggttaacttgtttggaagatcctgggataggtactctgcaatagccctgttacatttcaatactcaaaaagtcgttagtataaatggtccaaaataaggtgataaaatgttagtaatggatgaatggagaaattcagcagtactttctagccgatgggagaccattggtgtaggaataggagttaaagttggctgaacggagggcgttgacaacggcatcttcagcagtggggggagtgcgaaagcaagggaagttagaagggtcaccatggccaatagggatgaccacatccacaggtgtgttattatcatcttttcttatattttggtacaaggtattgagaactccccggactgtgacggctgaagcggtgttgccttgctcttcttcctccacaccaaagttccattcccttgaccccttaatctccattttcttttcttttgtgttgagtggtagtgcacgcaaaagagattgttttttgtttattgagtgcaacagctgcatatgaatagattcttttttacggaaagaaactcaatgacttaattctattggctgtatattaataataatttaatagttgaggaattattttatattggaactatgctagaattcaagaaaaaatatcaaaagagtgtaaaagaacgtgtaatataaagagtctttagcattcctcttatatcaaatggcaccatttttgttttttagtgtgtgtcaaaaaccaccctttgaagattctttcccttttctgttcatcaaaaattatcatttgtggatcataacaagttccaaatgcttaatcataaaaagtttcaaatgcttaagacctctcaactcattacttaagagcattctttgccaatacacttgagatatttattaaactaaatgacacaattatatagtttatagtttttgtaacatttgtaggaaaagtgtaagatatggccatcacccaagtgaggtaaagtgaaatgttactaaatgggtcacattagtggcatttgaactacaataataatttgaggtttttgttttataaatataaaaaaatgtagtagagtttacttctatatggcataaataaataatataaaaaatatgagattaaaaaataattaaaatttaaaatataaggaaaaaaaaataataaatgaatttaataaagtcacacttcgccgccggaaaagtcactagaaaagttattataaaaatcaccaaaaaagtttttgaaaaaatcactgttgccgaaaaatttgtcatcaccgaaaaagtcactatcactagaaaagtcactaaaagtagatgtctcaaatataaataaaaatagaaccgattttataacatattgaataaagggattatttcacaaatacacaaaaataaccaaaaaaattacaaaaatacagtttcacggaattttaaacatttttacgaatttttaattttaattacagaaaatacggtctttttatgttgtactcttgttaatttgttgttgattttttgttatttttatgttattttttgttgttatttagatgttattatcatgttacttttgtgtagttttcttgttgtttttatggaaaaccataaaaatataaaataaaataaaataaaatctttaaacgtaaaaatataatttgtttacaaaagatggtgccttctgtaattatcctttggataaaaataaataactcaaatcaactataattaaaatatagttggttctgtaatataatgaataaaaacaaataacgcaaaataactcaaaccagttataatcaaaataaaacctataatagtgttataatgaataagaacaaataacacgaaaataactcaaatcggttatagctaaatagaaccggttatataacataatgaatacaaacaagtaacatgcaataacttaaaccgattacaattaaaaagagagagaaaataacactgaaatataaattaaaaataaaactagttctacaacaaaatacctcataatacataatacctcataaaaccagctgtaattttttttttttaaaaaaaaaaagtgaagatcaattccaaaaaatattgaggcataaatatgaaaagaatcggtttcataacaaaacaaataaacacaaataataacacacnnnnnnnnaaatataatataaagaaaccgattatatttatcaattagttaagaatttgagacaaaaatactggtttcgtaaagcaactaagacaaaaactcacacacaaaaagcagttaaataaaataactcaagcaaaaacatccattcaacatgctccaacccaccaaataattacactcataccatatttaccctaaaaatac

SEQ ID NO: 26541 - DNA, 5794 bp, Cannabis sativa
taaaataatttccaacaataagaactatattcatcgtgttgaagcccttatgcatattaccagtgacaaaaaagtcaaaaacgacatcatagaagtcatctcccacaaacttccaataatgcttaaagaagagaacatacataccatcaggaccaggagccttatggttacccatggcaaaaagagttcttctaatttcatcatgagtagggaattttagtgactcctcgttgtcttcattcgagatactttcttgaaaaaactgtctgcaatttagatcctgaccatcatcggacccattaaaaaaatcaacaaactcatgaccgattaactctcggttggatatccagacaccatctttattcaagatgctctcaatggcatttctacttcctctaatagcaaccgagagaaaaaaaaaacttagagcatttatccccttccttaatccacgaaatcctggccccctgtttccagtaaagatctttcctctcaagggattcattcaaagagcgacagataagacattcatttttccaatcacgggaactagctggtaaactctacaaatagttaagctttttctcaagctcctttatgaccgtgtcaagttttccatattgagttctattccaatgaagaagagcaacccgagtcgctccaactttcctgtaaacacgggcaggagcccaagagtggtaaactgaattccaggcatgatcaaccaccaacttactcctctcatccctcgtccatttttcttcaaacttaaaacatcttttaaacctagcatctaggccattcgaaagaatacacaaaggtctatgatcagagttgctcgtctggaaagagcaaagaacagctttaggaaacaaattgagctaggccccattaacgagacctccttccagaccggtggttatcccatgtcaacttgtcaccctaaataggcaaattaataagtccccgagagtcaactaaattagagatgttaggattaactagtcccttccggtggacccttcacgctctaaatcactaagaacaaaatttgtatctcctagaatcaattaaggaccaccaaacttatccccaattttcataaattcagtccaaaaaattttctcagcatggagataaggagggccatacacacaagagagaagtaaaggatgggaggggggtctgagtaaataaggcttgagatatgattgcgagaactaaaaatacactgacaactaaatccaaccttctaggtcaaaataatgcctcaagcggcaccaataggcggcacaaaaatgttaaaataaaaatggagggatttaagtgtacgtaccagaggagcaacatcaacttttagttcggttaggaagacaaaattaggagagtgtgatctgatcagggacttcaattcccaaactatagaggtctgccctaaccctctatagttccaaccaatacctctcatggctcctgtggaggagatgcgacattctcctccacaagggtacaagagtgaacggacatgctagagcaagaatcttcaatcaaaaacgagccaaccaccgagttcttcaaaactccatcaatgcgagttgatgaaaaagagatatcatcagagggttcttcaacgaaaaccttacactcatgctcctgctccgtggagtcccacgggaagtcgcgaattacaccagggtgaattcgaagtaatttttgaggtcttgagcataaagaacaagaagactcaagtaatttccttttcttaaatggagtagttctttcattagttttaaaagtaggcacgacaccaatatcacccgctaattgtcgtatctcatacaaatccaagctcccaaattgtttaagttcttgcagtatggtctcttaggcttgaaaaaaaacaagaaagtgcccttttctcatcaagacacgagtgcatcgcttatccacaaataaacttatcagtagggccattagagccaatcaaatcaatatgtccctgacaggattgggccttagcaagtgacccgcccacacaagtattaccacactccagatttttatccacagaggttaacaccacaggcccaccatcaccattagtattagaattatgccctataggagatacagctagccccacatcattagttttaacaatatcaactacccgtacaagtccaactggcccattggaatcaacactcgcgcccacaccaactaaaagccttaagtcaatatccatttccttcgaaccaattaggggagagccatgcacaggcccattctcagcatttatatttagtccaggcccaataagaggagcagtcggcccacacaaaatagacattggacccaattcattgaccgcctcggagtgatttaaaatttttgaacaatttgatttgtccaaagagcggtcagaaagaatagcaggacctttaatcgtctccttagccacaacacgaaccacattaccataaacaacaactggagtcgtactaccaccaagcagcaacttgggaacctacacgacatgcttcgacttccctataggcacaggagaacgaccagtcactttcttgacatgcctcggggtgcgaactgccttggaacccgctcgcaacgtacctctgactccatagctagctaccaccggagttgtaaaaccatggaaacaattaggagtagacaacaaagaggatgcacggctaggaaagaatgaatttgcacccgagaacacatcaagatacgaagaagttgatagctccggtccaaacagggggaagggaataccatttttgttctcaaccgtgactggagaagagaggccacaacctttttcgtttgtgccccaaacagaaataattgtagcagaagatacgtaatttctcaaacttgaactgaatccatttcttaacctcagacaccaagtcaaaaaagcaacctgagtacaacagtttggcaatatcaatctccaccaaaaccttgagatacttactccaaaaggtcagtttttcttcatttaaatccacacgcaaaaccttaccagccaggcctcccaataaattgccataagactattcatgaggtaggttgtgaatctgaatccacagtttcaaactagtaaagtgaattttcccttcatctctcggagaccaagcctgaagaactaaagtataaccccttatgcaccagggaccattctccaacgcccagtttctatccttagcaaggtcaaagccaaattcaaaacagttagaattatcggcctcctcaggtaaagccaaaacagacataggtttattatgccaagttttagccacaaagtcaatgacagtggcctcatccacaagcattggggccaccacttttccaaagagacaaaatgtagataaagccttgagacaagaggcactaggagttaaagtgacagaggcttcaaagcaagagaagcatttacccttagcaggggggttggtagcaataactacctccatgaaaccaaacaaaaaggcaaagaaaccaacaaaaaagaggggacaaaaaggaaaaggaataaaacacacaactcccacaccacacgaggccaagaaacagaacacaccacaagctcaccacacccacacaacactacgcaccaacacagaaagccagcacaaaacccacaaccgaccaacaaaggaaaaggaataaagaaaagagacacgacagaagaagaacaaagaagaagaggacacaaaagatatcaaaagagacacactaaaggcaaggaaaacacaaagaaacggacgacaaaggggaagagaaccaaaacgatgaacaaggactaaggactaaggacgaacgatgaatagtgatctatataacataaaagtaaattatcaatactttgaattctaaactaatttagagtctttaaaaataactctcacatatattactaaaaatataaaaaataaataaataatgagaaaacgaagaaactaaaaggaaactcatataagatatcacatcattttctttgtgctttcttttatatatatctatgtatatatattgatattgatacacaaactcttataaaatttaaaaaatagaaataaaaaaatatcgaaacgtttttccattttcttttattaaggtaaagaaagaaaaattcatatttttatctccgatttgaccatttaaataatttaatctaaatttacaaaaaaaaataataacaaaaatactaaaataaaaaaaaaaaatcaatttgtataaatagttatgttctagtattctaaaattaaaacaacagaaaacataacgaaaaataaaaatatatatatacatatgtataatcaagagtgttcaaatagtcatatatgacattgacaatcgctttttacaaataaaattttaacttttgagcaaataaaaattaaaataaaatattttagttgtaaaaattattttaacttgaacaaataacaacataagaatattgaacagtacaaataaaattcttaaataaaattatttatatatatgttgagataaatatactgatatgaaactctcataaaatttaaaaatagagagaaaaataaaaacgcttttttattttcctttattgaggtaaaaagtaagaatacttatttttatctctaatttgaccatttaaataattaaacttacaaaaaaaaaaaacaacaaaattgctcaaacaaaaaaaaataaatcaatttgtacaaataattaaacatacttctttcttaacttttggtgagcattatatgcccttaatgtgtgctctgtggcagttagtcccctgttttttctttttaactgttttcacatcaatttttcttctttttttaaattgtaactgttcccgcttgaacttgttcttcccccagtcttcttctgctattctcctttaatctgctcttcattctatttcctcattctactattcatgtattacttttcttacttaatcagtagcctccatggactcttttctccttgatatattcaaagctctatctgcaagagaaagagaggttatctctttaactggtgttacgatccctcctcaacgccctatttcacatcgcttgatttgcagggtctactctcaaaaggttttaatcctaaaaaacttgtaaacttcttcatggctcattggaagggtagattcgatgtctctgtctctccttacgaattggattcctatatggtatcttttgggtgtgaaggtgatcttttaagagtgttgtcaaaggaaccatggcactttcataatctacatctgatcttgtgcccccctagttacctgtagaattcctcaatgagttcatttaccaccactcctttctgggttcaagtattccaattaccctttcttagcaaactggaatctcttgctagggtcattggaaatttaattggtgcctttgttgaagttcatgatgactcccttaatgaaggatggggacccttcctacgaattcgagttggtattgatgtttcaaaactcttacttcatggacaaagagttacttttccttggatggatgatgaattatggcttgattatcgctatgaaaggcttctcaatttttgttatgagtgtggtattattgggcatgtctttgacaaatgcccctcttttttggaaaaattggatgaagggaaagaactggatctcacttatggaccttggcttgaagagtcttcactgccaagaccaagttacgatcgctatagacaatactttttcaaggcaggtttgtggccttttatt

SEQ ID NO: 26542 - DNA, 2848 bp, Cannabis sativa
  modified_base (1450)..(1464): a, c, t, g, unknown or other
ctctctctctctctctcctagtctcacacaccactgtctctcttcatagagaattagtattttttttccaatctctatcacaatatcatgagttgagaatacattgtaatcagaaaagtttattcatctcattaaatctataagctcaccattatcctaagtgttgaggctgatttaaaagatctagtgtgaatttttcatcaagcccataaagcattggattggataaattaacgaacagttatacgaaaaagatacaagaatcccttgataggcatcaagatgtaaaatccttattgtgttgaaatcaaggatttaaagttcatatcgaattcaacaaattttttcaaacctataatcgaattatatgcttctgctgcgacattgatacgaactctaaaaaccaacaaatagtgctagagccatctctacaattacataaattaaatactatgttggatattatgcattaatgtatgtgttgatatattatgaatggatagttattttgcatgaatgtgaatcattattttttatgaaaaatttgggttagaaatttttatatattttttattagaaaaatatgtacaccataatttttgtgtaggattttttcaatgtaatacaaaattttatttgtaaatttttgttataaatattgtaattctcaaaatcctcaaaacctccattgacgggtgaacttgggtgtaaggagtaaatcctgacctcattaagatgaagtttggaacctcgtacgatgagccagaaccctaatgagtgcagctgcaaggcatgaggatcgaatacagacgagatggacgtgtgcatggccatgcaaacacgccatgggagacgaacggagcacgaaggagctagacccgatcaagttcgagattttgagcagccaccctgggacctctgtggtctcatggctccaaccagttgggtcgaccggaccaaatagggtcccaaggtcgatgatggtgctaaaaaaaagggaccgaaaggtcttagaattttaatgctccatttgtggttacacgggtctgagtggcctaattttgccaaacccagagttgttgctctacgccatccctcctccgatgaccctggtggcttttaagccgccattcatccctctccactactagccatgctggtcagactaccaccccaccgccatcttatatatttatgtatatgtatattatgtatacaatataatctttttattattattatttaattaatgtggtaaaagtactgtgtataatttaattatacatgactggattgatatgtaataacatctttcatcaacatgtcgtttattatgaaagagttattcacatcacaacgataatcattagtagatctgtttgaatcttgagtatacatgaactcttgtttgtgtttattgagatctttaattcactcgttaaagtttctnnnnnnnnnnnnnnnttacaacttctgttttgggagcttgacaacatgagtggatgggaacatgtaatacaataatagaatccaagttttctgagatgatcgaatattagttcacttatagtgtttattttgggagtgctaacagttggatctaaatctacaattggattatagattaattgttcacattgaatgaatggtacgtaaggaattcaagcgataattagaagagtaaaacaataattttgcccaactctaattatgaactgataattggagggagaactacttatattgatcatatcaatagactataagtaagaattttataaatataattatatattgtcaaagagtacaattctatatttatagttgaagggataactacttatattgatcatatcaatagactacacgttagaattctataaatataattatatattatcaaagaatgcaattctatatttataatggagtaataatagaattaataaacttgattattctattaaagagttcaataataatcaagcatttcttaaaggtttgaaacataggtacatggtcgccatattacctttatagaacaatgtgtaggggaatgtttaatttgaagaatgaattgataaagaattaatttttatgagaaataattcttatgggcaaaataataattaaaataatatttaactaattagttttatttgataaaataattttaactagttaaatataataatatttttaaataatatttaaagagagaaaaatattattttagtgtaaaataatatttattttaatcctagtaaaataagagattaatgagaattagtcaattattatttgttgtaaaataaataataaatcttatttatgaaaaaattaatacatgaatttcaggctttaaaatatggcccatacgtgtggggcttagcccacacatgaagggtgatatataaaagctcaattaatttattttgattattttatttaataaaataaaatcaaaataaataataattatcttttaattatttgaattaaatatattataggataatatatttaaattaaaagataatataaaataaaatgatatgattgaattctgttatttagttatatgatatttattttaaatttaaattttaaattttaaattaaataatattatctttttactttataggattaaatagtttcaattattatatttatatttatatatatatgatatatataatttataattaagaaataaatatacataatgatatgtataagagtaaaagtacataacactctaagatataattttgggagtggaaaataagaaaatgaaaaacttgtttctcactctcatgcctactatctctctctctctctctct

SEQ ID NO: 26543 - DNA, 2220 bp, Cannabis sativa
ccgctgtgccatcaaaagtgattataggcatattacctttatcccccaaaaatgtgacaaagggtttcgtcctttccaccaatatatgctccttgtaaaccccaccagcaattgagattatgaccctagcagtgttccccgcaggaatacttttaacagcatctgtaatcgacttgaaatctccctttccatcttggctgaccttgatcaccttagaggaggcctgtgctgtcgccagtaccttgtcaagggcatgatcgtccttgtccctctcatgagcttgtacgttgtgctcaatccaactatccaactttgagccatctgctggaatgatgctcggtgcaccagatgtggtaatcacctgtaaaaccaaaactactcctgcaacgaaaaacatcaccttcaatgccatacttattattattttcttttttttcttatggaaattataagcctacaatttattatatatagtgtgtgtgaatgaatttgttcataatttttgtgtacgtggttgtgatgatgcttaatttttggtaaatattctaaccacacaagataactttaaatgttttaattattttgtaattatgatgatatttatagcaaattcaatttagaaatcaatatttaatttgatcattttgttagagagtgtgtgggaagtaaatattttaggacgtccataaattattttgaaagtgagattaaaagggaggtgagttacgaatagtttacctctaattaaacagtgataaccaaatacattattacgtactaaaaataataatattgaaattctaggccagataagtctatactaatagattttacgatttaattaattttagtcatccaatcaatccaatactaattggatgttgaattagatcgtttctattcattgaatatttttcatatatatatatatatttattaatttagtataggtttattcaatattttagagttactattttttaaatcggatcagatctatcttaaattttaggtccatgtattggattgaatttgaatttatccaatccaaaaaaaaaaaaaaaagtgaaattttagtgataatttttatatatacatatatattttatatataataatacaagatttaattatccatcaaaactaaatgaaattactaattagtttgacgggatgttattggatttttagatatccatccaacacccgagatttgatacaatattggatattcaaaaataacatccaatccaatccaattataattagaaatctaatatttagccgacgtcaattataattaaatcagtcgaatgtcattaaattagataaatttatacacacccctatctatacctatctaattatctatagatctatattaagaatgttatattgttcattatggttatggttgaaataataattattatggatttaatagtgatataaaacgactttaagtttacaacattttaatattttgtacttaattacaattacgtactgtttacatggaaaaagtaaattaaaaagtatttaaataagattaaaaattaaaaaagcggagagaaaagatattactagaataaatccatagaaagtgctacctcaccttacttaacatcctgattgtaaattaagatataaatagagcattgctattagacactagtgtgattgactatcgatatgtcgccctgtgattgactatcgatactttctaaaagctattatattaaattatatggtacccgatactcagttgtaccaatagcgatattgacacataggagggtgctaggcaccactggtgcccttcaacatttctcataaatatacatatatatcacctcattcattacaattgggcactagtggtgcctagcacccttaagacgtgttaccttacaattggctagcgatacttcctaaaagctattatattaaactatatgagactcaatacttaattagaccaatagcgatattgacacgtaagagggtgtttggcaccttagcatttctcatatcacctgtactaattaatatgtgatgcagagatttaataagaaatttatactaatatgatacttatttgttatttttttgttgtattttttaaaatttaaatttttttatagcatttgatatattactaaatttaatataaaacttatatgtttttgtttctagttcaattagttttattgttttctt

SEQ ID NO: 26544 - DNA, 2933 bp, Cannabis sativa
  modified_base (37)..(43): a, c, t, g, unknown or other
  modified_base (1148)..(1151): a, c, t, g, unknown or other
cataaataacagtaatgaattatttaaatagctatannnnnnntcataattaatcataattaactgaaaatttccaaattaactaagcgggctttacagttaaagtcatatttaggggttttaatggatattatttaatacttttttatggtttaatgcaattctaatttttttttcttaaattatttatgtgaatctatttcattcgtatttaatgcttataattgcttgatcaccaatcatttgtttatgatttcaatgtaaaatctaaaaaataaatattgattatgctatagtgaaatagacatagatttcgatattggacgaaagtacttgtatggtctatgtagcaattaggatttctatatgtaatgcaaattatatgtgcaatttaccatgaaagtgtatgattttttcatataagttaaattctatatgtcctaataagaatatagattaaagtagttaatccgctatcacatgaaattagaataagaattaaaataccatagaagtataggatcttttccatatgatttaggttctatatgttataataagaatatagattgaattttaatttgctatcatatgaaattgaaataggaattacaattatattaggccataaaaaagtattaaacaatatccattaaaaatcctaaatgtgagtttaactcataattgtcattctataaaaaaattgcaaataacaattaaaaatataaaataaaagatagaagagaaaaattggtaaagaacaatagttgtgattgaaaaatctcattttttttttctaatttccgtgcctaaaatttggtagcgtgtcgcggcatagtgctttcaatgtcgcgacccgggtgtggctattctttgggcagcgagcttcttggagcgatgaccgataatatttggtcataaatctttcaatattactcagaattggacgattcaagatattttggaaaggtgaaagagagatctagaacttttattcacattttttttttcttgaaagtgaacgcgcatcatagtcaaaaattagcttgaagttttagacttgattttcaattacaaatgtagcgtgttgagcattcaaaatttagaatttttcgcctattattgttgaatatacaaaagtaaatgannnnaactcattgtattgattgagaagagcagtgctctttatatacaagtacagtcttgaagttagttaaagaaaggcttaactaacataacagaaaagcttaactaataactaactctatctaactacttaacatcccccctcaaactaagcatggataaagaagccaggctgagtttgtctcgtaaaagcttgaactgaggtgctgagagagccttggtcagtatatctgcgacttcgtccatagcaggggtatatttcacatgaagaagctactgtagtatccttttacgaaaaaaataaagatccaattcgatgtgtttagttcgtgagtgaagcacggggttagcagacattaaaactgtactttggttgtcacaccatatggtggggataggaagttgagtgaatccaatttcagcaagtagggactgaagccaaatgacctcggcagtggcatttgcaaggcttctatactcagcttcggtgcttgattgagagacagtcttttgtttcctagagctgcaggatatcaagtttgatcctaagtatatgcaaaaaccagaagtggacctcctatcatcaggatcggaggccaaatcggcatcacaaaacccggttatattcaatgcagtacaaggctttaataggagaccatagtcgagggtccctttgagataccttagtatctttttcactacctttaaatgggactctagagggttatgcatgtactgagagactttgttgacagcatatacaattttttggtctagtaatgacagcatattataatgctccaacaatgcttctatattgcttaggatcaatggggtcactgttaaaagcagacaatttttctcctctagtcataggtgttggcaaagggttggcattgtccattttggctttgcacaacaagtcagtgatgtacttcttttgacatagatgtaacccgattgagagttggtgaacttggattccaagaaaataatcgagtgtgccaagatcctttacataaaactgagcatggagatctttaataagagagctgagaacagttggtgagctacctgtgaggatgatatcatccacatagaccaaaagaaatgtggtgtgactttcagtaatcctgaagaagagtgagttatcggctctggcagaggaaaacccaaaagtcttgagagcacttttgagtttgtcaaaccaagcccttggcgcttgtttgagcccataaatggctttgttaagcttacacacaagttcaggggactccttttcaatgaaaccaggaggttgagacatataaacttcttcaactaactccccattcaagaaagcattgttgatatccaattgcttgagtggccatcctttggagagagcaatagtaagtatgacatgaattatggtaggtttaatgactggactgaaagtttcagtgaagtcataatcatattgttgcaaaaaaaccttttgcaactaaccatgctttgaattgagaagttgaaccatcgatattttctttttccctaaagatccatttgcacccaatggcttgttttccaggaggtagaggaaccataacccaagtcttgttcctttttagagcataaatttcagagttcattgctgcattccattggggggattttaaagcagcagctacaataagtggagtggtagagaccatgagagctttgtgtttgtaagtaccaacgttagcactgttaggctatttttagtctaagtttcgggtcacattttatagttgtttttcttcttt

SEQ ID NO: 26545 - DNA, 3191 bp, Cannabis sativa
tcgatttttgtagttaagtgttacaaacggtaaaattcaactgatttagccgccaatatctttttttttttttttcaatcacttactaaatgaactctggctctctctatatttatttatatgtatattttaaattatttcttttacacctaacttatcatattattaaaagaaaaattgtataaaaataagttaataatattaactcattgcttaatttattttttggtaagctaaaatgatagcgagtttgtgagattgctaatgacaacaggtaatatacaatgttgagaacaattttaagaagagtgttatatgaaccatgtcaggctttcattacaaaaaaaagattttatacttacatatcaagctgacccgttggtacatctacctttttatattattcatataaaaattagtaatattaaaattttttcaaactttcgccacgaagtgcgggttgtttttaagtatagtttaaaaaatttcacatttaaaattaagttacaaccatcaatcaaaatatttaatatactaaatattttataaaaggtttagtaaagagttcgaattaaagaagtttatactattgtataaaaattaattttaataaatacctaactatatcaagaacacataaaagtgctgttcatttaaaatgtaaaataataattaccatcaaaaaattatcatatatttaaaaaaatattattataacaaatcatatgcatttctcacataatattatttcataactccaagtcggttctaagaagaaagaaaatattggtttggaaaaagaagaaaataataaatccaaaattagtgaagaacaagaaaaacataaaccctaattatgcatttcagggttggaattttcaattcaattaccttcacccaaatccaacaactgtgatatttcaatacagtctttgaatattcgatcggggaagatgaagaacgaggaggaggaaggtaaagaaaggaaggaaaatccatggccgtcttcgtcgtcatccccaaacaagccgtacgaggaaaaagagggcatgaagctttggggagttttactcttcggattagttggcgccacagccaccaccttcgctgtcggtcaattgcgaagaactgttgattgggtttactctcagttgatgaacagatcatcgcaatcatggaaaggaggaggaggaggcaaatcattccgatcatcttttcaagaagaagcttggaaaaaatacaatcgtagaatgagagaggagtacgaagaagaaatggagagagtggaaaggataaggcgtatgcagaatgtgttcaatcgagagaggaataaatacagaaggggatacgagagttggagggaaaatgattctagttcttatcatcaaagtttccagagagatgattggtactggaaaaagtctgatacttcctcatcatcttcttcatcatcatccagagctagggctaataattacagggaagctccaaatgttaatgttagctactcattatcacatcattactcggtgttgggtcttgataggttcagagcaaagccttacacagaagctgagatcaagactgcatttaggagcaaagcaaagcaatttcacccagatcaaaatcaacacaataaagatgctgctgaggccaagtttaaggaggtaatgacttcttatgaagccataaagaacgagagaaaaaccatgtagtttttgtatattcattttgatgcatattgaggctatatttcatagttacataatagtaccagagtaacatacaataagggtgggttcaatagaaattttgaatcaaatattctcaatttatttatctttggggaacagtgttcaccagaatcacacactgtactttttcttcttcatcaatattttttattgcttactaattttagaagtaaagctattattccaatatttgttctggaattgataatggcactgttttttctgttttaacttctagcattttgttcaagagtagttgcagaaagtaggttattagacaattcatgttataacttatatctagtgaacttatatttcacagtagacctcatcatagtggaatttaatcttttgtttgatgctgtgaagtcatgtagagttagctgaacctgaagatgaataatttgatcatctgatgggaggcctaactaatcccagcacagaccacagaataagcatttatttgtctagttcacttgtttctacaagctagaatattctaggtctggagttccttctactgcccattgatccccatcacttttcttttgggctacactcatttagttcttgttagcacatatagtgtctgttcaatgtaatatccagactttctaccatgcctccccaatctgtttcaaaagttccggtttttcgattcagttcttccctgaattttgatctggttacgaaccctttccctcgcaaacaatatggatgaaaggtgattttagcattactctcactagtgtgaatgtgaggatatcccagtgttatcaactgaagcttgttttttatgactgtacttcttaaaggtcaactttcatcaagctaccaaagttgtatagtaactagaactagaagtctgctcttaactttgtcattttctcctggaatttgtgaatccaaataccagtagcttctatattcgtgcaacagattagtttagtttagtcacaatggcctaatcttctagctatacataccacaagtatttctataattcaatcatctcatactttctatcatacccttgtttatcagagcactgtaagatgactagttcagactgatcccgagttctcccatcttcttccatacaatggaagctggtctaaggaaactccatctcccaaacttcctctttaggctttagagtaatatcactggcagtcatttacattgaataatccaggaatcactttctgttgctgcagagaagccataaagcaatgatatgtaattacctctgtcgaacagcccttgttaatcattttatcaagcaccttggagttggatatctttggatagaagaccaacgccttcaaaaagaccaaaagcaagaaaacaattaaaaacaacgagaaaacaacctcacaacaactataaatagagaaaaattttatttacacctaaaaatttctaaagacaccctat

SEQ ID NO: 26546 - DNA, 2523 bp, Cannabis sativa
aaaaatatttgacatctgtcacatatgtcttgaaatagcgcacggtaatatttttttatgcactttgtcatatctaacaaaatgatgttatcttcatgttacagattgaaaaacaagaatttggattgaaacctatgaattgccctggacattgtttaatgtttcaacacagagttcgttcttacagaggtaaattgatagtagtttattaaaatagcttctcaaactaaatttagatataaaattttaataatatatatgtgtctgatgagtgttttggctctgtagaacttccgctccgattggctgattttggggtattgcatagaaatgaggccagcggtgctcttactggtttaactcgtgttcggagatttcaacaggtacttatccagattgaagaccactattaggaatcattattctacacattttcctctaatcttgtttttcttccctacgatgatatgtatgagtttatatgtgcttgtcagatcccattaacacactgcacttaaagacatcatattatgtgttttctggcatgaattgtgttctctgtgttcaaaaatatatgtatatattttatatttatatgttttattattttcttgtgataagttcaagtctaaatgttctgcaggatgatgctcatatcttttgcagagagtcccaggtgagttgaattgaaatagcgtatcaagaatcatttataagctttgtggtgctcatttttattttacttgtttgtttctcttttcagataaaggaagaagtgaggggtgttttagaatttatcaagtattgttacaatatttttggcttcactttcgatttgaagctatcaacggtatgttatcttatccttgagtgaactatgtggacttattcatatatccatttttacagcaaatactggttaggaatgtggtttgctcccacaacaaggttttaggttggagtccctcttgggtacccacatagcaatcgttatattttcttaatctccaaagataaaccactaataccttcctcgttggcatgcactggggaaacactctagcaaacattgtaggtttatgtggtcatcttaaattcaaaaaaaaaaaaaaagaaaaaaagagaaatatagtttgccatttccactaccctgcatcttcctcttctcttttttccactattaactttttccacctgtgcccgggattctattgtcttggctggaataaaatcaaagtgctagaatcattctatattcaatgttcttatatttgttttgattttaaaaaaccagtatacacaatatctgtattgttttctgctatagaggccagagaaatacctgggagaattggctacatgggagaaagccgaggctgctcttacagaagcacttaatgagtttggcaagccttggcaggtagttcctctctctctctctctctctctctctctctctctctttggagctcaatgcatattatttttaatgctttgcacagatagatgaaggtgatggagcattttatggaccaaagatagatatcagtgtatctgatgccttgaacaggaaattccaatgtgcaacattacaggtttgtgatttttattttttattatttttatataatactccctgttttgacaagtaatgtggatggaatcataattgataatttgtgtggttgcagcttgatttccagctacctgctcgttttgagctctattactctgcagaggatgaagcaaaaagggaagtaccagttatgatacacagagcaattttaggttctgttgagcggatgtttgctatactgctggagcactacaaaggaaaatggccattttggcttagcccacgtcaggcaattgtttgtcctgtgtcagaaaaatctcagccatatgcattaaaggtattttggttgtatggcttgtggcctccattggctggatcctattgtagaagaaataaattttgactttcaaattttgagtttcttaagatgaaaactttttgctgttaacgctgaacgcctacgtggaaacagaattatttaactgactaagttcatgatctgagctgggccgagtaggttgcttgatttagccttgagtatgaagtttcttgttagtcaattgtgaacctagctaggtgtcttgatttgggttgctaacctctaactgtgttctgttggacctaagttatctgtgagttagaatcaattcctagtttaacggttgtctaactttgaagctttagctctgaaaatttcttgcaatatgatcttaagcttgaataatttgtttcgttgtactttcacaataaatgtaatgttgattttgttcttttgcataattctaggtaagagatcagattcatgatgctggttattatgtcgatgttgatacaactgacagaaagatccagaaaaaggtatagatttaaaatcccataccaattttcaaccaatttttcattctgcatttattatttttctgtgatatgaactgtaaggaaaatat

SEQ ID NO: 26547 - DNA, 2498 bp, Cannabis sativa
acgtgtaatgatagatttgaagtttatccttttttttaaaaaaaaaaaaaaattaaccaacttgaagacaacttttaatccgaatagatgcagaaaacgtaagcagttttgtcataacatctctacattggattattattaagttttattttgagaaaaactcaattcaagatactatttagggacttttttatttttacactctaaaacaatttttttttttctatttttataaaattccacatagaaactcctataacaactaacaaaacaacctaaatcgcaactaaaatttgtataacaacctgcataaaaactatcggaaaaaccataagagaaacccaaactgtaaatttgaaaaaaaaaaaaataaaaaaaatactatatgggataatttctctactatttagtatttagtattattttaaaaaatccattaattaatttatcatttaacaaaaaaaaaagtacagtaataatttttacaaaataaagtatccaaaatgatatttaaatttctctaaaaattaaccttcaattttataggaatattaccctagggaaagacgaaattaaactagttcatttactctgcacaattacagaactaaaatatggaaaatattctgtaacataaaccctatattatatatatatatatacatcataatataatataatatttgagaaaggaaggttgtatatgatactctcagtaactctctttgtttatgtttttctccttttcctgtcagactaatgtgtctaatttacatgtacagatacaatcttacacatgacactgtcttccctactttaagtaattaacaagcacatcgtacaaagtaaatttcagacattgaacaccaaactcttattatttcaattaccatctgtgaagtggagttcatgatcataaacaaaaaaaaaaagtataaaaaatagctttcatagaacgcttcttatatcttataaacagtgtgcatatacaatagggaagagaaaagattggaacaaatgaaagcaactatgtcgttagaaactgtagagaaagagatgcacataacactagtattgcttttttcttaaaaaaggaaaaatgaaaaagaggctgttgtgttatgagagtttggaagaaaaagagaaaagaaaaaacataaggtttattatattgggctaaagaaagaaagacataatagtatgtttcccatgttccaacagagatgcattaaatcatgatcaacacaaaaccaaactaaactaatataatccaaagaacagtataacaaagacattattgagacaagacagcccacttaaaataatcactgtatcatcatcatcataaattcattatatattttaataaaattaagacgaaaatcgaattaaaatattaagttaagttgaaacacaaaacaaaaaaaataataataaggagaagaaaatctttgacaatctcaaaatcagatgcatgtttgcttccctgatctgtagaccattgcattgcattgcattgactcaaatcaaatcaaatctcatctccaagtcttgactttcttttttctttttctttttttcccttcttcttaattgattggcacagcacagcctatttcaaaaagaaaaataacaaaggtcagttcaaatgagatactctgttttgtagatatggtttccatttacggaaacagtttccatttatgcctaccctcatcactgaagatgaacagagttgtaacttttgtcttgttaagaaaaataaaatatgataatagcaatgataaatgttgttttcattttctttccagagaaacaaacagcagaagtaagtaagaaaagttgggagtgtacgtagtttcttacctattgagttaaatgaaaaatggaaaatcccaacactgttgttggtggaatcaatggtgggtagagtttggagaagacgaagatgagggcctctccgaaacgacaccgccaccctgatcgttgtcattttggccatcctcgccgtgaattctggccggaatgcagaacgccgacaagccatccgatacgaaacgtgttccgaaaatggaggaagaagattggtgaatgggttgtgatctttgggaagccatagctagatgatgatcgtcccaagcccgaaccaatggtgaaaaactggactgaagggttcccctctggttaccaaacgacgccgttgagccctgacccagcaaagctgccggggctaacgattgcgacccgaaatcgtatccgcctcctctgttgtcgcccgcttcgctaccccacggaaccattctctggtaactcgacccgaacccggccgcgaagagagcgtgttgttggtggtggtggtcagtttgaggcgcgtggtcagcaccgccttgggaagactggtcatgatgagccataccgtggtcatggaaggagtggagggaaaggccgagatcttgggtcgggttagctgttctctggataatgtcttgtgggtatgt

SEQ ID NO: 26548 - DNA, 1963 bp, Cannabis sativa
gaaatctttaaccggaaggtatttagtcaactccaagttctttaaaatatcctgatatttttaaaatcaacttatctcaataatcctatcaatattactaactaaaactattgtgatatttttggcctccaatccggtctctaaggttgctgaacctgaaaaatatttttatttcacaaataacttacattatatccacatattccaaaaatctctataattgataaattacgcttatttatccatttatagcaaaatttattttttatgctaaattaggttagcaagatcacagtcctactcattgttacctaattaacccataatataatcataaactctaattattcataattaggttttcgagatattacaattagatccataaccattctaactatttgagcaatactaagatgtctccaaattcgtttgataaaaccctcaaataccgtagtcagagggttggaaccaagaaccatatagattacagcagagctccagtttgatgtttgtattttcacctctctaacaatatgttctttgaaagaaaatttagaatcacggtagaaagacttaccctcggtaaatttcttccattgattatgggcaatagcttgttatcattctttatcataacaagatcacctgtttagattccttaggccaactttggatcgctccagttcttggcgactcctgcctctccttctccacaatctctctagatcgaataacatctgccaccaaatttagaccagaagaattctcaatccctccaacacttgaagcagtcttatcgcacttcctttccgatgaattttggccagtagatctcgtgattggctttcaaactacttttttctacttcgccatggaagagaaaaaattagggtcacattagtcttttttattgagttaaaaaaataattttataattatttttgtctattttatcaaaatgtatcaataaataatttcacattatattagccatgttttacattgacaaagaatgaaagaggagcaacggtcgttaagaatacatgtatatgaatgtgttgatttcaagtggctaaataatattctgctgcacagaaccctatacatatataatagaatctgaggacatttcttgtgtcatccttaaggcataataaaatttgagtgtaaagatgtaggcacccaaaatatgcacacaaaaaattacacatagtgaagtgacagattttttaactaatcacatttatctacattgagaccattgctgtaaaaaaaaagaaaaaacactatgtcagtggcgtaatgttttagtgcttttagatgcacatatatatcatcacttaatcataacttataaagccactgttaaaaaaaaaaacaaaaagccacacactagccactgtaaagggaatgttttactactttgagtaggtctattattaaaccaggccagaagaggacaatgcatttatctgatttgaaagcggaatgagattcttcagaaagctttttcaaaagatagaattcgggttttgtgggggagaaaattgtgttgtggtattgatccttatagatagttaaggaatttcatcatcatccaacttggaaatataaggacatgactttacatcaatgttaggtaataaaaggtaagcttatatatctacattttttatcctacaatacaaatgatatttatatgatacattatacaaggatccttcagttattatttatttatttttattataaaaaaaatcagttttggatactcagtttcaaataattacaattaagtttatctacaattaacacacttttgtaaattgctaaaaagaatgatactattttgtgagtggaaaaagtatgtaagaaaaagagaaggaagagtctaaactattagctaaaggtactatttttttatatctcaattcacagagttttatttacaattatttaa

SEQ ID NO: 26549 - DNA, 2944 bp, Cannabis sativa
taaacgtacaacaccactttcctttatgtataattttaaaaacaaatcgtatttgttttccctttgaactatggttattgtaaaattttatccttttaaaagaaagaaaatagtatacctgaaatggcaagaacttcaccaacttgttcacttgaataacttagccccccatacttcttaggactcacagcccataatggaaaaatcttaaattgtccaaaagaagatttaatatttaataataattgaagatattattgcttattaattaatattaattaatgaaattaataatgcaataattttataagttgatttaaatattacctctaaataagtcatgttatgaagttggaaaacacaatacaccataatagatgacattagaggccaattcttgtgaagactttgtttttgaggacatttttccaaattataattttctttattgggatcacatgatgatccactgtttgacctctctttctcttcatcatttttattatgaaagtgaagtgtttcctgtaattaacaaatatatatatttatatatataagataattagataacataacatgtaattaaggattaagcatgaaattattaattttaattttaacataccggcagccaatagcacaaaatagttacacccaaagcaaatgttgatacgaccaagcaaggcaaaaaatatggaaatctgttatttcataattataaggttaattaatctgtcattaattagaaatgagcttaattaattagtatcaaaaaaatatatcttggaaaagccattcttacctcccaaatacagattctttggaaaataattttgggaacttctctgcaggctgtaataattcaatttaatgataattaaaatattaaacacaaaaataaataaataaatcattgtgtgtaattagatccataataaataaatagaatatatgcttattttattgtgctgagataagcatattctagcaaatacatgtgaaaaacctttctattttaaatattaattaattactaaacaatattaattactaactatttttccaacaaaataataagaattaatttgtaattacaattttttatctgaacacatttttttattttcaaacataagataattactactagaatgcacatttactattacagtttacacaacaaaacaaaaccaaggtcaagccgactaaagtaggttaggtgcacgcttaaggcccatccagtcgaggggcccaaaaattaaaaaaaaaaatacacataccttttattaatttttaaaaatactatattttttttttaagaggattcaataattttgttgctacctaaggtccaattaatcttaggatcatctatttaataagaatagaataatttttaaacacaccctaataacatatacctgtgcaaggaaacctccaagagctggaccaattactaatccaattccccaagctgtgctactctgaaaattaattattctttctcttatataacaaaattgttaacaacacttaaaaaataaattatgaaaaaaagaagacacaacttcttactattgacattcccaaagcttggtattctttacggcaaatttctgaagcatatgcctgaaaaatagcatgatttatagcgtttaattggctgaatgaaaatataagaatataagaatgaaaataggaatagaatcaaattttaaatatatataaaaaaattgataagaaaattattaaattttttctcatttttgcactggaaggatatctttccttcaattttcaaatagaatagacattctatcaaaataatataaaaatcattctattgaaataacattcaatactttaaaatgtaaccaaatgaagaaatgtaaccaaataattttcactggtgttttactagtattttttagttattctaatgttgttttgagttcatctgttttgtgttttactgatgttttataaaaacacagtatttttgaaaacttttccgtgtgacagtatttttgtaaaagtttacccaaatttcagtatttttgtaaatttcccttaaagtttgggtctaactcacataaacacaaaattagtgggcttaaaagtttagtgtctatctaaagagcatgccttctatttagaattatatttctgtcaaaatttgaagaaaaaaatgtgtaaataatgaaatgaaactacaaacaaaagaaagtgtaaagcaaagattgaaaaatgaaaataaaaagatgtgtatttgaaagtaatgtatagtaccctcattggtccaagaattccacataaacttccaagaagaaaccttgttgaaattgccatccaaaagtttgtactaagcccaaaaagtgtgttgaaaattaccctaaataattaaattaatcaattaattaatacacattaattaattaattaaatggttatttaaagagatactaacactgaaattgtgccaaaaatcaagactggtttactacgaccatatcattccccaaaaaatggaagtaagaaatctcccaaacatgaatgcacatcctatttcatttcaaacacacaatagaaattaatattatatcaaataattatactaaaattattattaattaatcttttaaatacaaattacagttatatatgcatgctcacctactgcaccaacataataaccaatatcttcatctttttttgctataccaaaatcccttatctaaaaaaaaaacacccaacaattcattcaaatcattcatatgaaatttcatcatcattaacaaaaacaataataatatataaattaaactcaccatgaaatagagaaatggaaacaaagatgatattggtaaagctgcaaaattggaataaatgcaaaaatgaaattaaaggttaaaaaaagattatataaaattttataggccggggg

SEQ ID NO: 26550 - DNA, 1272 bp, Cannabis sativa
ggcataacatattataaaactattatgaataaaaagaagaaaatgaagagaaaatgagagaataaataattttttttttaccaatttattttaatagaataagttaatgaaataaagaaaaatacaataaaatatttatggtgataattaattttgtaatttatactcccatatatatatttagtaattttttattcataccttttcaaattattaattaataataatttaaaaaataaaaaaatctatttattttctaaccaattttaaaaacacctacttaatttatctatatatttatgcataatcactccattcttttaccttatttcttctctttaaattatttcagctccaactttttatttaaattttcatggatgaatatttcctttcttttcctttatagtttatcatatttttcttttgataattcactgtatttttatttcctttcctttaactttaatattttttttttcttttattcttatcgatgatgaaagtatattattcaattcacatacttcttttttttttttgcaggttagtttaatctaagaacttgacactttatgttgataatgaatcttaattacttttctttttctttttaatattaactaattctcttaaaaaaaaattctaaactcttttattattcaaaatatatatctctcagtatctaaattgttttattattgatctacattaaatatggtgtatttgtgtgttgcttcaaagtattctttccaataatatatatatattttttttgaagataaagtcttgtaaacaaaaacaccataatacaagactaactgaaaggcaaagagccattccaaaggaactcactatcaagcccaataccccactttgcaaccctatgagcaatagtattaaactccctattaacatgagccagccgtaaagatgggcgaagagataataagttcttaatacaaacagttaaatcatcaacagaactataaccctgagtgctggagtgaactttatcaacaatagatttgcaatctgttttcaaaacatccacaggcaggaagatagaatagacccattgcaaagcatgcaccactgctttagcctcagctaccatcggtgaaacacatcctgaaaaaggcttagccaatcctgctaccacctgaccagaatgattaataacaacagccccaatgctatacttctgtctattcagatcaatggctgcatcagtgaaaatctggaaatctccttcagatggaagctgctgca

SEQ ID NO: 26551 - DNA, 2247 bp, Cannabis sativa
agttataaattgttggcattcactattttcttttaaaaaaattcatttagtattgcccacggttgtctaccgttggcattggtttttcccaacgatttttttgctttagttttaaattgttgggaaaaatctccacttacttttttcaacggttttcataattgatcctcttattaatcgttgggaaactcaattttatagtagtgttgttttttttttttttttgaaaagagaatcaattttatctatataacacaattaagaattacacaattagataaatacttttcttaataaataaatataatataatataatattaagttcttgagtgatgatcaagatgttttgggtagtggaacaagaaaaaaaaaatagaaaacagagcagtcattgtttgacaaagatatagaagaagctacttatactatatgagtataatacagactttaaggaatataaaaattattatattgttgaatggttgttattacattctacatgtgtggaaagaatctacacaagatggacgatccaacaatatctgacactgtttgattaaatatattaaattaagattaagataaccattaatttattattgtaaatcttcattccaagattcgagttattgcgtagtagcgatggatttgataaatgataggaacattcattccgaattatttctacgattatatggatatatatatacactagtggggagtcatgtcttgcatgggctgccagtaatttccagttattcttttattaaattataattcatatgtaatatgtattttaattattttataaaacaattataataaaattttatatttatagttaataatttttagattttaaagttaagacctagtattgatcaaaataatttactataaatataattacgaatataaaaaaatatagcattaaaatttaggaatttttttatttttacactttcaaaaatcagaggatattgagtctaattctagtgaagaatttgttccaaaagaacaaccctctgctgatgattctagatttgaaagtgaagtgcctgaaaatgatcctatcagtacagaactagttactgttcttgctactaatcaacaaaaagacaaagaaaaaagacccactatttctccaattagttctactcttccgcgaaaaggaaaagaccttctggtattactcttgaaaacttcaagtctcattctcattatttttgttacaatgatcatgctagagatataaaattttatgagaagagaaattttactgtggagaaaaaaaatttaatgttatttctcataatccttttggggtatagaatctgctaaaagaaaaacgatggatggatacattgatcggatttgatggttatgtagatcgtattgtcaaggagtattatgccaatataacttatgagagtctcgatgaggactcctttatgttcggaaaagtttttgttaagtgacactggtattcttttattgtgaaggatgtgtggctgaagctctcaatctaccttttggaattgagctagagtagaatttgaatgtcaaaaggtgttcgggtttttcactggtgacaatgatttggaacacttgggcacaatgcacatgtctcaatttacctatcatcatgctgcccttatgaggtttgccctatccaacttgtttccttgctccgatccagtaaatgttgcaaatgaatttgctttctttttgtataaagtttctactagtgtaaaaattgatttgacttacatgatttgggagcaaattgtctctcttcgaaagagcaagaaacttaggtctaatcttatttttcctcacttgatttataagattttgtctaaccaaaaggagttgattcttgagaatgaatccattgaaacgtctattgttggtaccactttcaaagtcccagaaaaatctccccaaggaaaatctgctaagaaaaaggctcggtttgcttcccttagtgctactgatgaacctgctgctccatcttcctccacttctgctccaacagaattggctgaattcaatttgtgtttgggaaggatggagactagtcaagctctacttctcaagaggatggacatcatcatgaaattcttccactctaatgatgattaagttgttcattttttatctttttgcttttcatctatgttttttgttgaattattatgaatttgtttattttgtttgttatctttggctccttgatagacaa

SEQ ID NO: 26552 - DNA, 2277 bp, Cannabis sativa
tggtaaaataatttccaacaggggattggttctccagagggttatatcaagtacttggggcttcccctgtttagatcaagataaaatgatgctgatttcaacttcatcatggataatctcactactaagttgcagagctagaaagtgaaaatattatcaaaggctggtcgtgttaccctcattaaatttgtgggcctatctttgcctatgtatactatgcaatccaccaagctctcaaatcgccttgttaacaaaattgatggtttggtgcgtgatttttggtggggttttgaaaaaggtaaccatggacttcaccttaaagcttgggacaagttatgccttcccaaatcttttaggggtcttggtttttggaaaactagagaaatgaaccaagcttttttggcaaaataggggtggaatcttctgaatggttgccaatctttgtgttgctagattctggaagttaaatatcttaaagggaaggagttccttaattgtagatataaagattcagattcttagttttgggaaaatgtagtaaaagccaactctatcttaagaaaaggggcctgcgtattggtggttgatggtagggatactagtatttggggggacccttggatccctcatagcaaagatttttccccgaaaccaaatggcacatttgctaatggtttgagcaaagttgctaaccttttgttaaacactagtgattgggatatcagtaagttaaacaacctctttgatcaagagactatctctgcaatcttaaaaggtggcaatccctttggccaaggcaaagataggtgggtttagactctggaaagtaatggtcgattctcgtgtaaatctgcctaccttacccaagccatggaaagggctcctcactgtgaagttgttccgtcgctctggaataagctttggaatagtaaaatcttggagcgtcataaggttctcaggtgtaccctgtccaatgctctccttgtccaatcagtgatcagaaaaagatttcatattgaggatttgagctgccctctctgtgggtttgtggaagaatctgtggaacacttatttctttcctgtgatgtggcttatcatttatggcgatcgtctctctggggtatttatcctgtttgtgatactggtattcacatgtgggactgggtcaaattcatttgggacctaaaacataggggtattcttattgaggacattttttggtatgcatcgattgttgttgacaccatctgaaggactcgcaatgacaaggtacacaatagctgtcctgtaaatgtgaagaagtgtattgactctatttgtacttcttttgcagatttacatgcttctttgttcccttgcttgccctgctccgtgcttgacggaggtttggactcctcctccgtaagatcaagctaaattgcaatgttaaagtaggcctaaaaagcatgtgttctgcagttgtggcaaggaatcatcttggtagggtgattcgggttcaaacgtcttggttgaatttttctaatgctttatgtggggaagtggcggcctgctgtttggctgtgacggtggctatagacctcagatccaagtttgttattgtggagaatgactcgagggtagttatcaatgcttttaatgggaaggagtcccattgggtaattgaaaagtatgtctcattttgtaataagtcttctccttcgtttattaattgtattttttctaaagttagtaggacttgtaactttgttgtccataatattgctaattaaggtctagttgcttttcttaaaaagaaaaaaaaagatatttaacatcaatgacccacgttccctagctacttttttttttattctttcattctctgtagttctcttttgaagttttgaggatgaaacccaattttcttaaaagaaagaaatatattattgcaccgaatgattgacaaattattggtatacctcagaatagtcaacaaaaaaaatggtatcgattgagtgtaacacctgtaagaaagctattacaagaaagaatcacacaaaagaaaaaccttattatagtttaggtttaagagacgttttacagtgttgcagaatctatggtaagatatttattagcgttcaaaatgtaaaatctacaccgttaatgagaggaaggaggatcatcgatatagggaaacgcgcccaacacgcgttgactccatagtagtgacatgtctgccacgtcaccaaaatttgtgcaatcccaaaaaatggaaccactctctcattggacgatact

SEQ ID NO: 26553 - DNA, 2737 bp, Cannabis sativa
ttattatatattgaattttattttaatgtaattaggtacaatatttaaaattcatatatacaaaacttaaagtcataatatataatatcaaagtaataaaattgaaaatataaaatttaatctatcatgaaggattgtttagcatatcatcacatggatgaggttagcacttagcaattagtaattaataaataaaaaaaatgtatggtaccaattttttttttatttttatttttaatttgttggtgtaaaagtgattcaaaattaaagaaaattattataaacattattgagaaggaagaaagatcgacttgtctagtatttttagtctagctagctaccactaagaataatactaattactaaaccggccactttaattaaactaaatatcatattgttaattgtatgaatattccatttaaaaaaattagatgaaaattaatatatttatgtttaaattatactctttgtatttttcagctctcgttacaaatatttcaaataattcataatgttataattaacatattcgtcaagttttttcttggtaaacaaaataataatattaataattatattctgtttaacacacaaaacttgatagaaataccacattactacattgtaaatagtttgggaatcattttaattagtagattgaaaaattcaaaaaaacaataatacaaaagtaatagtttagggacaaaaaatctttaaaaaaaaaaattaatgactacagttactacaatatttttattctatttatagatgtatatatattgttatataattattttgtgctttcaagaaaaaaagatattattttttatttttttaaaaaaaatttactgtttgagttgctcatacagattttggttgtgatttaagttgctctattaattgctataataatttctgtgtgaaatttcttaaaaaaacaaaaaaacaatttttaaaatgtaaaaataaaaaaatcataccaaaaaatattttagtgagtttatatataagataaacaggcatatcatgtgactcagcaatattcccacacggtttttgtgagcatatatattttatttgtttttggtcaccaagttaatttatatatatttttagtataacttggatattatattattatgttatttaagttagctatataaaatttatgatagcatatgagcacatggtgtgtgtatggttgatgagagtttgaatgacactaacaaaaaagtctttacttacatattttttagttgcacatcatgtgtaattgaatagccattctcctacacataatttctatgtgtatcacaaacttatatacaaataaattaaagtctttacatataattttaagccgcgtttaattggaagtaataaaatataataaaattgaaattcctttctcctctgtctaggccacaccttggccaaagaagcctccttggcgacctacttttcccaacaacatgtcacttcctcttgctcttctcctttccaataggagtgttgtcaggctcctcaggtgggttacttagagcaacaacaccctcagcaggagggtatagactatatctcctaaagttctcctcacaggccaacgtgcagatgttgcgcctagttgctaggagagataaagtgtagttggccctgtccctcagtctcagtgtggggagtggccaactataagttggtactcaatgaaaaaatgacggacgtcctttatgtcatgtgccataaagtagtttctgccatatcctccaaccttggacatgtctgcatcattagcgctgccaagccactggtagccctactggctaaaatagaagtacccattgattgacaatacataaattgacaacacatagttcatctccttattgatcaagtatcaggctccataagtcaattgaggccggagaggtgggtcatggtcgtgagcaaagatgtcatgttcctcagtcaaactctccatcatcatgccattcgggtaagtgttttagttttatagcacttgctttctaattgttgatggtttgatagtttttttctactaagtatcttctcttcgtctttttaggatgcttttcttatcgagcgttgtgcaaacataacaatgaaattggctctggagctagaaaatatctaggttaagcgagacgccaccgagagcaaaagtatcacgaccctagcggacttggagaagactaagacaaagctggatactgttagaaaggacgtaaagagtaccaaggcaactctagagaaagccaataagaaggccctgcaccaagacactcaagaaaactgtgccatgaaagacaacttcatggaggttcggaagaagaaagtggacactaaaattgaatctaaaagatagacctatctggaggaactaaccaaattgattaaggcagcagaagacttcaaactcagttattgattctggtggttgtcgaatgcgttgctgtggagtgttttgattgagcaagatcgattcaagatcatgagcccttattgctagtagaacttgggatctccagaaaaagtagttgtttcgatctagacgcagaggtggcaaaaaatggtttggtacaacaaagttgttgttgttcgaacctcctggtggtgccgccatggatgaaccttcggctcttgataccaagttgaatattatagcagtagtaggaaagatagagagaacgagagagagtgaaaagaatcttgtgtt

SEQ ID NO: 26554 - DNA, 4486 bp, Cannabis sativa
tattgcaactagcgttgcaacttaaatcacaacaaaaaatcgtataaaaattcctattgcaactctggccccgaccaccctagctacagtcttggccctagacccgaaccttccagccctagtctcagacttggaccccagtccttgccatgaactccgaacccgaaccctggccctagactcggaccttgggctaagccacaaccccagacccaaaacctcagcctcgaacactggaccctaaaccctcccaaaaacctggacacgactttattagaaactctgaaagagaaagaatttttctaattaattggaattaatggaatggtacaatgaagagtcttatatatacatataaagaaaagctaaactgtagaaacagaaaaataacagaattaactaattcctaactaatcctagtaggccccttcaagatggagtgtagaggttgtcacacccatcttggataagatttctttgaagggagaagggaatagagactttgttagtatgtctggaaggttggcttttgaagaaacgtggttcatcttcagggtaccatttattatttttttcatggacaatgtgacaatcgatattgacgtgtttagttctttcatgataaagtgggtttatcgagatatgaatggctgcattgttgtcgcagaatagaatcgaaggaagcttgatattgatgttgaagtctctgagaatggatgtgagccaagtgagctcataggtagcatttgccattactcgatactctactttggctgatgatctcgagattgttagttatttcttcaattttcacaaaatgagtgagcgacctaagaaaatacaacaacctgagattgatccatttattgccaatgacaagttgatttggagtcaaaggtacaacaatccaagtgtgatttttttcaagggcatctattttgacatccatataactgttctaaactttgtatttggatgcttttttaaaggatgttggtttagaagtcatatttagagcaaggatggcaactctgaattgtggtgagaacttttgataggacaaaaaattggcaagatgatattctaaactagaatttttgagaactaaatcacaattgtaatcatggaggtatctggtgtgcacgacctgatttggtggtgctttgttttgttgttgtggagatggattgttgttctgagatggattggtctcaggggtatgttgtttggattgatttttctcaagaatggttggttgagattgatttgtctcataaactatattaggagaagacggggaaggagaaacaaaaacttatcaaatgttatgtgtttgatgtatgtgtgaaaagggatatatattctcataaaaaataacatctctggaatggaaggttttgttggtttgaaaatcaagaagggtgcaagccttcatattgtgaggatagccaatgaagacacatggtctagcccgaggagagaattttattatgttggtgacaaaggaagcatatacaaggcaatcaaagttgtgaagatgtgtgtaagtaggtggcttgtggtgtagtaattcatatgaagttttatcctttaatagaatagaaggagtcttatttaaaagataaacaactgttgttaccataaagctccagtaaggcagtggtaagttagattgaaaagcaagagctcgagcaacatttaatgtgctgatgttttctttcaactacaatattctctgctgtggtctacccacacaagaattataatggaaaaccccttggttgcataaaagtagtaaggttcagttctttagcattgtctgttcgaactgattttatatttgttttatattaagtatgtattaactgaaaaaaagttctgtatggccaaagaggcatctgattagcttttagaagatataactaagtgtgccttgaatggtcatccactatggttaaaaaaatacttatagccttcaacaaaagggatagaatatggtccctaaatatccatgtgtacaaggtcgaatattgcaaaagaaatattattatttgactgaaatggtaatttttttttgctttgcaatatgacaagttcgacaattaaaaggagtagatactttaaaaacttgtaattgtttattaattttattagtaaccattacagatggatgtccaaggtgagtatgccattgtagtttatctaaatgaacattacaagtatgtatggataaactaactttgggagcttgttgttgcaggtagtatagatttccaaagcttttagctgtcctaatcctgtatgtttaagaaaggtcctagatgtaacaattattagcagtaaaacatatgaagttcttactattgtcgataagtgcacttatagattttgaattgaaaatctggcacaaataaaacattgtgagggtgatgtgtgaattaagtgtaacagtaccaactttttgaatgctaacattagtgccattaggtaatgtgacataagtagctttggaattagattgaatggaagagaaaaagttaagatgataacaaacatggtgagttgcaccactatctataatccatgaaagaggataagtaatacctgagaaattattaacaacaatgttgaagcatttgtaaaaggctataattgttgggtcaacatggagataagttgatgacattgagctagagtgagttgtgaattagaatggtcaggtatgatgctagaaacttgtgatgtttgaggaagatttctggttagtggaccaggatctggtttgtgtatgttggtagtagaattgtcattaggctttcgagtaccataaccaagggaaaccaattaggaagtaacatttatccctgtaatggcctgattttttacaattggtacaatgtggacgatgcttttttatttcttgaagttgaattagctgcaggagcaggatcttgaggtacaaaaggaaaagtgcttgctacaacaagtggtggaatggttcgattacccaaagttctttgttatttttggttaataagcatagagaaaactttgttcagtggaggagatggataaataagcaagatttggttacgaataacatgataggaatcatttaaacctttgagaattcgtagaacctgatcatgattatggttgtcctggttttgagcagcagcagcacaggtacagggaatacgaggcctcaactggttgatctcatcccacatagcagtaagcttagtgaaatatacactgacagaatcatctccttgattgagataggttagagtttcatttaattcaaaaatttgtgggccattgccttgattgagtcggttgttcaagacattctacattttagatgcagtgtctaagtacacgatactacttttgatttcaagagagaccgagtgcaaaatccatgaaattactatttggttgtatctaatccaagaatcaagaaggggatcattaatagggagttgcggaagagtgccttcaagaaaagagttttgtttcttgctccaatggaaagcttgaagtcacattttcatggttgaaaattacaatctgtaaaaacaggtgtaactagtgctaaaccaggatgatcagccgtgctgaggtagttaggagatcgaacatcctcataagctagtctgtcgatcagaattgaatgaggaactggtggagcagcagcagctgttcttggaggaatttcagctgaaattgttaatggtggatgaaccttgggagcttcgaccccggaaagattttcatcagtgatagtagctgaactcgtggctcgtgttcgcgccatgattgtaggaaaaagaggagaaaatcttgaagctacaatttaaattcttagagcttcagcttgtgtctactgataacatattagaaactcagaaagagaaagaatttttcttattaattggaattaatggaatggtataatgaagaatcttacgtatacatataaagaaaagccaaaatgtagaaatagaaaattaatagaattaactaattcttaactaatcctaatagacttaaataaaataaataaataaaaataaaatgaaatttacataacaaatttttgtttttttgttttaactataagaatttaaaaatttaaaaatttacttaaaaattttaaaaataaaatattaccaaacagtattttaaaaaattgtattggtaacttggtaggggtaccattggtatttaaagaagataaaagtaaagtttgactagaaattatcaggcaaatatacgatatgcggataattttcatgtttcgagaaatgatgggttattttatattttaagcattaagaaaatactgatttttattttaattttttttgctaaggagtattttattttaatttgtattctcatgtataataaataatataatgagaaagtacaacaaaagtaatgagagagtacaaaaaataaaagatagagagagagagag

SEQ ID NO: 26555 - DNA, 1908 bp, Cannabis sativa
tttttttttttttttttgtggtgggtagttgctcatgttggcaagtacttgcactttttattgttcctttacttcgttcactttggaaatttcaaattccaagtaaagcaaacaagttgaatggatgggtataaaatggtgaacgtcatataaaagataaaattcaacacttcattgataaaattaatttcataagtaccgagtacccttgctattattggaggtcatccttagatgccttctttaatttaatgcaacacattaaaagaaagtagaatccttgttgttacatgagaccaactagagagtcttctttggtcactcaagctaaataggatagttcaacatcgctaaatcttcttagatacttgatttttatgggtgaaggggtgaaagtgccacttaagtacattttcttataagcatcgaggtgtattgactaacagaccatataagggtttgatttgtttcctgaggagtattcactcgtacctttctttaagcatacatttccttcttccacacgaatatacttctttattcttccatagaagtcatctagatcaatcaattctctcttcaacatcttctcgcatagcccacctccagagcatactcttgtagttatggagatcttgagttcatctacctttcccaccttggtagctaaaacattgaatgtagattcacaaactttcttgttggctttgcctcacattggtgatgcttgtgataagcatgatatagttaaatgctgcttgatgttgttggaataactcttctgaaaatttctcctaagatgcaatttcccccggttctagcctcttgaacgatttatacacaaccccttctagcgtgaccacgaagcattgacatctagccttgctcgaaactttcttcatcttcattagctcattaaaagcaccaaggtgatactttggatcggttgtaccatcatttggtgtcatccgcgcctccttaaagtttaatggaagtggtttaatttgaattcccttgagaaagggggatttttcatcaaactcctcatcatcattcaagtctttcttcaaggaagtagctatctattgatgtaggtcttgtatctctgcttccagcaccttcatccttttgctcatcctctctcggggattggcggatagaactttggtccttttttatgttttacatagggcctgcaagaggtactcttcttgtcccatcagtgtgtgacttgtcaccaaagctgaaagggtaaggccttacatttctcttgatttggggaggggggtgccataggcgaggtgcccctagcatgagaccttttgggtgaagtctctccataaggttataaggttattcccacagtgcgaactcctcgtggtggataggctcaagttgtctcacttacccatatgattcttgtcttgcgatgggctcctttcccgctgaacttttagggggctatcagtggatatgcggttgagacaccgttccccctattggtggcttttttattaaaagtgtgaggcttgaatttttcctttgagtatgcaactcaatactttttgcatgccagccactgaagtttctagcctttggttcttccagcggaggtcgtttatctcctcttcatagtagcgagtttgggagcttaagctcatcgagtacattcacatctcctttttgggtccacgtcttgaagtgtgaaggtcttgtgtcacagatggtggatggtgtcacaccagagatggcctccttggcgattgaatacttccgttgacgaggttagacattgatgtcattatcaagtcatattgtgttaggtaggggtgttcattggatcacatccaatggattcgaacccaactgatccaatccaattatttattggatattgaattttgtcat

SEQ ID NO: 26556 - DNA, 2386 bp, Cannabis sativa
taattgattttgtccagattcaatgattataaaatattcatttatcagaaaatcaattatttattttatttccttaaataggaatttatttccttagatagaaatattcttataccgcgagccattcgaatgcgattagactcagtcatattcgcatcatctcgctgaatttgtgtccggcaaggttcgtacgagaggtctctcatcaacatctcagctcttcttgaggaaagtgagtacacgtgtctttttaataggagtccggtctcgaatttcttttctatctaggtgagaaaaatctcactataacattacctaaacacttcattacttattatttgataattagttttggtaaattgtggttagtgtcatctctgctattatgagattcattcttattaaactaggatttctttcgttatttcatacacattaaaaaatatttgtctaaaggcttaaaaaggtattcaggagtatagccctgtctaatttcttgttcattaataaagatttgtaattcaagtctcaaaaaacataaagaattaattcatctggcttttcattctttgataagaagccataaaataaaaagaaattgtacaatcggatattataacgaaattaaaaagcgtttaaaaagaaaggaaatcaaaaaaagaatgcataatatattaggtatatatatatctttttatataaagaagaaattaatattataatgatttgaatgttaacgtcgatgattggaatttagaggaaggagcaggatctttgtttgcattgctttttcttcggttttggtggccgcaaagccacctttattgcagcatcgaaaaccgacttcacattctgatcatagaaggaaattaagaatgaaaggaatcagagctaaactaaacattttcctaaaatgacaatccacatactatgttttgactaaaaaaaattgtgaacacaattcaatgaatctcagaagagacggtattatatacagaactatttcttttttaagttaaattttacatatttttctaggcatggatataaatatttattgtttttggtgtgttgacattttaaagataagattttacctgctgagtctttgagctgcactcaatgtacatgacgccaccaatcaatttccttaattcttctccctgagacacaattaatatattaataatcaagttcaagtatgcccaactgtataagtttctaatgtactattcatgatcataacatgcctgtgccgttgttattactgctgtcccaggattatcaagaatatattgcttgtcatctctcaaatctgcaaacaatacatgtgcttatacaaataagaaagtatattgtatacatatatttatagaaatatatgaaaaccaagttactctataacacaatttcttatatgtaccaagttttgttcccacaagtacaattggcacgttttgcgcataatgtcgaagctctggaatccactgatcatgatgagcaaatcaaaaatcaatgatgagaagtcattgaagattgaataagaacaaaaaagaaatgtaactgtacaaatttgggcaacaaaatcaggaaagctgacctttttggaaatgttttcataactggctttgctgatcagagaaaaggccaacagaaacacatctgctcctctgtagcttaatggccttagcctgttgtaatcttcttgtcctgtaatataaaccatatattatgaactgaatctcacgatatgtataataaatctgatatagttatatgtgtacataatatatatatatatatatatattacctgcagtatcccataggccgaggttcacaatgctaccatcaactacaacattggcactgaagttgtcaaacactgtgggaacgtaatccttcaacaaaaaagagaaaaaccattatatggttagtacggatacactagattatatacatatatatatctatatattggatacaaattcttcttaattgtacaacaataatttccatgatttagaagagtaattctcttgaagaattaatatattattacttggtttatcttttctaggatttactatatatacatatgtgatagaataaattgatataaaaacaaatagataaatttgtaattgtaccgttggaaatgtattgcttgtataagaaatgagcatacatgtctttcccacagccccatctcccaccgtaacacatttgataaatcttgctgtactcattttcttcaaggccttatttgcttgttatagctattctgaatctaatggtatatatttctataaataagaaaagagaacatcatttgaagcatatatatgaaagaagattgggccggcaatagggctagggaaggtgag

SEQ ID NO: 26557 - DNA, 1426 bp, Cannabis sativa
gcatgatttagtacataaataatcgcagaattaataaaattaaatgaaattgaacaaaaattcttaattcaaacaatctcaataatttaaaaaacgtgacttagtatatgttattttaaatattacttttatataatttttttttattgttttcgtgttattattattgttcatgtacgtacacaatgtaattttttttttaatggaattgtatatatataggttagaaaatgtacattcatatccataagtaggcacatgtgatggacgttttgattagtttatttattttttgtttcaatttattataacatttattaaatttgtatatatgactaggtagtagcaaaatactcttgtaacacatgataaacattaatgatttagttgagtataaacatatttttaagtgtcatgtttggtagtatcataaattaggtggtttcttctcttaagatttatctgcctttttttatgcatttaaaaaaagaagaagaaaaaaataaaaatagcatttagacctaatgtgttgatatgatttaaatatattaggacctaactgttataaaaaaaaaaaattccttcaaaaaaaaaaaactgttataaaaaagaattaacttttagaacttaagtaatataaaatgtaaagaatggggacaatagttgaaaataactatcttttcaactatcaacatcaactttttttggttgatatctcaacaattctctcttcgaactaaagactacatactcgtggctcctcctctagcgaaaccacctttgtcgtcgttatcaatttatcactaatggaactcattgcctgaccatcaactttgtcaagaagactttcgatataggccttgaacatcaatcttcatcttgtaccgccataattattagcaggacacgccacctaaccgccacaatatcaagtaaatttttgttacaaggtatcatataaatcttcaatcgcgagatcatcacattgaaggcacatcgcaaatacaacccactatcccagtgctctcgaacttttggctctaatagttgcgccctactctttcaccttattattccgccacctcatcttaacttgcacattagtatgataatgtccactttgagtaggtctcacgattttcttttaagtaatttctcaaaaaatttcatactaatcaaatgggtagaacactttatattcaatgtaacttttacctattcttcaaatgtgagatttaaattgatacccaacaatatataatataggagattatttggaaacacttgtatataaatatataaattaggagtatagtactctaaacttaattatggaggagacatgcatatatggttattaaattcacatcacatgaatgcatttaaagagcatatgaaaaaacaaactctaagaataagatatata

SEQ ID NO: 26558 - DNA, 1333 bp, Cannabis sativa
aattacacagtttcagtgtaattacatggtcaaacaaacatgtcaaattgtgtaattacttctaattacacacaaatccaattacattgtggctttccaaacgcaccctaaatactatcgagtgagaagttcaagtctcaacctcaattttatatctatgagtgtggattcctttttcttcaattttaaatttcataaatcatatatatttttaacttcgtatataaaattaactttaattttcactaatgtatgtattttcttctccatgaaaattgatctatgtatcatcatttgttttataagatttaatttaattagtattaattggttttcagtagtgtacttttctatatccacaacaatttttcttatttttttttttttttgacataaatttttcttatttttagttcaaataatttttttttttaaaaaaaattgaagctaaaaaatattattaataatattaagaccactaaaaaaagtatatttttagtggcaaataccatttcgtcacgatataaatttttgtgattaaatgtaacttttattagttacttgcaactgaaacatagtatttagttacgagcatgtcattaatttagtttgtcacaataagtattgtaactaaaaatttattagtcacaataaattgtgatttttgtgactaatatctttagtcacggataccttttagtacaatataggaatgatttataattaatcataactttttcacttttagtcataaattttgttgtgattaaaaataaggttttttgtagtattactaccaaaaaaaaaaaaaaatcttactttttgccataacaaaatttgtgacaaagtaaaaaaattataactaatgataaaccatcattcctatgttttactaaaaagtctgtttgtaaaaatattagttacaaaaattacaatttgttgtgactaattgtatttttagtcataatatatacttgttgtaactaaaacaaaattagtgacaacttgtatctaaataatatgttttagtcataagtaacttttaattgtgactaaatatcacatttttaatcacaaaaaatatatatcataactaaaaaattatcactgtaatttttttttatatatatagtgtcttatcactataaattttttttactttaagtcacaataaaacaggtgactaaaagtaaaaaaagttgtgactaattattaattactatttccatgttgtgactaaaaggttcatggctaaaggtattagtcacaaaaattacaatttgttatgactaaatgtagttttagtcagaatatttgttgtgattaaaagtaa

SEQ ID NO: 26559 - DNA, 2489 bp, Cannabis sativa
atttaattttatgaaggacaacacattagaacttaaaatatataactagagtgatttattagtagtgaatagacaagatcggccgataactaatctgagccactcataattttgtatttttatagtattggcatacaaaatgatagcaaaaatgatatttttcaaaattttgggcttgttaattaatggaggtttaatttgtctattaagtttcgatataatatttatacaaatgacatatattgttggataagtagctgcttattctcacgttctaggttgtcatatttattttttccgtttttgttttttgaataggttatcatttatttgttaaaccaatatattaccggaaagcaatatgtatttttattagttatcaaaaaaatgtatttttatttgtaagtaaaaaaaaaagagaatctgcactgaaaaacctcggaattacagtcatcactgattttgagagaatttgaaatcaaacattctggaacttagatttggaaacagaataaacgtagtacgtagagcatgtaaattaattttgtagcaggacagtccacacactgatatgatagtattgtatttttttttaaaaaaaaaaaaaatcattcaatttatacaccaaaatatttataataatacacattccacaaaaaataataaaaataaatattccacatatttttatttctcattcttaaaagatctagtaataaaaacttgtcacagaacctatgataacattgatcgatcatctaaaattatcaaacgagacgatagttttttcgagagcttttgtatttcagtcattatgagtttgtgtaatcaagtgtaagtttcaagaaagagaaaattagttaaaaaaagtccttggtgcaaatttcaataggctagattaatatctcaatctcatatacacaatattattcatatctttgtcttggacttttccatgcttattaaaattaaaccaacaacttttgcatagtatcataattataattaagtattgaatattatataacctaaaataataggttttaaagaatatcactaactataattataagataacacctagctatatagaaaatacatagtatgaaaattattgatactacataagaataaaaaacaaatatgaaataaatacatatttaacactttgaaaaaatgtatataaatgcataaactccctgtttaaataaatctgcccaaaattaattgaatatatataatactaacaaattaaactaaatagtgccttttcctcaaaaaaaaaaaaaaaaaaaaagtaaatagtgcatatttattggtagcatttttaaataatccaacatatatcgaaatcattttatccattgattgttatttttttttaattattattggtctgattttcttaaccagttgtcgaatgaaattttataagaaaaaaaatctatcatcgaaccaagaacaaaatttataggtcattttgccaagcagccttattttataatatgcatatttgagagttaatacatcatgattccggcgttacacatactatattaaaaaatattatttgagccaatttagactattatacatgcatatattataaagaagaaaaaggggtaccgtaacaatttaatatataggaaatattacacatttttcaacaaaaattaattatatgataataataataataaagaattcttctacaatataacaataaattaattatagaaaagaacgtgggcagtgtagctttgactagagaaaatgggaaaaattgtgtccttttgttgggagtccactctacaagttggccaagagaagagataagtgtatttaatttttgggtatgaaaatggaaatgaaaactaaggctaggtgttgcttttggtttgatgatgacaaataattaataatatgatataaataagactccatactattatatatatatatataggaggacaacgactacatttataacttgctacataggatagtaatcaatcatcctctcccattcgaccgtcttttgttttgtagtccaaaaaaatacatggttgagagagaagagaagagagggtcaaatgatacatacaattcccctcaaagctcccaagccaatccaaaggcattgataagataagaacgcatgcattcggatcttttcttattaattctttgaaaaagaagttaggaagattattactaatttattactactaattgtggtgagtattgctaacataattaagatgccgctaacatacttattgtgtagtatatatcttataactatgattttttttttttattatgaaatatactaagataatatcatatcttgtgatattttgtgaaatatactaaaatactcttatcatttttcttaccattattgttataattatatctttttatgtttttttgacatctaaacttgaatccatctctatggttacgacaaaaaaatgcaatactaa

SEQ ID NO: 26560 - DNA, 3194 bp, Cannabis sativa
  modified_base (897)..(900): a, c, t, g, unknown or other
cgtaaaaatgcaaaaaaaaaaatgcaaaaaaaaactatttttaagtgtaaaaatgaaaaaaaaccctagtttttattcaaaaattatgttagttaagagtttgggttgctcctacacatttggttgtcaattgagatactccgacaaatggtactccagtaaggcaagggtgtgtgcgtgcgcgtgtgactttgtagagagaaagagagggaagataagggaatgggtttagttttattattttaggggtaaatttgatactaaaaaaaagatgtataatattttgtttaaatgtttaaaaaggtagcatagaataagactatgcaacatatttaagcttgcataatcaaattttccaataagaatgcatgcaacatattgcattatggtataaatatctgtcaagttaattattgtaattttttaacaagtaataaaaggctattaaaattaatttaaaaattaaataataataagttttccaatttagagaaaggaataagatattttagaaattttccctaaaaatatgaataataattttttgccactattgagtatttatataatatttattttacactacgtacaatcaaaaaataagaaattaattgacgtacaaatccgtaaaaaatagttaaagttactttgacttcattgttatataatactcgaaagattttacaatccacctaaattaaaaaggtggaacttttatttattgaataatttgtactataaatattatttaagtttattttttagaagtaataatacttaaattatatttttaaattctgtagttagatatctagttgttcaatattaataataaattgccaagtagtaattcctgattggttcaggttatgaatttttatttttaaaaaaaattannnnaaatatactaataaaaaataacacgtagataatgacttgacatttaatagccagtaactacaaagttccagaaatatataacttaaaatataattattgccaaaaattaaatttaagtatttatttacaaatagatcgttaaacttaaatatttatgttgtaaattattcttatttatttgaatattaaaaaaatatatataatttatatatgctgtaattatttaaaacatatatcctgcaaaattttaattttttagataattataacgtatatatatacgctttaaaaaaattggactaaaaaattattctagatactgaaataaatacatcgatgcatcattataagatggtgcatggtaaatgcaccctatattatattacacttatataatgtatagataattataaactaataactaattagttaattaattaacttatagataattattaattaagtaactaattagttaattaattaatgtgggtgcctcctaaaatttagggctgcgctttacataaattaaagcacaaattttttggacttttgtagtttgcgtagacagatacgtacttaatttgttaattaatttataccatagtaatattcatacatatatatatatttattaattatatatgtattaatttttaattccacacagccacgtacgtatatttaattttgattccaacaataatgtattattgtgtatatataagacataagctataatggtgaaatgaaatacgtcattactagcataaaatatataaccagatcactgattaaatataaatgaaaataacaggtgcatatgcatttatcatgtacctgtagactatatatatttataatactcgttaataattatataaatattatatttgtatgttgatttatttatggaaatgatgattaaagaaaaggttatgaaataatgcatgtatactttatatatggagaagccttattattttaataattgtattctcctttggtacactgcattatattatattttctaagatctatattgtattgtattagtagtatttaatacaatattatatttagtattgacttgtattaattaataataagttgtgtaagattatactatttttaccatagacccacctcgacctgtcaactgaggtcgtcggagtctgagatccgagtctaggactaagtctagggtctggtctgggattgggtttgataccaggttttgggttcgagcttggcctgggtcggagttgggagcgggtccagatatgaggtcgggtctagggtctagagtctgggcctagtttcagggcctagggtccgagttcaagtccaatttgactttgagggttagggtccgagtccaaaaccaggatacggtttaaggtcgaggttaggatccggggttatggttcgagatcaaggttcgggaactgattcgaatttggggcaggaatctaggtccctaatcccgaaccattactaaatattataatacatgttaatacatatcatttgttatatattaaataatatcattcacattgtattaaaatttatggtcgtaataattaatacaatacaaaattttacctaaacagtgttcattgttatttaataatataatacgactcttatatgacttaacaaacaaagtctacatattctatttatatagagcatttatgttatggggcatacctttattaatttgctcctacgcaagtgtttctgttttaacatttagaaaaaaaaaaaattattatattatgtgtaggtatgtacaaagtaattacttatatgatattacacttatttttataaaatttaaaataatttacaattgtgaaaaattggttcaaaataacttatttcatgagcatataaaataaattttaaagtagtttctttcttatttcatacattattataatttattcaaaacttttaaaaaatttataaaaaaattctaattaataattataataatgttatcttataaaaaaataaatttacatatttatgtgtcgaaaacaaattattttaaagtttatttagcaaaacaaattatttaaaatttatttttaatattttaaattattcaaaattttataaaaaaatctaaataattacactatacatggtcattgaagccatgttattcaagcaatttaaatgtgaaaactttttgtagttgtagttaaaaaagctgacgaagttaagaattacaaaaccatagtattagtagattaattattcatagctcaaatatatatata

SEQ ID NO: 26561 - DNA, 5239 bp, Cannabis sativa
  modified_base (33)..(51): a, c, t, g, unknown or other
ttcatatttacggtgttaatcaacatacttgtnnnnnnnnnnnnnnnnnnngtaaaataatttccaacaattgtgaactgttgaaagtgctggaagcaaagctagacgatatgccaccagtgcaatcttcttgagaatctcgaaaggccttgtaaacctagggcataacttgcctctttttctgaaacatataattcccttcatcggagacactcgtaggaatacatgatctcctacctaagattctacatttctgcacttcagatctgcataactctattgcctattctgagaggcaagcatctagctttaatcttttctatggcttcattggtccgttgcagttattccgaacctaggtattttctttcacccacttcatcccagtgaataggagatttgcacttcctgccatacaacaactcatagaaagccatccctattgttctctggtagctgttgttgtacgaaaattctataactagcaggtacttactctaggagccctcgaaatccatcacacaggctcgtaacatgtcttccagtatttgaattgtcctttcggactgtccatcaatctgaggatggaaagctgtacagaatttcagtttggtacccatagcctgctgaagactttgccagaaatttaaagtaaacttcggatctctatccgatataatggactttagagcgccaagtaacctcactatctttttcatgtacaaatctgcataatgatccgctgtaaatgttgtttttactggtaaaaaatgtgcagacttcgtaaattgatctaccacaacccaaatcgaatcgtacatcccgtagttctaggcaatccaatcatgaaatccatagtgacatcatcccacatccactcatgaagtgtcagtggctgtaataaccctaccggtctctgataagccttgatctgatggcaagttaagcaccgggatacaaattctaccacatctttcttcatctctcaccaccagtagtagggtttaagattttgatacatcttagtagtgtcatgatgcattgaatatgtagtggtatgagcttcctcgagaatctcatttctaagttctgcactattttaaacacaaacagtggtcttatacaacagcatcctgctatttgatatcataaaatctttagcttgaccagctgaaacctcttctcggatcttcactaattctggatcaactaactgagcaactttaattcattccaacagatcaaattgtaacgtcaaattatgaagtttgcctacaacaaacttgatgcttgatctaactaccatatcatctgctagctgagataaaatcttaatcatactggttacttgcctgggacccttcctcctcaaggcatcaaccactacattggcgttcctaggatggtacaggattccacagtcataatccttaatcaattccaaccaacgcctctatctcatattcaaatctttatgagtaaagaagtacttgaggctcttatggtcgtataaatctcacacttctcttcgtagagataatgccgccaaatcttcaaagcaaacactactacggtaagttctaaatcgtgagttaggtatcgctgttcatattctttcaactggcaggaggcataagtgatgactcgatcgacatgcatcagtatacaccccagaccctgtctggatgcatcgcagtagactacaaacttttctttatcagaaggtagggctaatactggagttgtgattaatctctgtttcagctcttgaaaacttgcttcacacttatctgtccacaaaaattgctgattctttttagtgagctcagttaaaggtgtttaaatcttagagaatccttctacaaactgacggtaataaccagccatacctaggaaacttctaacttctgtaactgtctttggtcttagccaatccctgacagattaattcttccctaaatccaccttgattccatctttactgacaatgtatccaagaaaagatacctaagatagccaaaactcacacttcttaaatttggcatacagtttatgttctcgtagtcgttgtagaagcatccgaaagtgtttctcatgctcctcttctgattgagagtacacaaagatattgttgattaatacaataacacagatatcgagaaaacccttgaaaaccctattcatcaaatccataaaagctgcaagagcgttggttagtcaaaaagagataaccagatattcatagtgcccatacctagtgcaaaaaatagtctttagaatgccctcctctcgaattctcaactgataatagcccgttcagagatcaatctttgagaagacggtcttcccctaaagctgatctaaaagatcatcgatctttaattcccgataaagaatacttgttcttgatagtcattttatttaattctcggtaatcaatacacataggtaaagatctgtctttcttcttaacaaacaatacgagagctccccagggtgacatactaggtcgtgtaaacccttggtcaagcaactccttaagttgaatttcaattctttaagttctatcggagccattctgtaaggtgccttagaaaccggttctgctctaggtgctaaatcgatgatgaaatcaatttctctctgcggtggtaaacccagaagttcatcaggaaaaacatcaagaaattcctgaattaccttgatatcctctggtctaactttctcaggtcatgtggtatccaataccacgaccagaaaccctaaataccgtcttgtaataaatctctagctgttaataccaaaaacactggagtatgagatcactgaaccgatccttcaaaaataaacggttcctcaacctcgggttggaaggtcaacatcttctgtttacagtcaatactagctgaatacttggatgagaaatccattccaagtacaatgtcaaaatccgctaaacccgtttctattaaatcagcactcaactctctatccttaattctgatcggcgtagacctaatccaccttttggagatgactaactctcttccaggcagtagggttccaaaacctttatcattaatacaatgcggtctatccaatctgctaaaaattattgctgccacataagagtgagtggccccagagtcaaacaatacaaagaagtaagagttattgactgagagttgtcctattacaactgaggggctagcttctgcatcagcctgagttaagcaaacactcttgctggaacaggttttgctgttgacttctgctcctctttcttaagcatcgggcaacctcttttgtaatgtcctggcaacccacactggaaacatccttgccatctacactcacccagaagatgctttttaaaactgggatactccgattaagtgtattgggttttacaacaaccctaatggttgcatcgaccttggttccctcagaacctcttattctgagccaccaggtgtagttggtgcctttcgtttctgattagtggtcgagccactaccaccccttccaaaactaggggttggaggagtaggggctccaccagcaacttgagtccctcgagacccctgagtgcactcaactgcgccctcagctcgtagtgcctttcccaccatgtcaacataagtaattgtgtcgtcagtagtaatcataagattgtgttttatcttcaaatttaatccatccatgtacttttctttcttgctgaaattggttgatacaattctcgaggccaacctagccaatcgatcaaactgagttgtgtatttagtaacactcatattctccttctaggtcaactgagtaaattcctttatttttgcacttctaactgcttcattgtaatactttgtgttgaaaaactcttggaacgtttcccaagtcatagtagtaacatcacaagtcagggacaccatgtcccaccaaaccagggcatcctcctggaactggaatgcggcacaggccactctgtcattgcttgtgacacccataaaataaaaaattcttgtaataagcgtcagccactactcgactttcatcacattgggaccacccagaaagactagaggttcttgcttgcgaaacctttcatacagtggttccatcctgttcactgtagcatctggtcctatctacacagcaggggtaggagctacctgaatttatggagcaggcattgcaagagcccttgctgccttaggcgtctgatttcttcttcttctttgttgattttggcttgtattgctacaaaactttttcccattcctaggcagcctgcgacgggttaacatctctccgaccgcatgctctgcctctagggcctctgcctcgaccatgaacattcgagggaaactgaactccctgactgccactagacccgatcgagttacccttactcctagtattttgcatagcgtccatactattataacaacctgcataaccaagagctagtatggtcagctcgcgatcaagaataatttactaattaccgcttattttgaaaattaaaacatgcacctattcaactattaggctactaaaatgttttctatcaggctttttcaaaacatactgttaaaataaactactaaagcaataaaggcttacttaaccgtaagacgagctaatcgctgatgatgattgtacatgtcgtgacgatctttggaagataacctagcagctctgataccaaattgtaacacctactagtttaggtgtgtttatgtgatttataacttaactgtccaacttgttgctaatcaacgagtttattgaaaatcgtgaataatttaaacctttatttaactaattataaatatcaaaataacatacttgtattaaacttggatcccgtttacaaatatatttacaaaagttttgctttgcatattacacgagtttatcaaccagtgactatacaaaatgagcccaaccaccccaaagaccgttcgctcaaggcctaaccgccccaacatgtacaatcttcatctgctcgctctcacggctgctcaaccttcgtttgcccttacctacacatgcaaacaatatctgtgagtcaacagactcagtaagaaaagcataaatactaacatagcaataacccagattataattaggtgcccatacacccaaccataaccctatcctcatgtataactcgatgttaagtcaagaacgatcgcccgaccataatacaaaccataatatcagcctatactcg

SEQ ID NO: 26562 - DNA, 1273 bp, Cannabis sativa
aataattaaaagttcaaacataaacacatgtagccaaagttacaaaacattaaggatcaaacattacagtcattcaaaatcttgaaatattaaaattatccataacaaacataaaaaaaaaattagtttccatataagcattaatgaacaatatcaatgtcaaaattatttacattctgtgatgattccttgaccttaggtttattttctactgttatccgcattttcggtaagagacacgtggattctaggtcagcatccaaagctcaccagtgggcccaaagaagctaacttaggccaagcccaagtctaaaaagacctccaaggaaggtagcttcgttcttcgctgagatgagcttctgccaaggatgccccgtacccaaaaacagtcctagtaccgcatttttggaaggccaaacaacgtgttcctagaagtctagcacaacttccttttttaatcatattgcacaaggttattcgcatcttcgcaaacatgacacgtggaatcaatcaggaaaggtcaaggagtcattaagctgccaaagggccttgctccatgctctcgagggagagaggccccaacttcccaaaaccagcctctgcgagagaaaccttcccagatgcagaccacaagagaaatacccgcatgtcaaaaactctttcaattatagaagacgggaccctttgcccccgcgaaggatatggaccctcgtaaaacaaggtccttcgttgagacgcaccagttcagagtacgcctttgacctgtagaagttcaacccacgcgtgtcaggctacatacccaatggtgaggcttctgcttgtatgatgtcaaaagttgtctcccacgacacgctaccatgtagaggatgcatgttcttgtgtactgtgtcaaatgatccaacaactaggaataaggataattctaataagaacgaccttagaataacacgtgtttaaggcaccgccagtacaactactacaatctaacattagtaaagaccacatgggaaatatgccacctaccaatctaacattgggggttcatccttacaaagatccatcaacggcagcccatgcaaggggaacgacctataaatacccctgaagacggaacaaggcaggggggattctgatagtgattctaagacttaactttcttctcctcctacttcaactcttcaccttggaaccgaagattgattctctgtaaaacacactactgtaacttcattactaactccaaaatatacctactaagcttcttcttcttcaa

SEQ ID NO: 26563 - DNA, 3612 bp, Cannabis sativa
tccaagcatttaaagtaattttctatcatctaacattttcaatctcgttcaaaacaaatccaaattttttttaacatactcaacccaatttggcttgtatttcagtttggattgaaaactgctcacaaaatttgcagattatgaaaactactttagctaatttaattaaataaaattaattgaaaaatattatttataagaattcttactaaacgtagctttttttttttttttatatatttataaaaatcttaatatgaaataaaatatacaagaatgagaatcaggataaccaaaaaggcaaagagccattccaaatatactcattgtctaattctaatcccgtcctagcacaattatgcccaattttattttgttctctagggacaaatatgatcgagagattaagactgaacaacaacaagatccgaatactagaaacaagatcacttagaacagaattattacaatactcactataaatcttatccactaaacttttataatcaatctcaatgataccaacaggaagcttaattgcttgaatccactgcaaggccgataaaagggccttagcctcagcaacttcaggtgacacgttaccagctataggagtaattacacctgttatcgatttaccatatccatctcatgccacaatccccaaactatgtttcttcaaaatactgtccaaagcagcatcagtattaactttgaacatgccaaaagtagattgagcaggctgcctgacatcagtttggttttgttgtctatttttagtggccatgagcttggtcaaatccctgtaagtaagtggctgcatgatcataaagaagcattggaggtaaacactttctatgatgaaaaatattatttatttgattctaaagcatccaaaggaaacataaaaaggtagccaaaacacacttatcaaaagtttcaaaagctcaagtgataaaagcaataatattaagtaatttatttacaacataataattatagaatggtgagtgcttccaagcaatttttgttctagaacattcaaggaaagtatttgtaactgtttctaattttgtgtggcagaaaaagcagatgggagaaggaattatgtgtctagtaaaaagtttagcagctacaggtatggaatcggaaatcacatgccagacaaaatacttcaccttacggggggcacaaaagaagaccaaagctttgaccaaaattacttattatcattaaaagaagaggagggaaaatctctagagctcacagcaagatgataagcagtttttatactaaagataccagagttgtctttcccccacaccaggtcatcattatagatatggccagcaatatgaatatctaaaatactatcaataaggttgttatcaaaataatgtctcaagttgccaagatcccaggaactaaaggggaaaataaaaaaaaaaacagattgggagaagggagaggatgtaatgaggagttatagtttagaccaaaaccaggaagccaacgatcttttattgtattgatggtatgtccattccttattttccaaataagccatttctttagcaagtccctaccccaaagtatacttctccgggagaaggaaggactatgacgacagacaacatccaaaatggaagaatggggaaaatactgagctttcagagttacatcgagcaaggaatttggacatttaagaattctccaagcttgcttagcaagcatagcttgattaaaatgtgtcaaagacctgaaacctaaccctcccatgaacttggattgacaaatagcctgccagtttttctaatgaacagatctgtcatcagcagaggacccccaccaaaatcttgacacaatagactcaatttctttacaaattttagtagggagacaaaattaggccattgcataagagggaatatcttgaaggacaaccttgattaaggtttctttgccatccttagagaaccatttgtgatgccatgagtggacaacatataacactttatccttaagaaaagcaaaagattgttatttagatcgagagagacattgggggagaccaagatatttagtaataaaaggcttattatccgaatgaaaagtttgggaaaacaaggcacacacactatcatgcgtattaggggaaaagagaatagatgatttatcaaaattaacaacttgaccagaagctttcgaataaatattaagagcaatgtttaaggcattacaagagtttcggttatccaaacaaaaaaatatgctatcatccgcaaaaaaatatgggaaatgtgaggtgcattccttgagatggcaatacctttaaggagcttcctattctggaaatttcgaagaatggcagaaagcccttcagagcaaaggataaataaataaggggaaagggggtctcccagtcttaaacccctggtaggtataaccttaccagcaacttgtccattaacagagaaagagataatagcagtggacaagcatttcataatgttagaaacaaaattgatagggaaattaaaatggtacatgatacttctaagaaaattccattcaactctgttaaaagctttggacatatcaagcttaatagcagcccacccagttttgccaatgcgtctattattaatagcataaatgagctcattagctaaaaggatattatcaaaaatgtttcgaccacaatagaaaacactttgatgaggggagataattttattcaaaacaagcttaagcctattagataagactttagaaatgactttgtaaaaagtagtacagagactaataggcctaaaatccttaagggagttagcacgctgctttatagggataagaacaatcaacgtggtattaatttcaacaaaatcaaccccattattgagacaatccaacactacatcaatgaagtcagctcctaaaacagaccaatttctctaatataaataggcattaagaccattaagacccacaactttatccccaaagatttgaaacacaacccttttgacttcatcagctgtaaaatctttttcaaggaaactgatatcacattcctcgagcccagaactcaaagaagagaagatagtggtcgtagcctcaagttcactgccctgacaagagaatagattttgaaagtaagaggtgataaggtcaactataccatcctgagtattaattataacaccatctttatcattgttatattttatagtattagacttcctaggaaaagaggcatgcttgtgaaatttttttgtatttttatcaccagcctttaaccacttaaccctagccctttgcctccaatagacttcctctttgaaaagcatagcatctaaagcagacttaagatggccaagcctaagagaatcattctggttaagagaaagcttattctgaagactatcaatttcattagtaagttgggaaattctagatccaaacaaatagttatgctttttattccaggatttaagatgattgacacattgcctctacttgtgaatgtaatgctaaaaattgctactgtaactatcattaacaaaatttacccaagcatcctcaacaatccaattgtgatcggatcggatc

SEQ ID NO: 26564 - DNA, 2189 bp, Cannabis sativa
  modified_base (1996)..(2008): a, c, t, g, unknown or other
aacttaatctaaaattaatactaaaaataacctaaccctaagccaccaaacaatcaaactgacgctaccccctcgtgaaatttcaatcaattaactaaaccagaattttaatccctaaactctaacaattaattcaaatgctttcttgttggtgggattatctccttagaaggcaaaggccattccaggatttggatccgatgtagggttcaagttgtcgttttgattcttgtgtaaccaagtgaaaaaatatgttagcttcgtgtagagaatccatgaacaagatgctacctctgacttttgagaaagaatcgaagagccctatgaggaacgacatgatgtgttccatgtgatggttttcttgaagttttttgacaccaccacaagtgcaactattgcaaacacatgcatgtctatataagagttgctcccataccatttttaacttcgtgtaatacattctaacaatttgattatcttgattcaaatttattagagttttcctcaaattgtatatgtgaggtccatttctttgatcaaaataaactttgagatcaaaccaaatagcggctgcagactcatcacgcaaaatactagtagaaatttcttttgaaacagaattcaagatctaaaaaattactaaattgttgtttctaaaccatgtattgtacataatcaaatcagaaggcaggggtttaggaatattaccatctaagaattccaacttattcttgacagagatagctaattgtattgaactactctaatacatttaattgtcttgtctagtgaggagctgagaaacaagaatgttacttggattatcttaatggtgtagacatggccggccattaacctgtgcaaacagtgctaatgcacagggcttaaaatttaaaaaggcccaatataatttttcagatttttttttaacccaacattccatcaatgtgtcatgctaaataaaaaagaaagatttttctatgattttttttccttatttaatactttttagtttttttatccataatatttgatattaatttgaagttgtattgaaaattaaaattctttgagtttttagatgtttaattatgtaaaatatatttttgtaatataataatatttaaaaatattatttacaaattataattgttttttttttgttagggcctactttttaatattagaacagggcctctaaaatatttgagacggccctaggtgtagatagtaaggatccgaaggatcttcaagaggattcctctgttgtacgatttattggttcagacgactttgcacagttggattcaaaggatctccaatcacaactagtccgccattattatctgctccatgtgttgtagtttgatcatcaatagccattgttgaatcgtggttggattaggtaaagagcgcgctgatcacaaaacaaaaatagagaaattgtttgagcaagggacaaaaaaatagagctcgaggaaagtgctttgccgaacaagaaacacaacgaagaagaagaaagaatcaagatcaagggaaagctttattttcatgctctgatactatattctggagttttatacataaatgaaaaaaaaaagttattgaagaatggaattgattgaattacaaggagaagagaagccactatatatagaatgaacagtagaaattaactaacttaaccacattgctaaccaacctacactaataagatatcttaaaaaaatggaaaaattaactaaatgatcaagttagtgatcgtatacactagctaattaatcacaattcttaattgtggggattatctacaccaatatttaaattatgaaatatagaaaatatatatatatttgttggaatatatataaataaggggaaaataccattttgaattctgtgttttgcaaaagttattaatttgaccctttattttggtaaatgacaaaatagatcctatatttttaagattttacaaataggaccctgaattgannnnnnnnnnnnntaaaacttaataataatctgatctagagatgttaagacaaaactagttacattttctgtatctattcgtgttaaaaattgtcttaagattagttatattaaaaataaaattattgaaaattgagctcatggtcttatttttaccattttggaaaatttaaggtctattttgtcatttaaca

SEQ ID NO: 26565 - DNA, 1857 bp, Cannabis sativa
caaagtattggtgtttgtacactatttgattgattcaatacaattgtccaatttctctctgttctctctgttttacttttctcttgttcaagctcaatcgagctgttagttttagtttctacatttttgagctactgaattattaatgagagtctagaagacgtgactttcactttcatgtgtttagacatggaaaatatacatcacaacacaaacataatatagaaattaattactcatttatcattttttagggaatgtcatagtttaatacatccaaattttagtataaataatataaatgacacatatttataatttattatatatttagttataaacatattattttaattgaaatgcattttttttatataaaagtaattttatatatatgtatttcctttcttatttattttattttgatttgtaaaagagttattaaataaagaaagtgttatttaactttcttttctttttttgttagtaaggaaggaagtgtaaaattttattttattaaaggtgaacaatttattattgatttacttagttcctgtttgttacttttatcttcttgtcactatttgttattttaagctttcaaaaaaatcatatgagtttgccacatcaaattgggatatataattaatactctcatccaaataaggtataaaaaaaagtatataatatgatttaataatatatttgctatattatattatatgatgtgatcaatgcttgattatgtacctcatacataaatcaacacaaataattaatcaagaacattgcaatatcaataatgcacaaaaccaggtgatcaaactagtagcaaaccagtaagaaaattagaagtaaaactaatgaacaagaacaatttagacaagaaattacagggaattaaacacaagagattatgaggttcaaacaaagtgatgatgaatcacttgcctactcctcggccagaacagtttcaatggctccaatctttattgagctagaagaaagaattacaaatgttgatcacaaatgtgtacttgacacaattactcaagaagcatagcttcaattacaatcaacctcactagtgacactatgattaatcttagcataggccaatacaacaaactctctttctctttttcttgcacactaaattagctcataaaacctctgaaaatctctctcaactccgtccaacatagcagtaatgaatggctatatatagtctggagttgtggagctcgatcctaactgtcataacagacagttaggtaagaccgttagtatgaatggggttgagccaataaacatatgtttcctcacttagtgaccaaacacaacaattatccaccttcgtcattaagagatgaaggagttaatgattgtggctaaactggtcttcaatcctcatctagcatttgagaatgtttagtaagtttaggtaaagcctaaacttagctaaacacacatattttgtcatcatgttgcaaggttctccttggttccaattttcttcacattgacttttcttctactatgatgtcccttatgaaatgcagtttaatatctatatgtttggacctctcatggaacatagtatttttcattatgtgcagtgcactttggttatcacagtgtactttcatgttctctgacttgaaccctagttctcttgtgaaccctttgagccagacagcttctttaatggcctcagtagctgccatatacgctacctcaatggatgacaaagccactaccttttatagattagatttccaactaatacatccacctaggactataaatacataaccagtgatggatctcctagtgtctatgcttccagcatattca

SEQ ID NO: 26566 - DNA, 2406 bp, Cannabis sativa
gggcgggttgcacttaaattttagcaacccgaactttagattgggttagaaaatatataggataaaccgcccaaaccgatcgatgtacagccctagctgaaaggtcaaaggtagacaattttctttttttttttaagaaaaatagatgaatacaagtaagagagagaatataataataataaaaagaatgaagagtaaataattagaattatattaaaaaaaaaaaaaaaaacatcgacaggatagagacaaattaaataacttaaattgccaaagattgatttgggcggcgacaagcggtattttttaaggatattggcggctgtaattgttatatattcttaacccaaaaaatataacaataaaagtattttattttagaaaaatgttaaagagtactattggtgtttagtacttttttatatgtcaatattaatattggtgtaactaagtatcgagtcttatataatttaatataatagcttttagaaagtatcgctaactaatcgcaacgcgaaatgtcgagaaggtactaggcactactgatagctaatagcaatgttctttattttattgtattgcatttttttaattaaatgtaaattaaatttgctaagtaccaactcaaaaacatgtggctatatatttttttaacttatttaaaaataatacatatttttttagttgatatttaaccgccaaaaaataatgtaattataaaataaaatactttttgctattatttattttattaaaattataagtaacaagtataaatgtagaaggaattgtatgataaatataattgaatcggcgccagaggcaatacttaatcccaggttatttttaaaaatatttataaatacacttatttgaaaatgtccaatgaatatataatatataatttataattttattttgttataagtaagtggggcatgcccggttcgctcacccgtgacatagattatggagcaggaccaccaccttaaatttcgttactgaggcacgtttattaagtcaaccaaccaaaaacacgtaaacaagaccatactttctaatcttttggccccaaatattacacgttgaaaagtctatgtttcgaccaaaattattattttttttggaaataaaatcatggtctttattaattaaaatccataatgattatataattaaaatcttgagtaacatcactagttctgataacacgatcagtaattaaataggatatttcgagctaaaaagtgagcaacactatttgcagaacgtctaataaaattgacataaacatctttcaaatcatttaccatcatcttacaataaaaaataacacttccaaaatatgaaagcaaaattattttttgatttaaagtttcaaccaaaaattattgattatagcttattacaactatatataattttggttaattttacaatgcacctcttaaaatatatatattggtgcactatttatttgtttcattatccaaaaaaaatttttagtctaatttttttttttatattcatgtacagctattatagatatcctataaaattttaaaaaattcgaaataatttagaatatagtaaataatgtttaaacagactatttacaatatagaaaataaaatagttacacgtgcaacacactatttgaacgttgtttttagcgtgttaaattttttcgaatttcttaaaattctgcagatgtcttaaataactataatttacatgaccatgtaataaaattgaataaaaaattatttcggctactaaaacatatagagatgtatcaatacattccttttaagggggtgcattatagaatttaatttctaaatttatatatataactaggtagatggcgaaacaagtagataatccatcaatacatcccttttatgggggtacattgtagaatcatcatatattatttagaatcatcccttttttggttgctgattattggctagtagcataacagtgtagctagctgatcttgattttcactcgacaaagagataattttctttagagggtattgcaagtttctttgtctaattttcctagagtttgcagtgtcctaatctatggttgctctatcaatcatgcctcaggtttgattttcactcggcaaagagataagctgccagcattatgaggttaggaagtttcgattttccttttccttgttgtgtagttagcttattattttgtatggcaaatagacgcataaatatgcttcatgtttgtgaccattgtcgatcaaatgattgtcagttttcttatgctatatttatggtattcatgttaactaggtgtttacagtttgatcttttgattgagattatgccatttacaccattactattatgtgaaattaatttactattaaaagcaata

SEQ ID NO: 26567 - DNA, 2793 bp, Cannabis sativa
  modified_base (2502)..(2504): a, c, t, g, unknown or other
atatttaatacacgttgtaactagtgagttatcataatttttatttaaacaaaatgtgtgaagtctgatattaaattacattaataagaatatattactttttgtgttgaccgagatttttagcaagtaagtagttaaagttgtgaaaataattagaagagagtaaatacaaatattttttacgtggttaggacattaataagtcttagtctacgagtgactgatatttaatatggaggtgtttctttacagagaatactctactttatttttttcgatccccattctgaatgtggttttataacttttttcgagagattaaagacttctattgtcccaagtattcaccttggctttgcacaagtttcaaaattatgaaaatagggtatgcttgcctgcatatatagtaggttacatatggttttggtgagacaaacttttatttttcattgattgatgtgacagttcattatgtagtcatcactaatattatcgattaacgtgtaatcgccaaagaatatgttcaatgtgtctgacatgtcttttcatattcgtccatagacgttttttccattttgcatttaatgcctgtgaatagttcatcttcgaaaccctgggcccgatcgagctacactctgcttagccccggaggtgagaaaaaaatgttgacctgtccagttccaactataactccaggaggagccattcgattatatccactcaactcgtaagtttccttaagatatccttaagcgccttcgaatcttaagtcttgattgcaaggggtgtatgtcggtcagtttggtcgggttatagcatatttttattaacccaatataaatatcgggttgcaaatatttaatcgtaactcgcccaattaaaaattagaaaaagttcaacctgcccaatgattttgtcagtttggtcgggttaacccgtccaaatcgttttttacttactttttttttataattattattgttattttctagtatttaaataattagatttaaaaagaataaaaatatattatttgtatttcaagtttaaaaaatactatagtttaaattaattttatgacatttaatataagataattataattgagtaaacataaaataattaaataaaataataataaaaaaagtaatgatatggtataaattttaaactttaactttatatccaaatacgataaaaactattaactataaagtctaagttttaagttaaacattaaaatgtccaaactttaaatataaaatagttaaactaataaatgtaatttatgtaatataatatatacacttttattaaaaaaaaatatatatagatcggtttaattcgggttaattgggcggtttagaataatttgtaaaccactcaatatatttattgagtggtttagattttcattgtattattacgagttgtattttttctcagtttattcggtttggtttgggcgatttgtaaagtttgttgaatacctctattaattgccatgtggccggtcataaaattgtcacatatatatattaagagaaaagtaggataatatatcttgtaatacttgcccttgaagttacttttagcatttctttaatatttgagaaatattaaagaacacttatagagtttaacactctcgtaagatataatattattattaatgtaattaaatattaaattctatttattttatattgataaaaattatataaaaattcttaattaattataaagtaccacttcatactaatacgagatactttaatgggacataacaatactccatactttatatacaaaagatatatttcttgagataaagaaagtcaaattttcataggtgctcatataatagtcaaataaagataagaattagtctacaaagtcttcgtttactcaacttttattttgttccacatacacatcatttccacaaagtagttgacaacccatttccactagaaaaagaaaagaaaaaaaaaacattttaaacatcaatcttataagtgtgaaaatattttttttctttaattataaggaacgggtccaaattgaaaccttctgtttctaaaaataaaataaaaaactatttagaattacgttttggtttaaaattttcgctgtcaaaatttaatagatattaaattgtgttctcgaataatatttcaggttattaaaaatttatctcaattatttcaaatactaaatgacgtttgacctgaatgaaaattttgagaacatgatcgtcttagtaaaaattgaatagaaatagataaaaatctttaaattatctatcttaatagtttaaaagaatttttaacagcataaaaaaatttagagaacacgatttagtacttattaaaatttaaagggtaaatattataattaatttcacacgatttaaattttcattcacatttgttattgggcaccagtaataatctttaaaaattattacattaattataaggtaaatagcggcataagtannnaaagttttgagtttgtaagcggcataaacccaatgattttttttagtagcataagtaccaaatatttataaaactgtaatttttctctattttcgtcagtacaggctccgttttaaatttaggaaaacttacaaaaatactggaattttggttaacttttacaaaaatactgtcatacggaaatattttttgtaaaatactagtaaaacacaaatcagaacaattcaaaacaacagtagaacaactgaaaaacactagtagaacaccagtaaaaacttaacacagtata

SEQ ID NO: 26568 - DNA, 2806 bp, Cannabis sativa
  modified_base (462)..(462): a, c, t, g, unknown or other
tcattagggcaacaatggtgttgcatattttctaaaacaggtgtgactatctcttattatagctacaatttgcaaccatatatatatttgcagtcaccttgtaatacacatgcaacaaggtattaccccgtattacacagcagtagtgcatttactcttaattaacatgatctgaccaggtcaaatactactttaaatactacttttttgtattttaaatataaatcagttctttatatttatctaaatatctagttatatatatgaaacgtgagtagtaactattcatcaattataactttttactaagataagattgagtaaccaccatcctattcctataaataggagttcactcaaagagaaaagggagaggcaattctgatttacagaaactttgccgaattgtaaacataaccaaaactcaaaaataatatgaactcgtggagtatgtagattttnactacaaaaccacgtaaaaatatatggtatttatttattatttttgtctcttcttttcttgaatttattcttgaattaataattttcttaaattaagttaacaaaaaatcgcgtcaacaagttccttgaaaccctcccactacgatgaggtaccatgactttctattcagaagcatcaatggtatcatcctcttcagttgtgtcaaaacaaataaggcagtgggaccatcttatatatatagtataagatgatggaacactttgggtttgaatcaaatagtatctcctatactttgctactttatttttagatttagtcatgttcttaaagaattagtatttgttgacacaaacactttcttgtcttaatgaccatagagtggtccacccttaatcacttcaaaatagctatcaaacatgcaaactttagttagcagttatagcttttcttaagttcacagggcatccctaaatctagtaatagtgtacactaagtataagatcattgcatcgttctgaggttgtcttgggatctgacttagatagaacaacatggaatgtcacttgctgtctctaaggtatatcccttctcaggtcgcttactaacctattaatacccaaaaggaagcttctttaagtacataaatgaacctatttagtttgtaaactttatcttcttgtccttcagcttgaacacttctggttgttctcgtcaagcattccattgaggaagtctgtcttgacgtccattttccagatctcgtaattgagagcaattactatggatagaaatatgtatatagatttgagcatggcaattagactaaaagttttttcgtagtccacaccttctctttgggtataaccctttaaaactagtctagccttgtaggttttaacttttacatcttctcctctcttctttttgtagatccatttgcacccaatagctctaaagtcacttcgtgccactacaacttcttagactttatcgtccatttcttggttcattgcttctaaccataattgccaatcaagatttgtcattgcctatttaaaggtcagtgggttgtcatcactattatcaccaaccacttagttgatttcactgtctagatcataataagttgagttccttgaaaccctcccactacgacgaggtactgtgacattctgatttagagaaacattgatatatttctctttgtttatggttcaacaaaggaagtgggatcttcatctacctaagtaaatgtagatggaacatttctaggagtcaattatgatgtcatctcttctaatactatcttactgcagggtttgaagttttagatatattccttctcgagaaaagtagcattcattgaaataaaaactttcttatcttgatgtctataaaatatttctcccctagtctttttaggatagccaacaaaaatataagtctttattcgagacccaagttttgattccttttttctaaggacatgtgtcgggcaccctagattctaaaatgttaaacttggttatttaccattctaatgttctagagatgtttttagaactaacttagatggaatgacatttagaatgtcatttgaagtttctatagcatatccttagaaggatacctccttaaatgacgactggtcttacaaaccaacacgagtgtttccaacgtactttttcctcactcacacgcttcatgggaaaacttcccaagaggctacccatcccaagattactcaaagtttatttccccttacaaatcacgagactactgatttttgcaatcaccccccttatagggttttgcgtccttatcgaccacacttccagttgggtcaagactttgataccatttttaatcccctcgtttcaagcctcaattgagtatcaatccaccgaatcaatggctcttatacaagggtacatcactctgaatgcttcctggaatgacgactggccttaaaacccaacacgagtgcttttggcatgatttttcctcactagcacgcttcttaggaaaacttctcaggagctcaaccatcccaagattaatccaagtcaagtacccttaacttttgagttctctagtgataggccacaaaaaaaagatgtattttattgatatagctagtatccattaatccattttaagctctcttcaactgtgtagcatcatacttacacagtcctagaatcatcacacttaacctttcccaagtaatgtaggattgcacaacttacccggttttttgccttacgtataacgggactactaactatcactgagatgtttcatgtcgttaaggaagcctttcaaaggcttaggcactcgagg

SEQ ID NO: 26569 - DNA, 1699 bp, Cannabis sativa
gcaaaaggctttaatcaaaggcctggtgtcgactatggtgaaacgtttagtccagttgtgaaggcttgcaccattcgaattgtgctcaccattgctgtagcaaaatcttgggaggttaggcaactcgatataaacaacgcgttcttgaatggcactctgaatgaggatgtttacatgaaccagccacctggtttcgaagacaaagttcatcctgattatgtgcgtaaactgactaagagtttatacgggctgagacaggcaccgagagcttggttcgataagctaaaacagacactgctaagttggaattttgttaactctaaggctgattcatcattgtttttctacaagacagtgagtgaagttttgcttgtgcttatctacatagatgatataatcatcactggtaataactcagaaaaattgcagcagttcatcaacaaattgaatatggcttttgccttgaaggatctgggatcacttaattatttccttggcattgaagtatacagggatgacacagggatgtctctatctcaagccaagtacataacagagttactaaagaagattaacatgatacacttgaagccatgtcctactcctatgtctcttggtaaaaccttgtccattacagatggaaattttctccaaaacccgacagagtataggagtttaattggtggtttgcaatacttgactcatacaagacctgatctcagctttgctgttaacaagttgagtcaattcttgaaagctcctacagattgtcattggtctgccgccaaaagaattcttagatacctaaagggtactctaaatcatggttttcacatcaagtatagtgagaggatgactttaactggtctttccgatgctgattgggcctgttgccctgatgacagaaagtctgtggcaggttattgtgtgtattttggggatactttagtgtcatggtcatccaagaaacaagctgttgtgtctcgttcaagctctgagtcagagtatagggcccttgcccaggtctcggctgagttgacatggattcaatctcttctcgaagaacaacagttccctctcaaagacactcctatagcttggtgcgataacatgggagccaatgcacttgcttcaaatccagtctatcatcctcgaacaaagcatatagaactggacattcactttgtaagagacaaagttttagcgaaaaccttggacatcagatatgtaccctcacacgatcaaattgcagattgccttaccaaaagtctttcaagctcaagctttcattttctggttgacaaactaagtgaggtttgcaccccacttagtttgagaggaggtgttagaaaatgacaatattattgctggttacaattgattactagttaccatttaattgtacactctgcttgttgttattttgtcttctttcacatgtaatcattgggaaaagattccctctctccctctctcctttctgttaggattcagagtatattttcgttattgctaaaggtgcttctgtacggccaatgatgaggtgtaatcagtctagaatgttcttgtaatatctatataatgaattgaagtttcagaggctcattgagctgcattttacaaaaacctactatctctattttttaagttttcaatataatcaaatttactagttaataaagatcagaaatcacatttt

SEQ ID NO: 26570 - DNA, 3463 bp, Cannabis sativa
attagagcagaaaaagaatctcggaaaaatatatgtatgtatttttattttaaaagatattgctatagactcaagaggaagtaccacttgttctagggctaaggacagtgggactgtttgacaattttagatcattttgctttgattcaatggaagtcaccttaacccaaagataattttgttattccccatccgatctttttctttcacattttgcaacccaacattttattttctattgtgaagaaacttttattagtgatgaaaagcggaaacagtcaaagaaagaagcagcaatcaataccttttttcacaaacaaaataagaacaaaaagaatcaaagctagtatttgtaaggaaggattggccattatctgacaaaatagacaagcttgcttacacaaaaagtgctacacttgttatccacataatcaaagattcccagcccagagtagagcttggaatattttgcaatcttcctgtcttgactgtatatacagccattatttttaacccgaatcttattcgactctatcgattttcttgttgatcatttgaaatatatatccaacttcacacgagtcatagttgaaaagaaagaatcgggtttgaacttacacatttcaatttcaatgaagttttctcatagttgaaagatgaaaaaacaaggcataacaaacatttagaaaactagtgagaaagggagtgtgctcaaaaacagcttcaaacacttaaaagtccatgttcagtgcttttagactctgtacagaaaccaaacaagccaattgcaattgacttaaaataaaatttcctaaaaaaacagaagatgaagaatagcactgaagcgcaaagatcccaaatatatcaaacttgtacgagggacttaatgtgtgatttgggaagcacaaaaccagctcttctttcctcaaaagagtactcgatttcttcaggaatttcttctgttacattggaagcataaggaatcaatgaatgtgctggagtcattaccgtttgcattgggactgatactgttgaaggggtacttggcactgacattggcatcaccctaggagtcttattctcttcatctgcaacactagtggaattctttgaaggtgtagtgaacggcatattaattgcatgaagtgttttctgtactgtgttgtcatgatgtgctatgctcaaatgatcttctgataaatttgttgttatgttggtttttaatgatgttgaagatattggagagaaaggtttccgcttcattggcgattcgacttcacgagcaccaaaagaatggtttctatttaatgcagcatcaaagcctttggtacctgcgtaaacacacgaacataataaataagaaaataacagtagaagagctttgcccaacttgcttaagaagctatcataataaacattggcagataatgagatttaccatttgatgataaacctgtgaagctatcatccatatgcttattattaaacagctcgtttggaaccactcgatcactctttcgactacctggacgtgaatgtggagtcgctttgacagagtgatcaggtttaggagtttgaatcattgctcctccaagggagagtcttctattacttgcacctccagttgacattctaggaccctttttaacacttggcttggaaggacttggttttgacccataaagtgcctcttgttcagctatcagctgtccctgaagtttcttatgttcctgtaagagagatattgtgtagttaggcacaagaagttataaaactcactagttaaaaatagcattgctagctcacttattttgatcaattagtagatataacgaagaatgttatactaatcccgaaacatttttctgacgaaaaaaactgtggaagaaacaagtcaaatatacccgctgtctacgacgttcttgctccttctcttgccgtaatatagtatactcttcaagcatggacagaagtcgaatctaaacaatgttaaagaaaagaaaaaagaagcattgttaaaaatatttgagacagtaaacaaacaacagcaaataaacgttttagaggactcttttttaataagtgacttgctaatttaaaatgaataaataaatttatatattttcagaattttgagacatgtacttacgccatcatatgtaaactcagagcctttctccctctcccacgatactgtttttgaagccaattgatcgaccattgctgaatgtaacccaagaatgttgactgaatgttaagctttaccgatataaaataaatggaggtacaaagaaaatggaagctaaattgtatcaagatgttccaacaagttttagatgccgaacataatcctaaatgaaaaaaatactgactttggtaagacagttctcacctggaagtttattaaccaaagtacgagctttctcggcgcgcttgagagttaaatgagctcctcttccagcattgtaccgattttcatcctaaaaaacaccataaaatagcaaaatggtttaaccaaaggaaagtgttttatggattaatgtatttgaaaaggcttatgaatatggatacaacaatcaaaatgacaaaatgtcttaaacacctaccctattatactcctcaagccagcattcttcatcacaagcaaccaaccatttctcaactttttcaagtatatccttcctgctaaatgcttcctctttaactttagagatttgaagctcaatttgctcaaggatcaaagcagggtccacggctcctgaaaaaatacaaatatgaaggcataagaaaacaagtaaagagcagcaaagaatttaatggaactatgacaagatattaaataaaagtatttaccagactcaatagcttcaatggaacattccagtgcactatctgtctctaggaccatatgagtcttcctacaaatctcctccaattctgacctctttttgagaacaagctctttcattttactagctttgaattcttctaacctagacacttcagcctcaacctatgaaataaataaaataaaaaggtcacttccctttatgatttagaaaataaaaggaaaaataatgcacgtccaaagattatacagatagatcattacataattgatgaagtccagtgagagtgcgttgagctccgttatttcatcctctgaagcagctatgttacaagtaacattttgaaacatctgttgctcttctattggtgtatccattaaattccatagttccaacatagttgttgctagatcttgtagctgccagtatagagggtcaacaacataaaccaaaactgaaagaggaaaaaatacaggcaggaaacgagaaatataaaacaaaatttaccctctgcatcctctgtactttcacccctcgtaaattatgtatagcagcagccagcagctcaattgtagtattacttatattcttaggtccttcagaatcacctaaag

SEQ ID NO: 26571 - DNA, 2735 bp, Cannabis sativa
tagattttatattattctactatcattcttagaatttctattcacctaatagtctagaattctaggtttaagtgataaattacttttaatgatattgtgacgcgtattattattagtgatgaagaatagaacctaagttaaatgaattatatcctaaattgagttattgcttagattaacctatcttcatataatttaatatttttcttaggttaaataaattgcatgtttcgtgaatttattgcttagtaaaaaggtttaattattgagtgctttttcgtaattaattgtaatagggagactggaataagtgattatctatggggttaatagtttaattttggaatattgattatttgagtggagaatataattgttcactgtttttaaataattgttattcattatttattttctttttatgatatttaattgtaactcaaaactcctctttaatttctttgtgatagtgaataataaattaatcacagtcctcatgggatcgtcccatactttctttttatactgatataattagaagtattgaaattaaattaattagtaaatttgataaggcatatgacacgcatcaattattgtcttaaacaggacacatgtaaatccaaattttaaattattagttctggatggatacataatgtagtatgaagtacttccaattttttttaatagtttaaaatggagtttgtattgaatttacgcccattataaacacaaaattttaaatacttatgctgcaattatttctatatataatttcttttcaatatatatgtcttattagttcattgcaagttgttagataattaattttgtgggaggcatgtagtgcaattagagttggaaatttaacacatatggatgaatacccacgggtactcaccccgaatgggatgggatttacctattttgatgggcaatggggtagggtgagggaaaattttatatacccaaagcgggtttggggtaggatcagaggtgacactacccactccatacctgatctcgatatatagttttcatataattttctaaacatttattcgtttaattgtattaaaattattgactataaagttgattatgatcttacttattactgttatttttaatattttattattcaagtttaattagcattctcatttgcattaaatgactttcataattattattattttattattaaattttatatttacttttgtatgattattattgttttatatttttaataaattattagatgagcattaatgagatattaaattttgtgtaaagaccgcttcagtttaatataaaattagcagataattaagatttaattcagaattagacttttaattatgatttatgaatttatggagatatatttgaattctaagtgtgttatttatgttatatataaaattttatgtttttagtattttatacccagtaatagtggaacacgacatttggctgtagagtcacattttctcatggtttagtattttagtaatagcggggtaacttggatagacattgagaatattaggaatattagtggttttaaattcgaccaaaatgccctttagtggcaaagttgcttcctgatgaagcaagggacaaaatagtcttttgccctaagttggttttctcctgagtaagttgattaattagaaaatattaatttggtttctatgatgttaacagataaacacttagactaattctttcatttttcaaaaaaaaatagaaaaaggttagataaaacagtctctctttatcactctttctctctctctctcgaccaccttggagaaaccagtagaaggatagggtttctgctccattgtaatgccctaatttatagggacgtcatgtgtgtgattttttaaactcagttaatactaatagattacttaattatttaaaactatgataatattaaaaacttaacagaaataaaacactataaatggacattataacggcataaaaagcgtattccgtgaatccctattataaaacgttttgctaaagaaatatatacgacaactatttaaacacaaaatcaaaatacacagcagatacagccagcctaaaacaactactggcaactcggtacgtaggctggcgaggtcaatatgtacattgctagagaagactgtcacctcacggttgatctgcttttctttgcctttacctgcaccacatagcacccatgagtcacaacgacttagcaagaaaagtaataataacaatcatatagtttattattcaaatattgtaatttatacacaataagaatcaaaacatcacacattattcatatgatgaaatccaaatcactactggaatcagctacaaataaacatcagtatacagatatttggtaatacaaaactattataacaataatagaattcatattcttttaatcacataaattatatatatgttacctcataaagcaaccatcttcataacatcacattgcttaatcacgcaagtcgatgctttaatctgataatcctatattgcattacctaatcaggcaagctcgtgccatagcctggcacctatatattgcataatgacatcacctaattaggtgagcctatgccaaagacctacacccatatatcatataatttcatcactcaatcaggtgagcctgtgccacaatctggcaccaatatatcgcatcgtctaattagacgagctcgtac

SEQ ID NO: 26572 - DNA, 823 bp, Cannabis sativa
aattatactcaattctaattccgtaaatttgacaccctaaaagtgtacaaaatgaatttttgaggggtgtactatgaatttcacatgcatatttaaaaatggaaataaatgtcttcaatcgtatttatggatgatcctttattataccgtacaaatctaaaatgtacttgaaaactttaattatatatacttttgtatataatattaatcacttctacatatgaacttaattatatatatcttatattattacgagggcatggatattttattaataagatatagaaaaatatgaatatcatgatcatttatataactagttgagatagagatattgatagatgggtgttagttttattatatatccttttaattaacttttaccctcgaaattacatgcataatattttttttttcaattttttttaaagtgcggcatttgttatagttacagtattatttttataaatttttaaaaaattttaaatagtttacaatgtcaaaaataaaattctaaatatttaatttaccgcgcgcgtttaaaaaatatcaaacgtattttagatactataaattattcgaaaattttgaaatatgatgttgtaacttgtaagtatataaatatgaaaaaaaattgaagtatgtatttttgaatacagaagttgactaaaaaattacaataaaagacatcaaacttaggaagtcggccaggagtactgtaataataaatgaatgtatggtattgaatttcaattctagctattaaagtagagatagagagagaaagctatttttatatattttataaaaatgtattattgca

SEQ ID NO: 26573 - DNA, 3880 bp, Cannabis sativa
gaaaataatgcacctctttaaaagtagtacattgatggataacactttaccactcaaacatgcaaggtatcctagacctagcttgagctaaacatttctatcttagatatgaaatagtaaatagtcaacagagcgtcgagatacttacttgttgtgtgagtcggaaaggaaaggttgtcgtggaatatgtccaagaatgttgaacccagtcgactagacgatcgtagccggcttgagcgtcgaagtttctgtgagtttgggggtggaacaattcgaggttcaacgactctgcttctggaaaatgggatgaacagaggtttaaaaagatttgaatcaggcagtcgaagacctcttccattcattgtttgagacgacgatgaagaagaagttttctggaaaataggaggttatggcttgaaaattcgaaaatggggagtctgaaagtctgaagtgatgaaaaagaataaatgaattgggtgagcatatttatacctcggttagaatccttgcaatttgaaatggacggcccaggtttcttcttacaaaaagcacattttgatctgatggatgagaagttgaaaacctggcatttaaaacctgttcttgtcgtttattattcatcattgcacgcctcgagtaccgtacacattaaaggaggagtcatttcaattgtcttgccatcattgcaactcctcctaagaaacgtgcccctaacactcacgtgttgtcaacaattacattaaaggcgccgcatgcgtgccacgcccgtggttacttcactttatggcccttttacttcgtgacagctcacgggatgcaataataatcccaacaattaccacgtgtcaagaacttgtctccaagaaatgaaagagtactgcaagctcccagacctcagagagtcccaaaagctcaggggtaaatattatgtgtgtttttgagcacgcgacacatgatatttaaagaaagggattagcctcataattcccctaattaaaatcttccactacaatcttgttccgaagaagccgcgtggatccaatagtaagaaaagattgaaagatgcatggaagtccacttcgccctgtcctagcttctgagacgcggaaggcgcttagtctctcccagactcggagggatccaaatctggtagcttgacctactgatacccgaacggatactcaaagggcctaatgcgaatgtcgactgcccaggagtatcgcagacatctacctttgatacaagccagttcaccaagtgacagttatgctttttttaatgcaaaatcatatcttgccccctatgtctgagcatggtagtgcgcacacctccaccacctttttaataggcggatattataaacctttgcttttaaaggtgaaagctttgggcgacacgtggcctttacttttaaaggttaacctttgaacgacacatgtccatgtaatacaaaatagttcccattgtccagctaaagcatgcacagacacaatggttttcaagggacccaatagttagctctgactttgcatgtaatttaccctattagtgggctttaagcataaaccctaggtgggtcatgtgcatgaacatacccaccacttggcctataaataccattctatttttatacgaagggaggatcacaacctacatagttaaaactctaccaagattattcttcgtcttcttcttcatcaaaaacttagagtacattgacatgtttaaacaatatatgcttataaacgggttacacatgtcgtgtcgtgttaatccgtttatgagcggatcgtgttcaagtttcattttttgacacgattattaaacggatcatgttcgggttaaacataatcctgttatacatgagcctcgacacgacacgaatacgactcccgaacacgaatagtcacccctactccattaaatatagcatgtaaaacgttattattgtaagcaaataacttatcattttcagtagaccatttgagttgaggttttaactttgaagtaccttcgaaatctaccacaatggaatgaggccatcttgaaagaaattatttttcatactttctcatcttgagacttgataaatgccctcattctaaccgtcaaataaggatagttaaaagaccacactaagagtttagtgtcccactctgataccaattgaaaaagtgtgtttttgcaaatgtcaatacatactaaatttcaataattaaaaaaacaacagttttgatttgcagcaacagattgaaatcttgtcatagtacatcacagatttgaagaattacaacaaattcataaataaatagtgcataaattaaaacttgacaccaatgaattatacgtggtatcagtattctttcaactactcatagtcctcgaccacgcctatgaaataaaatcaattagtaaagtatcaaaaattacaaaagcaattgacttaaataaatttagatttcctttaataatttatcgcaacccattgtaatccacattgctaatatgatctctgaaacacactaagtagtgaattcccttgagctattgatatgtgcttacttcttcccgaagtaagacttaaacaaatcttctctctaagatatatgctcatttcctcccaaaatgagacttggaaaagtcttcttctgaagactcacacttgttcaaaacttttctttaacctattctatgaacagtaagagaacaacaacaaagatacaaaaacctagaagaacactttaagcttttacaaaagaaacactcttctcaaaaagaaagatatgaaaatatctaggtcctatttatagaacatagaaaccctagagacaaccacaaatacgtttttcgaactgtacaaatttttcctaaatttttttttgatttgcagcatcaaaatcggactctgctgcaatagatcaagaccaaacatgaaactttccaaaaaggaccaagtcatgatttggtatttaatacatgccaaataaagtttatttaatctactataatcatgacaaaactgatttcatcaattagaaaaaggtaagtcaagtttttcaaaaacatgcaactttccataaaaagaattccttatcttgtaagataaattttctaacaaataaaaccagccgcgaataaaatcttccttgaaaaaaaaaaagcaattaaaagcacaaaatcaacacaaaaaaatcaaattaattcacaataaattaaataatattttcacaactaaattaccaaaaaatgaactaacattatacctcgatctttttctcttaaccagtccataggttccaccaccactgtgttgactatccttaaagagcttctcactcaatcagttgggtatttaacctaccagcaattcatacttttggccatttatgagccaacatctcagtgttggcctcatttccaagtgtcattggaacatcatcaagtacatccgagacaccacaaatgaatgatacttcagtatattgaacaccatcgttagaccaactagacaacacagcataaaaattgttaattagataaagccaatatattaagagtaagccccagttgttttggcttcaaggtttgatagtaacctctccaatacagtatgccatctacaattaagatacatacacagaagccattaattaactcatctctttattagaaccatacatagtacactattataaagtcacacaacatatccaagcaacacaatctgataaaaaaaatctgttacaaggcatgataaacacattataaaaccaaatttccacagaaaccaacttatgatcatcacgaattataagaatctatatctatactttatttatgtccagtccacaagtggcaatatgaaatcaatagtagtact

SEQ ID NO: 26574 - DNA, 2998 bp, Cannabis sativa
cttagataattttttggatcacagcttttggaaaaataattatcttggaccaataaaagcttatagataaaatagttgaattgataagcacaatcctcccaccatatgaaaaatttctagaactctaagtacgaattcagctagtcatcttttcaacaaggttctcacaatcactcttggagattcttttggcacaaattttcatcccaagatacttgaaaggcagggtactcttttggaaaccagacatatcaacaattctatcaagagtaatagaatccatacctgctccataaactgctaacttcccatggttagttttgagaccagatcaagctagagaacaacttgaagcctcttaataaaagagtggctgacttgaagtctcttttacagaaaagtaacaagtcatctgcaaagcaaagatgtgttaggctcaaactttgacatctaaggtgaaatttgaaatccgacaacttctcaattttggctataatcctggagagatttcataccaataacaaagaggagagaggacattgggtcaccttgcctaagccccctttgagattgcaagtaaccatgtaaggttccattaatcataaaagagaaccgagaggtagtcacgcaaatcataatgagatccacaaacttttaaggggattttaaggcatctagcatttctcaaagaaattctcaatcaaaagtatcataagctttttgcaaatctattttcaacatacaagcaaaaactaagtagacttagcagtcttcctgtcataccctcttaccatatcctgacaaatcatgataatatgaataattttttgcctttagcaaaaccactttgattctttaagatgagatctggcaaaatttctttgagtctatttcatatcattttagtggaaattttataaattatattgcaacaagcaataggtctataatcactaacagattcaaggctaatcaacttaggaatcagaataatgatagttgaatttatttctttcaacaagtttccagtgtttaaaaaggacaaaatagcttcagagacatcctataatgacccaagtatctttgaagaaggcactgctgaaaccatctgacccagggactttgtcattcgaaatggaaaaaagggcaagcttcactttcactgtattgaactcttttagcaaccaaatgaactgttgatccgtaacaaccagactataatgcacaattttcttatttattggagtttcattaatcactcgagaccccgacaagttcttataaaaatcaatgaaggctttaaccactttatctttctcatcaacaccctacaactagccccatctttaatcaaatagattgtattcggcattttcctttttcgaatacttgcatgaaaaagcttagttttttaatcaccatcttttagtatgcaagcctggctttttgactcaaaaagaaaacgtagttcttgtgaatctcttgatatctcgcccgagaagcatgttcttgttgtaataacttaaaatttcctggatgtcgctttaaagaagtttaattactagtgagctccatgtaagtctcactatcttgaacttcaatattacctctacccttcatgttaaactctctaagggcaattttcatcctttttaatctatataccaacttgtacataggagtccctcacaagtattgggactaatttttaacaacatcctgaaatgatacaagttgcgccaaaaataaatatacatgaaaggtttcctggtattatttatcattggatgcaccgaaagcaacatgggagtatgatcaaagtctccctctggaagaaaagtgacttcagttgtttcaaatctagagatcaaaatattgtttgtaagaacacaatcaagttttgaaaattttatgccactgccaccttatttattactcgtagtgaaaattatcattgaacttaattaacatcctttagaccataaaagttaagacaattttgaaaaggcaccatttctttggcatttcctttataatttagcatctcctccattgataaagctgagttaaaatcgccacaaactatcaaaggatctttattatttgctgtcatattattcagatcatttcaaagtccttgccgactcttgttgtcattaaatgcatacacaacagtgacagcagaaccattcccttttttcaggttcacataacaatggatccattgacttgttcctcctttaatgtccacataaaaactgttaggactccaagcaattacgattctttcatttggatgatgagaaatgttggaagcaaaacaccaaccttgaaacatattaaggtataaagctctcaatttggagactttaacctttatttcgagaagaccaacaaaactaatattcttgtgatggatcattcacgtgacctttttgtttattaattttgtagatctatcgaacaatccaaaagaagagcttatccatttattggtggagggtctctccctccatcaataatagacttcatgtcactactacaaaaattactagtcccgtcagtcctcaaatcgttattttttggaagatcatcgctaataaaattgcgtgtttaaaattgtcagctatagtggactattcctaacagttttaaacactcgttaaaaataggtgacagtttaaaacagttataaaattgtaatggtttcatttttaaaaaggaataggtgatgcttttacaatgtggccaattgtatagccgacagtttaaaacagttggctatacaattggcataaattcaccgcctattgtgagatattataaaacacaatatcagatctcatattccttacactctcggctctttctctctcgccaaacaaaaagaaaccatcattcggagtaggagtgtgcataaatcgatccaatccaatgagaaccaaccgatccaattacaaccgaccactaaacattggatatccaattgtgattggat

SEQ ID NO: 26575 - DNA, 1739 bp, Cannabis sativa
cttgttcttattttcacactcaaaactgttcactaattagttatttctgttcagtaagtataaactagaaaaatcaaactaaaaatgagtaccttgatcttagaactgcttgaacattcaattcgcaagccatgacgacttaatatgtaaaaggcgtatactgttccttccccttctcgaacaaagctcggtaaggaacctatcttaataacatcagataacagggtggagtcctgaggactcagatctgcaattttaatctttaagttcatcagctactagtactaccaagaatcatatcgaaatgtccacactaaacaactacaaatctaaatccattgaggttgaggacaagtagtttaagctacgatttctagttttagtgtcaaactacttataaattatgaccacataaaacataatgaagtgaaaaatcatgactaatcaacagtctttgagtgaaaatatagtcagtaattgcctcagcgacgagctagtttcacaggcatgcttattgcggagtcaaacaacttattgcacgtattattgaaaacaaaaggtccaaaattcaacatttattttacctgtagaaagaagatagaagaagaggcatacaccgtgcaggacaacaaagcgaggaagccaatcatcaacctcagaatcgtcaattggaggttctcccggtaatgcttcccatctctattagagtgagtgatgttaaggtcaaaataccagtcaaatacagatgtagtagtaatgaaacatttagaagggaaataagagaagagagtgaagtaatcactaccgttcgtatgtataaatagccactaagacgagctgaacgcagaacttcatcaacatgttccaacctgtaagaaacatggacattgtcaatgaaatgaaaaatatgacaatgaattgtatagaatgaaatgggaaccattttctctttattattcaaggctttaaatccaaacacttaagactcaacacattatccattaatgaagctgaaacaaaattgcccaaaaagtcaaaataacaacaagagaagattagctatccctatttaaaggggtatcaagttttcccttactgagcttttaaatgagcttctctctcttctaaatcagcaagctccgatcgaagtgactcaagttctgcagcagtaagctcaacctgcaacaaattgatcgcgattaagaacatagaaatgttcactaatcacaatccacacacaaaaaaattgagttcaacaaatgagagtttctcaaaaacctttctttcaccatcttcatcagaactccaagggagtccccggagactaaacaacttcaacatgtatgcagcgctctttaatcttctccgtgtactcaaccgactatgagacctgtacaaaaaccagatcaaaccaagctgagataaactcaatagccattacatcttggctaactaagatagtggcctccgagttttgaaatgtaccaaattttgcttccaaacttttcaggctattaaaattttttcttaaactattaaaattgttaaattcaagaacttttgtctaattttaccaataaaagcaccaagtcaaatttcgggaggcacgatttgttacatggacaatcgccacgttactaaaattgaacaaaattagacaaaaatctttgaatccaataatttcttgggaaaattttaacggcataataaatttggggagaatgatttgatatatatca

SEQ ID NO: 26576 - DNA, 2095 bp, Cannabis sativa
  modified_base (115)..(122): a, c, t, g, unknown or other
cgctgattctagctcaggcgaggtttaaactcgaggagtctctcatggacatctcagctttcattggaaatctgaatacacgtgtcctccaacaggagtctggtctcgagtttcnnnnnnnnagaaatctcactataacaagttgtattaccatgtggcactagttctgtccatttaagcatgccatgtcacgaggataaaaatcgggataacattcacccctcaagtccctgtgagaacgtcgatacggataaggactttaccagctatcttgatgttgccaagactattgttacctttgccaaatagaaagtgatgcattggttggagctttttttcttgactgtctaatctcattgcagcaaaaaatagctgctttagttgccttttgatgggttggtgaactaagtgagaaaaagggggcccacatgtattacataagtaagttttgggggcaaacccttttctcactttcatttttcctttttacattctctcactagaaatctcctattggaaaagctcctccttctctctaggtggtcgaacccacaagcttcattctcctcaggatttttgcactattttgactattcaagcttctcaccttcatctccattaaaatcttgtactgggtaagctttctattcttgctctttcacttgatttgattaatttgtctatgaattcatgaacattatttcttgttttgaacatgctttgattcttatgttaaattgtagccttcggtattttgttatgcatgatagccttaggatagacaatgtgtgatttctagacaaaaagaattgaatctaacttttgttgtgattcttggctctttaagtcacgaaaaatatgaagaacatgttatagttcttgaaaaatcaaatgttttgatccatgcacatgctggccagccaaggaggctttgtttgaatcctggccgaccatgggtggctttcagggagtctggccagccatggggactgtgtcctttggctggttggcctatgcctataactagggttccttcccagccactaggctaggtcttggggcctagctagccactaggacttgaaaccctgccaagccaaggccaaggctccatgtgggtagccagtgtttctccctcttttgaccttagccagggtctcatgacggccttaaaggcatatacaattatggccttatgcatggtctcccttgaaaactctgtgtaaggcttgataatgagtccattatagttgattttgtaacttaggacttactgtatgtcttggtaattgtacctaagacggtacttggtcgttggtcgaccttgtaccctttgttttacctggaagatgccattgggtgttgttgactataatatatttgtagctttgtcaggttgctcacctcccttagttctttcatgcaggtagtgtccaggaaggtgacagctgcataggtcctctattcacttcgtacttatggcaaggacgaaatagactctgcgtaaggcacacctgtatgatcctcatgttaccacgggggccacacggggtcaaattagagtggaggaagagatttcccagcctcctatcaaagctgaactagagattcattcaaagacttggagttccgatgcataatctgacctagaagaggttgctcgagtgaggaggtttaagacatgttctatcctctctgacaatcctttggaccatgatggcgcttgaggaaatccactgaatggacttggcgcaccttcagtaccaagactggatcatgtcctagagcgatctcgtgtgccaaagatactgaatgtgaaaccacctagaacaaggttgatttcgcccacttttgctctttcagatgaggcctttggaaaaatccttacaagtggccttatacggagtgtccattgcgagattcctcacaggtactgtagggcacacatgcctctttcgggctagttggcatggtcttggtgtcatattgaacatggggtggtatttctacttcatcaatactttctggatgttgcagcctactttgggatgtgcccaacgcacctcatgcaaaagagcataaagtatctctcagt

SEQ ID NO: 26577 - DNA, 2131 bp, Cannabis sativa
  modified_base (58)..(58): a, c, t, g, unknown or other
tttaatagtggtatgtataattttattaccatgatatatatattttgagtattaattnagtattattataatttttttgtggtatattaaatttaagtatacgacatatcaaatattgttgtatatatttaatgatctaatatatttattcgtttttgttacaatataataatatgcaatactaaaaaaattatataatttaatttaattattatttatttttttaaaaaataaaatgtagtaaatttatttttataatttttattagctaattcattatatttagctattttcttaatttttttaaaaaaataattattactaacttagttttcaaatttagggccattttacatttcaatatttttatatgctttggtttgcactttttgttggacttgaccaatagttggtctggtccacactcacttttaaacatacttttacaaagagtgacaatcgtgttattgtattatattcatgttcgtatcatgaatgaattttttttctttttcttttgaaagatttcaatcacacacagaaagggagggacatagtgtgccccttgaaataaacatgaaaagctttattactcaaagatctaccatgacagctaaaacaaacaaagaaggtacaaccccttctttgaaattacaatctgggtaagaatgtgatgctctagcaactgcatgagctaacatgtttgcagatcacttaacaaaaacaagagaaacatcgctcaactcagccaatagatgtttacaatcatgaataattaaaccaaaacaaagtttaaaaaaaattgagcttcaaattgcttgaacaatcaacaaacaatcagactctaactccaccttagaccatcgattctgtgtaatccaactatgagcttgcttaacaccaagagcttctgcaactttaggtgtcatagtcccttcaatataccaaatctgcatcttaacaatactaccacaatgatttcgagctacacaatcatcccatgctggttctatacttcaaataaagcgacatcaatattgaccttggagctattctcaactggtttaactcaagactctcaaccatcactttgatgagaaactactaaagagacgaaattatcgttcttgcgagccttcctccattgattaaggcaaagtctagtaaatgaaataattgctggttttgtggtactaaatcatgttagtaatggaagcatttaatagattatcattgtaccacactttaggatctctatatgtacatatattaaatttgaaattaaaaaaaaaaagatgaaaggaatcatttatctcttgaagtgtatcaaggtatccttaaatcttttcataagttgtgtcctacaatggcgataatgaactcacaccttgatgttctagatcttccacaacatacaaggattagtgtgggctaattaggataaaactaaataatgagttcttggatttttctcaacacatgagcaagaactctctcaaagtgaataacgatgtgattaacctttttaggtttcctaaattacacacacacacacacatatatatatatatatatatttaggatatatccactactaaaaaaagggatttcttgacagtttaaaatagtaaggtattatattgccatcagtatctacgaccgatgcctattcgaccatcgcaaaactgagtggaatgtcagtggaaaatactcggtaatgaggtttactgacagttaaaaatcgtcagcaatagtaggaagaattgctgacggttttagattattgtctatactatagccgaaggtggccaacagtccaaaaccattagctatagtattattgccgccagttttgcataatcgcctatctggaggtgaccctttaaaactgacgctaaaaggttaagaaaataaaattaaaaaaaaattagatatattcgagcatttcaaatctaagcccaaagaaataactaccatttctaatcaaaataaactaaaatataatgtcacacaatgtatagaaacaacgtattcaaaataatcctcaaataatacgctaaaaatcaccacaaaatcttcacaaaataactacaaatttataaaaaaaattcccacaaatttgagaccacct

SEQ ID NO: 26578 - DNA, 4567 bp, Cannabis sativa
  modified_base (1899)..(1902): a, c, t, g, unknown or other
  modified_base (2043)..(2043): a, c, t, g, unknown or other
aaaaataaaaaagccccaataaaaaatcatgttgaatacacgtgcggagcacgtgtgcctcccactagtaactcaataaattaattattggaataatatatgttcgtacgttgatgataccatataatgaaagataaatactattttggattctattttgtaaaaattattaattttgttaaataataaactctaaaatagtacaaatatgacctgaagtgattttttgtcgaaataaaatttaatgataattcgaagaaaaaaaaatgtgttatgacaaaactgttttcgttttctgtatatttttactattttgaaaaatataatgtttattttgtcttttaacaaaacagagagtccaattaataattttgacaaaacacaatgtccaaaatagtatttactctgtaatcaatctaaaacattatattttcaaagctctcatttattttttccacattcttctttcttcttcttttgtttagttgaaaggacattatatgttcttctttttatggaatgcaaacagaagagtcataaaattatgagtcaatcaaagattcaaaatgagcaaatgcaatgtaccttggagaattattgatgctaagtgctaaaaatggagactcaaatagtactactaatgttatactatagtaattgtgagaatatatgtataaatatattccaatatccatcgtattatacagacataaaaagaaaagtcttctattctgtcccagtttggtttttaaacgtagacaactcaactcaactgttattttttttatgtttgttttttaaataaaaataataatgattttattgcttattatggtgagagagaaaggtaaagactaaagagtatgtatatctatagaataaagattaacgatacgtttactatgaaaatattagtaatattacatcagcgaaataaaaaaaaaaaagaattacattagaatagaaatataaaaagattaatatttttttatataatttatggaaatagaattttctattttttgactgaatggaaatagattcttttagtttcagggtgttttaagagtcctactctttatatctcgacaccaatcaactttatgattcatatggtctttgcaacttaagtatttgttaatttgcttaatctatgtaggttctattaacatctctaactcttaaaatttagtaaacaactaaatgagaattattatcaaacaaattaaatagtacgttactacaccaaatgagactttttgtcagtttcaaatcaacactaatttatcttaataatgtcggtgtgcatctactaaaaaactaagatttctggaatagtattcccgtcggtcttagcaaaactaggtagaattgacgttagtgaaaaaacgttggaagaagtttttcccgacattggaaaaccatcgacaatactaaacgtattgcggctaaacacatacttatcccgctaatccgaaatttattagagccaagagcaaaaattaaactttaaaaatacagactaaaaataataactttgtaattattaaactttacaatacatctaaaagaacacattttattttgggatctcataaatttttttcaaaatattacaactcattagtacacgccgacctaagcagcaaaagtggagattacaacatttccccctggtagacctaacgctcgtggtctagcttggcctgaacatgtacaatgcaccgtaaaagccctcaacctcatggctgatcaacaactgacttaccctttcctgcacaatagagcatctgtgagccaaggcctagcaagacaatataaatgataatatgaatatcaattaaaatcacttaagtattgatgttactgcgtctattgtctatttgacatagacctacnnnntacgctcacacgtctatttacaataacgccttagaatggtttatctcggttttaaatccgagtctaacctagttatgccttattcgcataactttttttatcaacatataaaatatattattgcattcatattcacttaanttctagagtaataaccctagatcacataaccgctaaatttagggtaataacactaattttggtttcccacatagcatatacataataacatacatgagctccactgtgctaatctctgtgtgctagtttactattttacctagtaatccaagtatgtggagattctaaatcccagggtgttcctgagcaagcactggtaatcttagttacacattattgggatttcacatatagagttaatccctaactcattttcatacatatcaataatcagaactcgaattaaagattaacacatagagctcaaaaagagctttccaacgatactaagaatgtccaaaatggagttcaaaatcaaaagctatggcaaaacgagaaaacataaaaattgggaaaacggggccctcgtcgcagcggccacaacctggtggagctcgctgcagtgagccatgtcgtggccgcggtgcggcgacagccccagaacccataaaaatcacaaatcttcatgtcttcgaaaataagccaaactcataccaaatttcatcaaattagcatacataactcaaaatttactctacacatatccattccatagttgtcattaaaatgagcttaacaaatagctcaaagaccaaccccacaaaacaccattaagcatacaatcaaggaatccaaatagcatataatcaccaagcctcacaaacctaagaattcaaacacaaaacctaaaaattcaagtgttttctcaaaattcaaacatcataatctcaatccaaaggttttcaaaactacaaggatgaatgatctagcattaacctaatagcacaatcaaatcaaaatcaccactatttacttcatttctaccaacatgcacataccaacttaagaacacccataaaacttcattgacaagcttaaaaaaatcagaagttacaacaaatgaaatggattaaagaaagttatcttatgatcttcaagctttaagcaagacaatacacaaagttcacacaaaaattcaagctttttctctcaagaatcgtgtttgaaaatagaaaataaagagagagtgagaagagaggcagtttaggggtttcaaacccagaaaaaatgaatttcattttggctaaaattttattttgttggaaaaatagaaatttaggccaaaagagcattttgcccccaaggcacacatataaaagggaaattttgtcatttccactaacacacatatatcacataattcatcttttctcatttaacacatgtaagccataactaaatcccaaaactatattttaggccccgaacccagttcggaccaaaaaatccggttgtgagtaaactgtgctgacttgtcaaaaatcacatgcagaaagatagaataatcatactatataataatatagttcataacacaatataccataatttttactattctcgggtcaaaattacaaaaattcccctgacacaccaacggggtcttaaatgctacaaatcactataattccacatattaaatcatataataatataatttctcgttaacacttaattaacttagttagggttgctaatccagctattaaactttaaggtatcacaaggcatgtcgacgaaggctttatcattctttctattccaaccctaagatctagttcatcctcatattcctcccaaacagctttagcttccacttgaacatctatttcaggagcaaaaattgtttcttcctgaaccatgaacacgaagcgtacataaacattatagcaacttcttgtaattttttggtcacccttgatcactctaatgcttttgttatcacaaggaaacttcattcacaaatttctgatggaagttacggccccaaaatcaaccaagacttgacatcctagtataacgttgtatattgtaaagcaatgtacaaccatgaaggtacagtgcttaaaggagcatatgttgttctcccctttcaatgtgaccgggagctggatttttcccatcgacataagtgtgtctccattgaatccttagagttaaatgggggagggtgacaaatcagcctttgttagcctaattaccttaaatgaaacttaaatagtatgtttattgagcttccattgtccatcgaaactcgagaaaccctcttgttggcattttaggcttctatgaccaaagggtcattgtggggtaaatggacttgcctaagattgtcctttatgaatgtaataggcatgttcattgttcgtggacgttacgctggtgactacactaaggtgcacatttcctccccatggtctaatgcctttaaatacctcttttgggaattccttgtgcttcctgcaatatgggggcctcctaaaattatggttgcatgttcatcaatgggtggtggagccatacctggatgatacagattacagcctgagtcgatggagcaattagggctggaagttgtgttccaggagcttgagggtggcttactccctgctatcttggaacgagcaactatctatgaacaacc

SEQ ID NO: 26579 - DNA, 1804 bp, Cannabis sativa
aaaaaaaacctcatgtatttatttaattatacctttggcttctgctgtagttacacatcataaaagtagcatgaagtaacctctttgatatagccttccttctacaatggtgtaccttggaattttatacattatccttctagcctcatttttattacataaaagttggccaatcatgagatgttcaacaattgaagcatctaggttggtctcgtatctatcattttgacatcttgatcagttggctcacaaatgcttggttggtagagtatctcgattggcaccacattgagtttgtcactctcaagttgtaaggccaattttgccaaagcatcgacattttaattttgttctcttgggacctactcagttttgtagtaataaaacttgcccccaagttatgtcaatttttttttccaaatattgtgccattttaattccctttttctggtattctcccaacacttcatttatgagtagttgggagtcgctaaaataatggatgtcctttgcttttgatacttctgtaattcgaagtccagctaacaaagtttcatatctacttcgttatttgatgcttggaatttgaatagcaatgtgtagtggaatctaaactgcctgggtgataccaagatgattcctgcccccgagccattttcgtttgagaatccatctacaaatagtttccaaagctcttgtacagaaccttgttccattccttcatcaacatttatcccgtcgattaaggagtctactaatgcttgtcccgtgattgttgttcagagatgataggtgattttaagttatcccaattcaatggacaactttattaatcgacctcaagcatcgggctttgaaaaaacttgtctcgatgactggttaataaggatttgtataggttgtgatacaaatttttatatattgtttaaaatgagatgcacatttacatagttcaacaaaatttattttcctacatctacggtaacaaggagttaggactgcatttttagtaatggaatgagattagaaaatcaagagaaaatatacttatttttgtacaacatgatttaatcttaggtatgtgcgtgagtgggtctttaaaaagtaaataaagagacttatgaataggtagtaggctgcttggtatacgagcttagtaaaatatgcaacttaatataatttagttatagcttggtgaagggggtagcttggtgaattaagcaagtcgatgtattagcttgctggaggtggcgtaatttaacctattttggagaaaatagaagttgtgtgtttattatctttcgatggatagttttgtgtaaaagaagaatgatggaatgggaacttggttgaaaaaacttacgagttgtcctctttattagtaattcttttatatgggtgacaacttgtagtgtaagtgtataacttatcgataaaaaggacttcagtggtgttctaaaattagagtagagtcatagatcatatcgatctatcaaatttgaatcagtatatatcttggtattaattttattattttactgctttaatcgtttctaaattttaatgctctgttaatctttatttttctctcattattgattttgatttattactcttgtcattgttaattatttagttgtttaaaatttagctattttcattctacactattagttataattttcccacattttctaatcaacataaattaaaaatatgaaaaatcacaattaataaaaattctcttgattccggtctctgtaccagatgacaaatgacatgtcgttagaatagtacggataca

SEQ ID NO: 26580 - DNA, 4377 bp, Cannabis sativa
aggctcccttactagttatctctgtaacttgataagggccttcccagttaggttccaacactcctgctactgaatctttagtgttcaagaacgctctttagagcaccaggtctcctatgaagaatttcctgtccttgacttgcttgctgaagtgccttactaccttttgctggtaggcctacagttttaggttggcttgatctcttttttcttttacttcttcaagggattttgttcgtaggatgttgtttgtttgttggtcataggtttttctcttgttagataatggcaccagctctacaagcaacattgcctcatagccataagctagagcgaatggactttgctcggtggctatcttcttggtagtcgtgtgggaccataggacctatgagacaaattctggccagtttccttttccttcctcaaggcgcttctttagggtgtccttgagcgttttgttgacagcttctacctaccatttgcttgaggatgggccacaacaaagaagcttttgatgataccatgcctgttgcagaaattagtgaacatgtcactgtcaaactacttcccattgtctgacaaaatcttgtggggaagtttgaatcgacttatgatgttcttgacaacaaagtcaaggacttttttggaggtgattattgctaggggttcagcttctgcccacttggtgaagtagtctactgctactatagcacattgtacacctccttttccctttgggagttgaccattaaggtctatctcccataatgcaaagggccatggagactgcatcatcgtgaacacattgggtggagctcttggaatttttgagaatctcgggcatttctcacatcttttgacgtaggccatcgagtcctcgatcattgtttgctagaagtatccctgtcagagtatactcttagagacgcttttcccccgacatgattgctacaaaagccttcatgcacttctatcagtagtcgcttgtcttcagccttggtgacacaccttaagagtggcatggaaaagctctttttgtacattactctgtctaggattagatacttagcagcctttctttctatctttttcgcttcattcttgtcttctagcaaggttctagtttggatgtaagccacaataggtgtcatcaatgttggagtgtcatccaacatgttgagttcttctgggatggaaatgttgggttcttctaggaaatgtattggcacaaaatttgccttgtcggcaatggtgctacttgctaaatggcaagtgcatctgctctctagggatctgcctgattgtgtagcctttgagctgacttagtaagtaggccaccattttttcacctcgagctatgtattcaccaaggactttattcacaattagtagagaatcactgaatatgtctaggtggacggcccatacttcatatgtcagtttgaggccagctattaaggctttgtatttagcctcattgtttgaggctttaaagccaaatttaattgctcattgggtggagctcttggaattttttagaatctcagacacttcttctttggctcttgcttttctcctaaatcttgagagatttcaagagatgagtttgtgctctcaactatgaagtgtgtaagggcttgacaatttatgactgttcttagttgatatgtgatctcgaactggccaagctcaatgcaatgaccatttgagtagtcagtctgaagctttaggttttcatataacctatcgtaatggttgataagtgtacacctttatggggtgtgcttgaaagtaagggcataaattttttcgaagcaagagcaaaatataagtcaacttctccataatttggtattgacattcaacgttgattagccttttgcaaatgtagtatacagggtactgtacgacgtcttcttctcttttgaggacaacaatcacaacatgttatgtgacttctaggtacaccctagcttttcattatcttggggcttggacaacacaagtggttgaggttgtttcttcagctcctataatgcattttcacactcatctatctactaattttttgttgcctctgagaatgttaaagaagggtatacatttttctatagacttggatacaaatccgcttaatgtagcaatgcgtcctattaggctttgtacttcaatgacagttgtggtaacttaatacacaaaagcacttagatcttgtctaggtatctttctattcctttggcgttgactatgaagccaaggaattttctggagcctactcgagaagaacatttaagggggttgagcttcatgttatagctgaaaaaggattttgaagcattcacctaggtcctctacatgcccccagcctttttggacttgacaagcatgtcgcccacatacacctccatgtagcagccaatgagatctttgaacatcatgttcaccaacctctgatatgtggcccttggattgttcagcctgaagggaatgactttgtagcagtacagacctaagtctgtcatgaagctagtgtgctcttgatctggtggatgcatctttatttggttgtaacttgattatgcgtccatgaaactcaagatttcatggcgttatgtggcgtctataagcttgtcaattctgggaagcgaaaaacagtcctttggatatctttatttaggttggtgaagtcgatgcatactctccacttttattaggtttgggcaccagtacttggttggacacccatagtggatacaattcctatgttatgaagttatggggtcgtagcctcttgacctcatcttttagcgcttgggtgtgctccttgtctagtagcctcctcttttgttgaacaggtcaaatttttggatcgatattgagtgcataggtcatcacagactggtcaacccgatcatgtctccatgtgataacgcaaaaagttctaggtttgcccttagaaatcttatcagtattgatttaatttcttgtgctaaacctttcccaatcttcagtcttcttgttgggaaagtgggatcaacctcaacttcttctaagtcttctacagatctgaagcttcctgtaggatccccaaagtgaagatcgatgtcagtgtccccactttgggctggacttcatttccctttgttaggctcgtcttttgggcccttagcaggtgtattctctttcttggctttggatagggccaagttgtaatagtgacgtgcagactgctggtctcccctcacgcatcctaccccatgcattgttagaaatttgaggcatatgtggtagatggaagttaccgccttcaggtcattagggtttggtcaacctatcatgtcattgaaggctgatggaacgtcaaatacgacgaactgtggcatcaaagttctggtggtttgattttctccaactgtgaggggtaatctgatatacctgacaggtgcgatgcttttcccaaaaaagccatacatcacttggttgcagggtgccaggtcggtgagttggagccccatcttttcatatattaacctaaaaataatgttggaggaggctccattgtcaatcatgcatcttgctactgtcatgttcctgatttgtgcagtaatgcccaggatgtcgttgtgtgggaaactgatttgagtagcgtcttcttctgtgaaagaaattgtgggctctataagttttggttgcctagagcccttgtctttaacggtcacgatgttgcttttaggcttgtgacggagtgtccgaccatagtgctccctcactttgctggtctcacatgtaatgtggggtctgtcaatgatgacccctaatgtcctgccaccggtggtggcattggatctctattttgggcaccttgttcctgagtttgataattttgcacatcaaaatatagggtggggattgttatgccttatgaggtattcaatctccctctttaaattttggcactcattggtgtcatggccgaagttattgttaaatcgacagaacttcgacatgtccctcttgctcagctccctttttatgggaaagggctttctataggggactattccctacgtggccatgaagatggcctcaagtttctccatgtaaagggtgaaacaggtatacttctcctccttgtggttttgtggcgtggtagacacgctaaacttcccctttttgccaatactcctctcacatctatgcgtgttgcatttgtttctaatcgtcttgccattagaggtcttggtagagttactggtgtctgcctgtgcacttggtaggtcatgagactgtaggatatctcatgactgcttattgttgacatgccccgtctaggcctatcgtatggctttgtaacgtccccgcttcaagcctcca

SEQ ID NO: 26581 - DNA, 1300 bp, Cannabis sativa
cataatgtaattatcattacattgtaatcccattacatcactttaaaataaatcaaagattaaaatagtaattttgatactattacaatctccattacatcaaactaaatatgatcttacatgtgatattaatctttcgatgttttattagtatatgctggtggacaaagtcatggacttacatttaaacagtatgacagatgatacactttattttcaagaagcgagcatgtatcacactatgtgcttgtttaaacgtaattgatgaaaataagatatattaatctacaagttttgataagggttacgttgctctgacatgtctccacactagtatatgtataaagataaagaagaacaataacataaaatggcatcaattcttaaaaaaataaacattatcacatgtattgggcttaatccaaattcccaactcccaacactaccaatgacaacattctaatttttaggttaccgcacccaaatatctctaatggttatctctcttattaggctagcacacccaaagatctctaaaaggttagcttccttatcatttaactcagcaatcaaaattaatttatttgttccgcagatccttaaattataggtttttggcaagttggtcctcaaatattatttttggcaaattggtcccaaatttttattttcttagaaacataaagtcctcactcttaaataatggtattttatttatttatttattaattttaaatagttttatattaatatattaccaaaataaataaatatattttttaaatatattaaaataagacaaaaaaaaacaactgaaaaggcttaaataataatattattattttttataaactatcaaagtaaattatattttaaaatttattttcaacttatgcttcgcggagaacccatgaaattttactatcattgatgcaaaatttaaataatcaataaatatatatatacaattaaaaaagagtaaattgcggcataaatacctaatgttttagatgttatgcacttaaataccttatctttatttttggaggccaaaatacctagtgttacaattctcttacacccgttactaccaattctgttaactcataaatatggacacgtggagggtccagatgcattacatttatttattttttattttaaagcttaatattcttaatataaaaaactaaatgctacttgtttcgaaaaaaaaccagttctcataataattttcacatatactgcactcgttcactaagttatggtaatttagttttgcatcttttttttttttttt

SEQ ID NO: 26582 - DNA, 3641 bp, Cannabis sativa
ggtccgacgggtccgatggggggtgtaatgcatgtgcgtgtgctgggaaaaaaaattttgtgggtccgacgggtttgatggggaccccgattggggtccgatgcatgggctgaaaaaaaaaaattgggtccgacgggtctcatgggtatcttattttagccctgggaagctcggcagtaaagagaagaagagaaaggggaggggtaatgtaaatgggggtattttagggatattttaaaatatgtcatatcccacaaatatatattaagtgtttgttatgttgtgtttgtttagggaaaaaatattaggtatatgtaagtataaaaaatcaaattttccttatatattagctatagaaataacgcatttatgaatagtgatttatttttcaattactatataaaatgagaaaaatggtttcaatattattttatttttaaaagaatcattagtctagtagatttttatgagggaaagtagtaagaaattaataggataaaagacttggttcaatgtaaataattgtaatttttttattctgaaatgtatatgaaaaatcttaaatatatttgtaattgttttagattttataaatcatactatactaattttaactttgaattatcaattttttgattcaatctaaacaaacatgagaaaatgtaatccttagaattttatttttttcactcttaaaaatccaaagttcaaacaaaatctacaagtttgatgacattgacgttgtaatatgagctatgaactatctttaacagaaaccaagttacattcctcatacatagagtgtaaagctaaaatgaaaaataataataaaaaataaaagatgcatcttatagtcaaccttattttaattttttttttttttgaacttttgacatgtagttggagaaatttctttttattttatttatgcgtttgttacagctacaaactttaacttattttcgataatttaaataattcatattttttttgttaaaaaaaaaagaaattattgaaaagtgacataatttagtacaccaacatgaataaaagtagtttactaaaatggcagctctagctgaacaaaaaaaaaaaaaaaaacacgtttcaacctaatttggtagatatcaatcgttttctcaaattattgtcgtcctatattattcaacaaaaacaaatgatttccttgggctatatataattacatttttttttttaaaaaaaaaaaagaaagattaaaaattaccgttcacataaattatttgaaagagaattttagacaggtttaattttatatagttaattattgttcaggtaattttttctttttcttaattcaagcgtttatatattacaatatattttacatggcacttcaactcagggtccaacactcacacactcaatggttattaatactgttcaggtaattagcccaccggatattttgcctaatattagcatgcttgcaacttcaaatagcctatctacactacatcgaccatatttgtgcactatataattatctcagtcaactattacatgattaatttataacaaaaataataaaatctaaatgaaaataaagttttgaattttaattaattgataaatatattttttttaaaacaataattaattgataaatatattgattcattaatttattttttttcgtttgctaaagaaaacacattaaaattctgaaatgagagtgtcgtttggtaatatttttgtaatctaattttttaatcataaaatgaaagtaaaatttttgttttttaaaaacaaaaatatgttctgcaaccacttttattttttaattttaaaacagaaggcaaaagtgtgtcctgtagattttattttcatttttatttttgataatatttaagtcgggtctaagttcagagttgaattcgggttcgggtcagacgtcgggtttaacgttagggtcgtggggcgaatttgggtccgaatctggttggtgtctaaaatattgatcaaaaaaacaaatctgtttaaaaaaatattaaaagtggtcttttttgtttttaaaattttaattcccaattaaaaaattaaaaagtgaaaacagttttatagaacatgtttttgaaaaatattttcactattctaattttaaaaacagaaaattaattttaaaaatgttaccaaatcccaatgactccatataataatggggtaaatgtcataatatcttttttatatatataaaaataacatattttctttaattagattaataataatattaatacataaaaaaaagtaataaccattacttgtaatttttaacatttatattaactatctatctgatcaccgatcccaattcatatttaaatacaatgccttaagttgtcagttcaaaacttcaaattccctttcccttgacaaaaaaaaaaaaaataaaataaatattacttttaatggtgtattttataaaaattacttactaaattttatttttattaaaaaataaaaaaaagagtaaatattatttttgattgtgtattttataaaaattacttattaaatttttatttttattaaataacaaaatagattctatatttttcaaaataatacaataataattctatattaatatttatcaaaataaaactatataataatccaactttaaggtattatgataaaactccttaaattttctacatgtgttcataaattatcttcaagttcattgtattaaaaaataattattaaaaattgagtttaaaatcctatttgtgttattttaaaaaatataaaatttattttattatttaacaaaataaaaaaatctaatatgtaacttttacacaatacaataaatgtaccaaaaaaaaaaatcctctgttaataatcgacatgtatttttgaaagagttgtcatttgttcttatttttcttttaaaaggattataactatagagattgttttacagcactaaaatgtcgttgctgcgaaactacaatcgaaaattctaaaatatttacacaatgtaataaacactattatgcaaatatttatatacatatatttgtatatttttaaaggactcaagtaacacagttcggcaccgacatttaaaatagtatttgagaaagaaaatggtcttatcaagatcaagtgacgtaccaggattggcagagtccttgaaaatggattcaaccatggccataacctcctcttccctaatgggcctaagagcctcaagcatcttgggtgtgaaaagctcaagtgtacaaacctttctgaccttaacatagtgaggcccataatcggcccatataagatccttgccgcctttactgaacctctccgtcgatctggtacggtggcggtcagcgagcttgttgtcattgtctttgagtacctctttggccagcgccgagttacagacgacgacgtttagagatgtcccaaaccaaactgatatgatgggcccatatgactgggcccaatccgcgaaacacctgaaccttaccggtttaatgtcatagaggtttccgacgatgggcttgggccgtggaccggggggaatcttgtatctgagtcggtagaagagattgtatgtgagaaagaccacgataattgagatgggtatagctatt

SEQ ID NO: 26583 - DNA, 1876 bp, Cannabis sativa
tcttcttcttcttcttatttttctctttcttgtggttatgttgtttgttcagtagacaaaaatgagtcccaacaacactttgaggttgaccaagataaggccagggatgcccttaaacagctcgaccaacagctgcaatccatctcccaaaaacaacttcggtctcctaaaatcaaaggtaactaataagaattataaaattttatgtaaatgtattaatatatacatataattggttacgtaaaaatttttattaataaagtaactttaggcaattgtattatatgctgatatattactaaaaaaatcagaatcaacaagatagagaaattataccgtttataaaaataagaatgaaaatcctatagtactttcaactaaaatacaaattcaaagtagcaaaattacgataaagaattcaactgctatataccaccatcataattggcatttgattatgaaaacactaagcatttagaacttttagaacttttattgaggtaacatggacataaaaattgatctaaattaatatcgtgaatatttaattaagtgaaaagtttagtaagttttaaaaatttgacatagttttcatttgggtgagattgaagacccatatatacttaaatatttgtggttttgctctcttacttattattgtcatattatgagtagtgattgaattaatgtgggactaatgtttatactcaaaaattgattacatcaattcaatctcaaaatacataaaactaaacttagagaaaagaagaatcatgagatttaaatttgttgtaaaagaaactggtatgttttaaatttatacctagtactcaatcaaactaagatgctttagtattagtttttataactagagaatgaatttgtgcgcaatcttcaataaagttaattaatttttatctaagtgatatgtaaaatatattatattatttttaatatataatagttaagatatataaatttaactaatattaatattttaataattaatctatttttgacataatgtccattaattctattaatttatagtcataaaggagatatcacctcatgtgatgtaataaaataattaacttattataatatggatatgtattatgttggttgtttttataaaatagttaatgttatgtttccaccatttaatatttttggaaaaatataaattttatcagataagttattattctatgttattcttgtaaatgtatacttatatttttttatatgcttgactggtattatatatcaaaatatacacatgtatatattatttttgatgaaaaatatatataaatatatacttagattcaaaacaatgaaacaaaatatttaaaagatacgtatttcagatctttttatagtattttaattttattgttttaatattataaaatgtatataattactacattatcaatacttttattgttgagttgttttttttccttaaaatatataacatacaagacaacttagtatagaaatactaattataattataagtatattttttttctttcttaaatgccaacataatgacatttgattttgtttgttatatatttttttataattaaaaaataaaaataactacaaattagataatataaattgttaaaaatagaataaagtttaacttattttagatgttaattatagtcaaagtatataatagtccatatctaaaaaattattatattatctaaattttattttcttacacttttttatattaaaactagggaactaagccgcgcttcgcgcgggttcaacctcacttttataattcttttaattattttaatgtaatttttttacattttatttaaaatgtaatttaaaataaataata

SEQ ID NO: 26584 - DNA, 2714 bp, Cannabis sativa
tcgggtggcgaatcaagtttcttccaaatggaagatataaagttgtacacttctactttacaattctttcttcttttaaatattgtctgatacattgtcatggaactttactccacttgtacacaaagatttatattatataaattataacactaggaaaggaactgctaccttactttgtttatgtctaacatttttatcaaaacgaaagcagactctctttctttgttttctcttatgtcagaagtaaagttgcttctctcatagaagttagtgtgtttatttttagagaaatattaaaggacgccagtagtgcttaatactctcctatgtgttaatatcgctatttgtccaactaagtatcgggtcccttatagtttaatatagtaacttttaaagagtatcgctagccaattacaaaacgacatgtctagagatgctagacactattaatgctcaatagtaatgctctaatttttaatttagagaaaaaaggaatatttttcttttaattattgtgttagcttagttgtccacaatattctcatcaaccttaaaacaaagatagaaagaataaatattatttaaaatattttaaaaatttacaaaaatgatattataactataaagattaactaaactagctaacaacatatgatttcaagcatagagattaactaagaaattgtaactaaactagctcaaaagtactattaatttgtatatcattggtaagcatcatgtgctccaccctccactcaagcaaacttggctaacaacatattcagcaagcacccttgttttagcaactaaagcagataataaataagggtaaattaagtacaaaaaaagatgcagacttaagaaatttttaatgtcttctttgcctttatcatcaacttgtcatatcttatctttttctacaaccatattcattgccccaagttcatttgtcaaaatatcatacgtgctcactagggaatcaattcctttgaaaccattttcttgaagaaaaagtaagcatgctcaactctcccactcttgataagcccagtaatgagaagatcataagccggaacatcaatacttatattggagttatacatatgatttaaaagaaaataaagcaatttcatcctctacttcttgcagcacatcttcaacaaggcaatgtatatctttagattttgtttgcaacatctatcttccattttcttcagcaacttcaaacctttcgactcaccgttgggtgagttaatacattgacaggaattacatcaagcaattcagcttctcttatggaggccaagcgggccaaagcgtctgcgtgtgagttatgagcacgcggtactcgagagacaatcacttttttgaatttttgcaataacttgcatgttatggcgaggtacttagccaaacgcccgcctctggccagatattctccgtttacctggcacacaacgatttgggagtcgctgaaagcctgtaagtattcgatcttcatctcaagagcaagctttaatcctgcaatcaaagcctcatattcggcttcgttgttagacacagaaaattcaaatcttaatgcagcatgtaccttaatattgttggagctgatgagtattatgccgccgccagagccttcgctgttggaggctccatagacgtataaaatccaaccttcgccatttggtacatcagtatcaattttttcttctataagtgccacttcagtgctcgagaactcgagtatgaaatctgccaaaggcttgccccttaatcccagatcttggtttgtacttgacatcgaactggctcagttctactgaccatttcaacaaccttcctgatgcttatggtttcgctaaaacttgtcttaaagggtagtttgttagcacttcaatgttatgggcctggaaataaggtcgtagttttcttgatgctattaccagagcgaacgccagtttctccatttgagggtaacgggtttcagcatccagcaaacgcttactgacatagtaaaccggatattgcctaccttggtcttcgcggattagtactaaactaatcgcatattcggataacgcaaggtaaatggataaaatttctccggacattggttttgacaggattgggggccgccccaaatctgttttaagtgtttggaaagcttcttcgcacttctcggtccattggaacttcttattgccttttaatattcgaaaatgttctttgcatttatcagaggatcgtgatatgaaacgatttaaagcagcgaatttacctgtcaggctttggacttcttctggcttagtcggagatcgcatctttaataatgctttaacattcgcaggatttgcctcaattcctcgctgatttaccataaacccgaggaatttccctgaaccgaccccaaagacacacttaagagggttgagtcgcattttgtatcgtcgaagtatctcaaacatcgcttgtaaatggttgacatggtcttttgcatgttgagattttacgagcataccgtcaacatacacttccatggtttccccaattagatctgtgaacatcaaatttaccaacctctgatacgtcgcacctcaacttatcaaacaaaaaggcattaccttgtaacaatacaaacctcgatctgtaatgaacgaggtatgttcctgatctggttcatacatcgggatctgattatatcccgagtatgc

SEQ ID NO: 26585 - DNA, 2477 bp, Cannabis sativa
acacacaaatccacaaatccaattaccaattacaatgtggctttccaaacgcacccttagttcttttctttcgtttacatgtttctaaatggtcgtaaaattaaacaaattaaataatacttcacttttgtttcttatatttactataatgtgtttattacatgtttgtatttgtatttgtgttttatgattttcctttcaggacagtcccaggttaagacgaattagatctgtatttatggttcatctaaactcagggtccaatatgtataaaccccttaaaatatatactaaaaaagttaataatataactaaacagactcacaccccaatccatccaccccaaatcctttacaatattatttagaaagttcaatcccacctaatttgtttaacaaactaaagaaaatatgtatatatatatatatatatttatatatatatagaggggctattttttttttttttttaattttatcaaactggtcttggtctctttttttaagggacggcctacttcgactcacggtttagtaaaactttacttatttagtaatttatttaattagaaaattaaatttgataggaagcatgttagtaatatgttagatgaatagtgtattgcctaaaattgtatgtatgcagtagtaagattacaacttagaccgctgcttgaccaagctgacttatgaattggcatgtctgtcctatagtatggacatttggcctaatatataggatgtcaagaaggtcgagcctagtagcagttggagagattagaattccccgcacctccgcaactgaagtagatgctattggagggctccaggaggaagttatgttattccgccacataatttgcaagatcaagagcaaaattttgtagaaaatacaagctaaaattcaaagtcaaggtgagaaaattcagagattatggcagcatggatcttatgttgcatctcttcccttattgcccattgttcctgccatggtgtttctagcagtacgatttgttgttgataatcagatagagtcaccatacaagaactctcgagaaaaacaagttcaaggagatcagtggggagtttttgaaggcccttatattttctcaaaatgtcctagctgtaagaaacttcatcaggatgagtgtaaaagaaaagcatgtttccgatgtggcgtaatgagagattacaagaggaattgtccacgaccagatatagaaggatcatgttttaagtgtggacttattggtaatttaaagaagacttggtcttggctgaaaaaatgaagaatagaagaaagaaggtatactcactttagtctgtgaggttgtcgttactcaggctaatgcagcagctagtttgactcgggtgacaggtcaacttcttagtataatttctcttgttcaagtattagttgactctaaacatttgcatgtggtagctagagtgagtaataaactgggtaggctttgtgataattataatttagggttttggggactctattacctagcgcagaatcagttatctccaacaagtggattaattaggtctatcttgttaagggttagaataggaatggaagtgttgatctggttaagatagcttaacaaactttggtattatttcaagaatggatttcttgcataagaaccataagtacgcagttactatggattagaagagaaggagttgacttttcagttagatgatgaagaaccttttggttttgaggaattggtttggaattagagtactgatcattttggtgttacagattcagaacctactgtaggatgatgcatagaattcatattagttgtgattgactccaatagatttgacgagagagcgaggatggagagagaggaggtggcggtggtggcggtggcagaggtggattgtcgcggttgagagtgagtgagtgtgtatgtgtgtgtgtgagagagagagagagagatttaaatgaattgaataaaagggttttatatattgggagaatagctgttggtgttcagctgtaggctaaagtatagccaacgctatagagccgtcaactatactttagcctacggttaataatcgacgactataatgcaacccaattttatatttaattcactatcaattgaaaagctacgttattgcttaacgaccctttaaaacagatgggtacattcttaagtataggcgttggtttttaactctcacttaattttattagtaacgatttttgaaaaaaataaaccaatttaaaaattgacgagaatagtattttttgtagtatatcaaaatacctcatggatattaaacaatataaatgatatgatgactaccattatttttttttttttaaataggtgaataaaataagatatatcaatgaaaacatgcatgtacgaagactaattaatttattgtacatagcttgaggaaacttaaagttgctaatcgacatgcaatttataaatcata

SEQ ID NO: 26586 - DNA, 2036 bp, Cannabis sativa
aaaaagattaatatatagtctaataagagaggacaggaaaaagggtacattaacattaactgttatttttttgagaaaaaacatgaagaactaaagacacttaccccaaacgagtggtgctgtgtccatctacctgggaagcttgtttgtatgggcacactctataaacatacctgacccaagaattttcgaattccaaagattagtatcatcgaaattatcgaataaattatgaaaaagaatgagaataaacagtcaaaacatatattacttgttttccttgccctcaaaacattgaccgtagaatgaatagaattccttttccactcctgcaatttacaaaatgagtttagccaaggaaaacgaaactccataattataaatgcagataattcttactgaccgaaatcatgctttagcttctgtgtcaaactcgatattctcgattggattttagacaatttattactggactcatcgtattccttacgtatacgagcagcatctgaggaagccaacattatacataaatactttcggtacacttatttccaaaatcaagaaacaaaaaaactgaaaaatcaaaagcttttgggttatacctgactgattcactggagtctggaataaattaacaacttgaagaacacttcgcaccttttgttgtattgtctccaaccaagaaggattacttgaggttgttacatctaaaatatagtttaaaaatagaaaatagtagacatgaagtgacaatcagcttattaatcatggtcaaagaaattgttaaatgaaatacaaagtagaagatttatttaaaacaaacatttaaaatacctgaaaagtcagaatcaacatctgagtcatacttgtatgaagaactagaatcttcaggatcctcttctctaatatcatgatcctctttcatatcatcctctaactcatcctctatattgctttcatcatacttatggtgttcatcatcggtttctgaagcatagccatcatcttcctcatcatgtgtggtgtcctttggcatctcttcagtgtcttcatatgcttcatgattattattattattatctttcttagcattggtatcctctgtttgttttccagtgttttctcctgtccaacgagaagcaacaagtcgacccaattcttcccttgataatccctcggtattttcagatgcatcattaccaccctaacataccaacgaaaaaacaacaataaatataatcaccttcaaaacacaaagtacaaaaatatatgactttgaaaattaaaaaaaaaaaaaaaaacaaacaagaaatataagtataatgcacagatgaatacaagtctcccaatttgttcacatatcaatgtcatccataacaaaatttaagtgactcctaagctcccaaaatttaaatcctaaaaccatcatagaaacaaaatttactataaaatcatcaattgcctgacaatgcttctttgttccgaatttcccatgcctaaaaaatattgtggtaaaacaaaagttatataggaccaagctagccatggtcaaccattctattataaccccatgatacgtagaaccttaaacccatctttagcgcataataggaaaaagtacggatatttcaaacatgcaatagagataaaaataatacttcaactgcatagatggcaattggcaacaatagtaaaacaaataatggatgtactactttttagtgagttcaaattttgtaaataaataatcctgtagaacatattgtacatgtcaatcaaatagagttggtacgtggatcataccgtatctttgacttcatcaggggacaccttgcttccaacatcagttccagtttcaggcatagctgcagactcttctatctcttgtgttgtgtgctaaatagagaaacattgatgaagaagaggttgagaaaatgcgaggaaagaggaaataattgataattctatatttaagtaacataactggcaatagttgtcttatacacagatagctataaacaatctacctactcaat

SEQ ID NO: 26587 - DNA, 5463 bp, Cannabis sativa
  modified_base (3766)..(3777): a, c, t, g, unknown or other
  modified_base (5435)..(5438): a, c, t, g, unknown or other
actcgctccctctcgagataaccgaggtgtcccttcctcctacagaggagagttataatccttggtcgctcaagttactgggcagattgagctgattcatgggcatcgtcctgcccctttacatatcattgaaagtgtcctcgcgttatgagaccttctatctcatcttttaactgacgacactctttcgtggtatgaccaatatccccatgatattcacaccgtttagttgggtcccttttaagcctcgcatgtttcataggctttagctcgctgaaaacgatttcctgtacatgtgcgaggtagatattttcttgagtgtcattgagctcggtatatgcagcataaagggggatatatttgttgcgtttcttttgtttcctatccttgggcagcctttcagaatcttctttccttcttgatcttgaggcttttgacttgaactcttcaacagaatcatatcccgattggcttccgagtttcccgacttgatgctctctgaacttattctctaacttgtccattcacaaatgcagtaaatccctttgttttggaccgagttgttgatgaggatcaggttttctcaagttcagatgttctcataggtcactcttgtcgtgactactttcgaaccttgctcttcctcttaaggtttgattcaccttcttccccctataggtgtttgtgtgagttcctttcttatgagcttgaagagaggcttggcgatttccgtccgatgttccacatatcccaggctacatccccagattttcctcagtttcctcaagttacatctcttgagattatatctctgggttgtctcctgccccttggtttaggagttgcgaggtttgcctcgtaaatctcttcttccaaggtcaagttgatttcgggaactattcctttgcgttgcccttactgcggctatttcacgctctaattcgacattatgccaattttcttcctccaatcgacgcctaagatggtgattttctaacttcacgatcggtatgtcccttgttggatcgtaggcgccatcctcatcaatctggttaggaagtgaccagtcattgttcacccaaggtccttcaagccagggaccccaatattgggttttcccagggcttgcagtctgttcatgtgatgactcaatagatctctgagggcttaacggctctttccagggggatgattgattccctaacgaggattattttcttcggtgtcatccattacttttatatcaggaggctttttttgagctttttcacagaggctctcaatgaaagcaccaaaatattaacgcagatttgtgttaaccaaatttgggccttatagtatttatttcaaataaaggctttcaaaataaaagtatgaacatagggttttttatgtggttttgtagttaaaattcctcatagtccacgagtcaatcttattaagatttcggattatttttcagggcctctcttgtataagttttttcgtccccttttcttatctatcttgccaatatttataataatatagtgagcagttaattacaaagttgattgtaatctttacagcaattactccctcaaatcatgggatttaagttacaaatcatgctaagtaaatgcaatttttatttagaattcacacaactatgaatgtcctgctttattcggcagagatgagcgcacattaaagatatgcggtaagccttatctcatggggatgcctcgctgagtataccatgttatacacgctaagtattgttattatatctcctccacgcgacgaggttaatgcctcatcatgcacacttgcatttacatggtttctcgtcgagacacaagtcaacagttagtacatttttatctcgtaagactgtctagccagcagagttttaatcatactctacaaattatgcttttaacgagttattccacatcaagtgtactcatgattgcgtgtttgagatcttcattcttcccagctagacacgtgtattcttttgatgtgttcgccgaattttgggtataacaccaactatcaaacctatgagttatacggtctataaggaaattatttcaagtgtaaaacttatattggttatcctggaaagttactagtgatgtacattctgtcctaagtacagtaggagaccatccacagttattacctcgggatgcatcatcttcagcttctcgaggggttactttgttcacaaatggatacgagctacatagtccttatcttcctcatcagacagggattgggacttgttgccattttgagtattttggatttttaaagtcacaggtcgtttgatctttgctaagaagattggcatccttcaaattgactttgttcaaaaggaagtttgtagattgcaatccgagtggaagacccagtagggttttatgccgcttggccatctcaggggtggggattggcctctttgtaaccgatgtcaacacaatagacaaaaataagtaaacatcatcgattaactaaaaactcaaaaccaagtttttaagaaaaaggttaaacttacgtattatacaaaaggttgttgtgttgacgggggagagactagtcgtccaaaagaattcatccttaaattctattttgttgggcagcctcacgataatcctgtgatcatttgtatgggtatcgaggtagtaaaaatctcccgagcctcacttccttgcaggaacaacttttacagaataaaaatagacgatttcaaagggagtaggacactcccatcccataatttgctataagacttttaggctagccagaattctgtaagagcttgcaatcaattgaaaaggggcaattccaagatgattactggattccttataatactctttcaaaggaataattgctccagccctaatgtgctcaaggctccaagcgcttatccctaatgagccactagtactagtgccatcacactcctcgcgaattaccctttctggtgaaaagctgttatattctctcaagtttggattagaatttttggattttcgatttaaatggaagggctaattccttaggacattctaattctaggaaatctaacgttgaaatttcaaaaccagattatgacatttttacaaaagaataatcccaatttttggaagaaatttgtttaaactaaaaacctatgaatacgataaagctaaatttttctctatgtcaaaccctagaaattacccaaaaactagattgaaattatttgaaccaaacaaaatgaagaatgatgcaattagttataaaaataagaatatcaactgaggaaaaagaaatacccagaaagaaatgaatgaatcacttactggtcagaaatagatttttgcagaaggaagaactgtataactagagttaagatgaatgacaaaatgtaccctgagaattcctgagattgaagattaaatccgaagatactcgcaaaaaataggttaacgataaagagggcatgcaaggttttgagaaatcggggatgaatttttgcagaaaagcttcaaagtttcgaaaggcaggaatggcaaaatagtgtttttttttcttaagttgaatactttaaagatgaaaagatctaacggatgggaacatgtaagaattggaaaagatgggcaatttatgctaatgatgtgcctcgaaatcatgaaccgccgaaattcaaaacatgcaatttttcaaatcgagatcaagacaaaatatccttgtaatcatttaaaaaactatttttattaaaaaagaacttttnnnnnnnnnnnngttatacccgaaattcggctacacttcagaagatgacacgtgtcaagtagtgaaatatgaaccactcggtataatgaatttatataatttaatgcgaaggtaaagtattactcgttaaataaaagattaataaagaatattcataactcgctgactatgtagtcataagcgagacaaggatagaaaactattaaaacttacatcgacgagatacatacctgcctcgaaatacacaggcccaagaagatctcatttattctcaagaataaatgtagtaatgcaatgaaacctcgaatcataaataagtgtgacattcactttgctattaaaaaggaaattgacaaatcatccgctaacacttagcattttttctacatttaaaggacaaggacaacaacttggagatatacaaatatgctgttgtcctaatcaacattgaccatcgacaagccaactgagatgctattgtccaaattggcattaaccattgaaaggataagaataacaagcagttatgcaattattaattgctatccaatacgtgatctaatgaaatgtgggaattaacaacgtttcattaaacggttattttttgaatttaaatgtaaataactgccaacctctattcctataaataggggcagatcccacagaaaaaggaacgaagaattttggagagaaaaaacaaaagtacgattaattatatattgtattgaatattcagaaaatatcttcaataagatagactcgtggagtatgcaaatttaactggaaaatcatgtaaaaatatctggttaactaatatattaattatactttaatttctttcttataatttctgtgtttaaatttattacaaaaaggcttattattggttaacgaaaaatctatgttaacaatatatatatatatataaagaaaaggtatgaaaaagtgatgtaacattctaaaattattttatttagctctatttattttctccttaattctcttattttttcttaatttttttatttgaaaaaataactttatttgcgtttatttatttattttttctttacttctctcatgtttatttttttattttttattcaatttaaaatttctctatatctattttctctaattttttttcttatttcaaaccacatatataatatttacttttaataattgcacatgaacgtataatcaagctcaagcatttattttataggtttattaataaaaaaataatatatttatatataaaatgtctacatatttaagaaaaatatattaaaatatatttaaatttgaaccggattatttactaaaattataatttttactattctcttatacacttttaaatatctcattgctaatgtgtggaaagataatagaatatataagaggaatgagctactccttccattgccaattcgttttgagatggaacctcattcatcttatctctaaactctaacatggtatcagagcaaaaaaagaaaaaaaaagagccaccaaaaatccaaaaaataccgatccaaaaagtagagcaaaagagccacttgtgataagggatagtgagccaaaaaagagccgcttatgatcgagttgtccaagatggtgatcaaataatagctaccatcttgaggggggatgttagagagtcnnnnattgctaatgtgtggaaagataata

SEQ ID NO: 26588 - DNA, 6313 bp, Cannabis sativa
taaacgtggtaaaaaataattaaaatattatttcaagtatcacgtacaactgattcttttattattattattatatcttaattttttttaaaaagatcaaaacatacacagagttattatttttattattattattattatatttttgaaaaaaaaaatcaaaaatattatatatattgattatattgattgatattttatgtatgtatataaactaaatttataattatatttgatttaagttttaatatttttttgaaatttatttattttctaactttttctttaaatattttatatttttataaaaaaaattattaaaataatagtaagatatcaatttgtaaatatatgtgtttttatagaaaaattattaaaataatagtaaaatatcaatttgtaaatttatgtttttcttatagaaaagttattaaaataatagtaaaatataaatttgtagatttatactttaataaaatattaaaattgagagaattaaggagagatgagaaaaatagttttggaataattttggaatgacatgtcaccgcctcatacttctcctatatatatattgatgatttataggctgacgatttagtcacacaaatattaatttgcgtgcccagtcactcactaaaatagcttatatataatattaattaaataattttttgccatatgttatttatttttatttttttgaaaatgaaaaagttcatttagcacccaggaaaaaatggggcagcagggggtgcatcctccccttgaaagtgtttagcaccctggctagatctcctagctcttttcgctaaatcatcaacaaaagacatagcattcctactaatgtagataaaactacaactagaaaacgactttaacaagtctaaaaccatgagggaaacccccctacttctccaatccggaggacacaaagagttattcaaagcattaactactacttgagcatcagaaaaaatgatgatatcctcccagccttgatctctcgcccatgtaatagccatcaaaattgcttgaattttagcatccataggagaaatggccttctccttaattgttttcacttcccactttgcttcagacctattgatggagagggttgccaacccagccacattctgagaccaagaagcatcagtaatcatataattgtttggaaaaacttggttggtaggccctgagaaggtggtactactctgagctgcaccaatcgtatcctgcagattaggggagaattctttgaacttgtgatggacacgggcaagtatctcattgctgtccattaattttcctttggtcctgttcgaatttctcgcaaaccaaacttcgctgaatatgcagcctgctacctttagagcttcaattctggtacttttggggagatcttttaccagattttccaagaagttgagcatatcattgccaggaatttgagatgagaggcaggggtacggacccgtaaaccagatggcccgcactagaggacaatctttaaagatattcacactagattccacttcaacgtcacatagcaggcagtccttctctagcaagaaatgcagtttatccttagtggggatacaatcactgatcacccgccataacatgattgccaaacggggatgaatacccgggttccaaatccatctccagatttctctcctattattgaatcgatgttcctggtccaaatggtatgccgatttgacagagaaattcccatttccattacacttccaaacaatactatcctgagaagaatatggaagcctaggaatatccaatattcttttccccaagtcattaccaaaaacattgatgaccaaatcctcattccacttatcccccaaagagatatctgcaactgtgtttaaactaggaaaatgagtagaaatagtagtcattaggtctttaaactcaccaaactgcatccatgagatccatggttgattccacaggtccactgatctaccataagagattaaccaacaggatcccttcgccactacgtttcgagtatccagaatgtttttccacaaagtcgaatctccgtttttctgttggactgtccagaatgattgattcctgcagtattttagaagcaagcaattcacccaaggcttcttttcttgttgagccaaactccacgctagttttgagagtaaagcccgattcatatcttcaaatcttctgaaacccaatccacctgattgttttggctaacagatagtgtcccaagattttagtgccagaaatctttccttttccacattccccagccaccaaaatttcctagccaaagcatctaaagatcgactaactgaaagagggattttatttgttgacattgcatatactggcatagctgctactactgaattaaccaaagtagttctaccagcaaaagatagaagtttcattttccacccttctagtttttgtttcatcctttctcttaaattctcatagacttccttctctttctcttgaaaatgaaaggatttcctaaatgtttttcctccctcgaagcctggtggacttggagaagcttcagaatatcagttcttctttggtgattcagattgttagaaaagagaacactcgattttgctctactacatttctaaccagaccatctctcgtaggtagagagaatttcagagatgttagtagcttccttctcgtttgcccttaagaacaaaatagtgtcatccgcgaacattagatgggatataggaggagccgtcctagcaatctgaaccccgtgaatgtctccattactttcacctttcaaaattagttttgacagcacttcctggcaaaggagggagaggaaaggagataagggatccccttgtctcaacccccttctcggaaaaaatttcttatgaggactcccattaagcagaatggagtaagagactgaagtgacacaggccatcaggagcttacaacttttttcattaaaaccattagcaataagaactcttaaaagaagagcccactccatccgatcataagctttatgcatatccaactttaatgccatctgacctccattgcctttctttcttttgatcttgtgaaccaattcctgagtgagaaccgaagactccgctatccacctccccggaataaaagctgtttgaagtggagtaatcagcccatccatgagaggggagagacggtgtgcaagaatctttgcaattattttgtagataaaattgcaaagactgataggcctaaaatgatccactttgtcagggagttctctgttggggatgaggcaaatgtaggtatagtttagaaacttattcatctccccagtgacaaggaactcttggaccgcatagcagagtgaacttccaacagcatcccagtaatgtcaaaaaaaaaaaaacagtcagaaaacccatctggccctagtgcttttaggggatgcatcatgtagactgtatttctaacttcctccttcgatggaatagcagtgagtttaagattatcaccctcatccacttttttgtcaaacaacgaatccagacacaaagggatattcgactcatcagatttgaaaagatcaataaaatattcgttaaagatacctgagatgcgtctcatatcctcccaactgtttccctgattgtctttaattgtccatggtttcttcttcttctaaacataattgacagatggaagaatttagaatttctatcacccagcttgagccaaacttcccttgatttctgacgccactgattctcgagacgactgtattcttctgctagttttgcttgcagtctacattcttcctcacacaaatcattggaaatattttgttgttgtatccaatttattcgattttccaaattcttgatattctgttcgctgatcccaaaatctttctttctccattgttgtaaatctttcctggtccgagatagattgcgaatgcaatttgttacccccagctgagtgttatccttccacactctttccactgcagtcccacaggatcttttcttacaccaagcttcgtagaaacgaaaaggtttgaatccctttgagttttcacccttggaatcaaggatgatgggagcgtgatcagatgagataatgggaaggttggtgacacaagcttttggaaagagactaatccaatcacaggaacctatcgcgtgatccagcctttctcggattagacctcccttgaatctcttattttgccatgtaaactttcctcctctacagcccacatcaatgcccccagtactctggagaaaatttgataaccatctgaagtctcttgtcgaagctttattacccccactcttctcctctggactaagaatggcattgagatctcccatcacgagccaggaaccttgacaatctagcaccctgctttccaattttttccagaagttctctttctctatgtcatagggagtgccatacacaccaaagaatctccatatgacatctttcctagcttcccaaacaggcacttcaataacattactatcaatcttcaaaacttgaaatttaacaacatgcttccacattgaacaaacaccactagcaattccataggaagagaaactagtgatgcccgagtatcctaacatcctagcaaccccttccattctatcgttatccacttttgtttcaataagaaaaatacagtcaggcctgtattttctttccctgtgcttgggttgtcggttcttgtaataagccccggcagttcaacgataggattttcattgggaaggagggggcttgataagggccgcctcctcgcccatttgaaaattttggacacaatcgacatgaacctcgatcaaattcaaagagtcttccaagtttcttaccgtatctccagagagagaaaagttctctatcaattttgacttactacgggtcgtacgagtggaggatcccttcttcctacgtttatccttcttggttgttgatgaagaggctctcgaacccattttgaaacaagcagtacttttgtcgacatcgattgctggtagatcaggtatcgcttgatcaaattctctggtattctcactggttctggggatataaggaattagatgtaagctggctttccttttcctgggttgtggacatgggtggatctcatccgtcacatctaatgggtcatggaataaggttgggctgggttcaaacttatccacttgcacagggcccataagctcttctgctaatccaatctcctatgcatatgtgggccaaggaaagtgggtaacttcaggatgcttgtggggctgtctagacttgcataagtcaacatgtgggccttctatgatctgattgtaatggggccaatatcattatagtagtaatgacccttgcatcagcaagggtaggaacaagtctttgggaaaacttttttataatatcattctcattgacaactgttacattgccttgagaacaattgccccataatcgaggagaagctgatcgagcacgtctgtccataaatagagccttagggcttgcttcccttgagatagactcggcactttgtttatctgctaccaccacagttttccttttcaccagttccaatttcttacctgaattggaccctggatgttcctgaggaactctgatagccttctttgtagtcttgacaacaagcttaggacgtaaaacattctggcttcctatgctggtcattggctgctttcctttattcttgagatccactggtttcaaggtgttcccctggcttctaggtctttgaccaatggattcttcacgaaaataatttaactgatttctgatgttgaaacagctgtagaccgccgtttccgccttcatccacagaccaattgcaagaaccgccttcccttctggcagatatacatacaccgtcgacctgaagcagcttttcttgtcatgacctaggtgcccacagttataacacagtttaaggagtttgaagtaccgaaattgtatccattcctttctgcctcttcgaatgtcaaggtagaagtctgagtacagttgatgggccgttgaaatttaaacctgaaacttgaagaaaccccttcggataagcaactttctatccactgtatcacatccaacatagacccctgcttttgctgccaccctggaagtgttgataggattgagatagggggtgggaagtccaaaagcttggaaacagaaaatggcctttgtcatatccaccttactccagatgcctgttggaaattattttagggggatttagatctactcacaagtatgt

SEQ ID NO: 26589 - DNA, 2800 bp, Cannabis sativa
gaagggtattttaagtattaaaaagtaaaaaaaatattggctttattattttaaaaaaaggacattaactatcataaagttaaaaataagaccatttacttgcatttcaaaaaaaaaatgataccttatatattaaaagaataattagactaattggtccttacaaatagtgtttaccgcaatagatgtaacatcaatattatcagtgatagccaatcttaatgcccatttcacaattttatgggcaacattgttaaacgaaggaaagatcttaaaataattacaacccaacgacaacttaaaaaaattcagacaagcagtaatataattacatatttcccatctacaaatggtattcttaataggacttattaccacttcaaaattacactctacaatgacaaaagagttaccattagcaatgacattcgaaatggaaaactcacaagctgcgacttttgaagaacgtcgctaatggcaactattttatcattatggatagtgctatatgttgaatcaatcagataattaattataatccaactctaaaataacctatagcacgtatctgtaatctgttttcccttttctctttttttcaggtcccataaaatcttgtccaaaccaacatctaaagctatagagaagagaatgtaattatagtaagaaggatagtccacagtttttactctactcacaatgaaaaggcttactttccactcaagaccaaagaaacagacctgaaaagaaatgagaaaaagctgtgctctgccctttcttactcttttaagcactagtaaatgaatgcaaatgggtcaggtcaggccagtcagccaaaaagagtctgtaaagtaattcaaagtagaagggaatttaatttttctttggttttgggttcctaaatgcacatgcactgcatttaactacacatactaggccataattgggtactctagtagtagtggggctcctcttcccattttctgcctagtcacacatctttctctttgaatattttgaaaatgccattggaaaatatgttttacttttgttatatttgatggccatgatagtatggtactctagtgtcatactatatatcaaccctaatatatatagattcccacactaaaattaatgcatgagtattgaaattcatatatgaaatttacatatatttttttcttcacattttttaaaataaataaataaagaagaatggctgttatgtctcatttggtgttcaatcaacaatgattagagtactccttaaaaagaaaaaagaaaaaacagacaatgattagagggtaaacatgatgtttaagcatctagagtagaccctcattttttaataagtataataataattatactaaagtaaaaaaaaaaaaaaaaaacataaaagttttggctggctcaaatcgcaacacttcaagaagccatgtgaggtgaaaatattgggaaagaaggaaaaaaatacagtgataaattaaaattagagcacatccaatcaagagaatctttctttggtttgttttgggtcctatctaaattaacaatcacaaatttacacaaaatattatttttataataaaaaacaataaaaaaatacaaaaatgtaacattcaaacaatatcaaatcaaaataaaaataatatataaattataaaaaaccaacacaacataaataaaatataaaaataacataaaaacatcacaaaacaaaaatttttgtaaataaaaatcttaaaaaatataaaattatttcaaattcgatcttatttttattgtaaatctgaaataaaccagagtaataaaccttctgttttcctctttgcaatgcttcacggggtcttcataatcttccttgcttccttttatatgtcctttacgtggcaaactgtctaagaactttcacacccacagtcccaccttaaatattaaatctttttccatcttatttataactcctttgtcctaaacttgccaacaatccaaatcatgtctgtcccttatttttcttctactttttctttcattgccttgtctattatcatggttgttatactaagtagtacttcatttgctttagccaaaccctccaaacaaagtcgtcctcgtcctcatcgccatctctcggttgattactatgccaagtcatgccctcaactcgaacagctggtctcttctgtcacagcccaacagttcaaagaatcaccaatttcaggtccagcaaccattagactcttcttccatgactgttttgtcgaggtaattaaatgattctaattgaaaccatgcacttgcaatattatattacgtacaaaacttttagttcctcaaacacattatgaattaatgaacaaactctttactgatatgttttatttttcatcttttgcatgggttggaataattaagggctgtgatgcatcgatactaataacatcgaggccaggaagcaaaatattggcagagaaggatgcagtggataacaaggacctaagggaagaaggatttgagagtattaggctggccaaggctttggtggagaccaagtgccctggtgttgtttcttgtgccgatattcttgcaattgcagccagagattatgttcactcggtaaaactctgtatttggatattttttatttttttttatgtgattgaagctttagccagatcagataagaactaatggaatagtgtatcgacttctatttggcctttggtttatattatttttatttttgttctggtgtgggaatgacttaaacaaggtccccccacccacccaccca

SEQ ID NO: 26590 - DNA, 2814 bp, Cannabis sativa
  modified_base (26)..(37): a, c, t, g, unknown or other
gctgttgttgttgttgttgttgctgnnnnnnnnnnnnttgttgttgttgatgttgttgttgttgctgttgttgttgttgttgttgtcgttgttgtttcttctttgttctttctttgttgttggtgttgagtcttttgctcaagtgggaattccagtagtttttgatctcgttatcagttcgaccaggaagtctaccggcgattagagaccaacgatttcccaaaagggaatgaagtcttatgataagatcatcttcatcagctgtgatattccctcttttgatatctggtctaagataattcatccatcttagtctacaactctttccacatctaagtagcccttttcataacacaaacataacataacataacattaacataacataacataacattttaatgaaacaaaatacaaaacaaaagtgttatgatatgttttattataataccagcttttttaggaacaattctccaatggccttcaccatgaagttgaatgtagtttactaataatgtgtcttctctaggtgtccatggacctcttcgcaaaccgaatcttgaacaacatgttgttcttcccattactcgagtttttttgttttgttttgttttgttttaagatttgaaacaacataaaagagaataaaagctcacataattgtttgttacttcatgttattctttatgagattttatactatgagagagagagaatgttactataaagtctttgttcaatttcatatctcttaatcaattatattacatttattgtctaaggatagagaataagtttgccaacattaggctttgcgtggccaaagcttaatatttttttaaaaaaatgcatctataatatcaaataattgttaatagtgacacttagatgcaaattatatatttagtataataatactaaatgcttgtcaaattaatttccttaatgacagtaatatgtatgacccgatacttgatatgggtcggtcggctttaagattatgtggactttagaaaaaaaaaatcattagaccctttataaaaaaaaaatatggtattgtcaaaagctatttaaaaatattagtttggaccttgctaattcatcttaactcaaatttgttcttgtttggatcagcctcggtagtgaattttgccaaagtacaaacttaactcgtcttaactcaaactcgttcttgcttgaattgttgcaaaataccattaataccctttgacatttctctatagtttatagtttagtatacataataaattatttatgttgagataataataattagtaaagatctcaaatgagatcattctaacaccattgatatgttgttaataatatgtgatgagcttttactcattgttgagctgtttaccattactgaaagtaacattaattaatggttggttcttggttgtcactttacctatttttgtttacaaaaattgactccacttctttattgatggttgaaattagaactgcattaatgtataccaacctacatatatatatacaccatgttaatcagagcttttaatgaaaatagtattaagctaaacctacaatggattttaattaatggcttcactttctatttcttccaattctattgtacaaatataattttgatccatcactctttctacttcattaggattcattttaattacaatcttttagtcaaattttaccttcgaaattacataccgaaatatttttttttcaattttttttataataatatttattatagttacaatatcactcatgtaaattatattaccgaaaacaaaattttttatattccaatttactatgcgtgttcagaaaactttaaacttattttcggcattataaattatttggaatgatgttgtaactataacgaacactgccaaaaaaaaattgaaaaaaatatttcaacatgtgttttcgagcacgaagattaactaagagtttgtaatagcagattcagagtaaaactcctcaacaaaaaatcaaaataataagtaactctctcatatttatttttgctacaaaaaatcataataattcagcatttaatatctatatatgtatatctatacattaggatacatgtgacatcaaaatctcattattgccaactaatttttttcttcttttttacctattgtcaataatagactctattagcacaaaaacaatgataatacccaaatggtgaatttgcatatgcagtattggttttaatatcttaagctatttttttctcaacaaaacagaataagcaatattattatattacaacattttttccatatatataaaattacatgactagagtccttaaacaggacattgtggtgatttactctcactattaattttaggtctttattaacaactccacaaaaaaggaagcctagcttttggttctttttctctattgatttctcaatctaaaattaaactaattggacttgtataatagttttattttaggcattttgtgtgtaatttggagttattataattgactcaacatcacaaagtcaagatttaaaatgacttatgatcttctctcatcttatcttaaatcttataagattccttaatattgattatattcgtgtagaaacttacatattttagtacaaaaaactttttatatactaaggatttgtccggtattattttctattttttatttttaaaattacattttcaaaaataagaacaaaaaatattttcaaaatacaagacgtgtttggttaatattttctaaaaacaatttttagaatttattattattattatttt

SEQ ID NO: 26591 - DNA, 2960 bp, Cannabis sativa
tattgaccattagtagttagagtccaaccgattgtatcatttctctctctcgaaggagtaatccccaacacccaaggaatgtcttctttgtggaaccagcagtttatttcttcaactttccagcccccatttgcatttttaagtgtctgaactgttacatctgttggaacttggaccttggtgcgaatgttaaaatgagctcctcgaggtatccaagggtcttcatttatgcgaactgtctgtccatttccaataacccacctatagccctttcagtaaaaaatcacggccccaaagaatacccctccaaatattagagctgaaatttcccaacttggcttcaaaaaagttgttgtttgggaagtaaagagctttcatgactctagccaaaagacaatcgggattggtcattattttccatccttgttttgccaagagtacttggttaaagtcctctaaggctctaaatcccatgcccccattctctttaagcttacacattttctcccaacttccccaatggatcttatgcttctctgaattttccgcccaccaaaaccgagcaatcatgctttcaatttcatgtattatgcctttagaaatccggaaacaactcatgacataacaaggtaaagcttgaaccactgctttgattaagatctcctttcccacttgagagaaaagccccattttccaaccttggagcttagcttccacccgatcgcgaatcttgccaaaaacctcctttttattttttccgacaaaagtaggcatgcctaaatactttgtatgagttttcacaagatgaactccaaggaaggcagccaaggattcagccgaagcttcatttatcttcctccccacacacagatcagatttatctagattaatattctgatctgagagagaggcatagcaatctaacacctcttttagggccttacattcttctaagttggcattcaagaatacaaggctatcgtccgcaaaaagaaggtgagatagattatgctccaagttgccaaactgcaatccatgaatttttccagccctctccgattcatgcaataaacaagttaagccttcagaacataataaaaaaagaaaaggagaaagagggtcaccctgtcgtaaccccctttccggaatgaaatgaccttgaatagaaccatttattaatattgaaaaggacacagaacgtacacagttcattaccttagagatccaagtctcatcatagtcgaggcaagacatcatggtttccaagaagtcccattccaccctatcgtacacttttgacatgtcaagcttgagggccattttttttccattgccaaatctccctttcctcatgcaatgaagactttcgaaaccaagaatagcattgtcatgaatgattcggccaccaataaaagcactttgattacttgagattgcattattaagactaggcttcattcggttggcaagacatttcgacaccactttgtacaccacattgcgtaaactaatgggccggatttcagaaatttttgttggttgtttggtctttggaatgaggcaaatcaaagtttcattgaggcttctacaatctgcttgattgttaagaatatctaagcaggctgtcgtgacttcctttcccactaagtcccaatttttctgaaagaacggtcccggaagaccatccttaccaggggctttcaaaggatgtatttggaacatggcgtctttaacatctttttcatagaagggttcaagaagtagtctattttcctcagtactaattcgattgggaacacaaccaacaaggatatctctaatctcaactccataatttgattttgagaaaagatttttaaaataactgatggcaatctctgaaattttcctgaagctagtctgccaatttagccggtcatcatagaggccctcaattgtgtttttccttcttctttgtgaagctttatagtgaaaaaatttagtgttttgatccccgtgtttaagccataaagcacgactcctttgcttctaatacatctctcgtttttcttccacacagttgagatcattctccaacttcttgatggtaagccaatcggtttgacaagatgatttggatagccatccaatcttatcctttagctctttaattctcttgttaaggtcatatttttgtcttttattccacccatgaagcttctccccacaaccttgtaagagtactttaagattagataaaggattggccgaggttttgttgctccacaccttttgaatgatctcttgacactcttcattatctgcccaagcttgttcatagtggaaccgagagcctcttgtacttcggttttcttgaaatgaattatgtagatgtgccgtgaaaaacaaaggcctatggtttgaatctctccaatcaagaagtctaaccgaattcactttgaagttatcagtccagtccgagttacaaaggattctatccaacttctcaaatataagattatcagctcttccattgcaccaagtgaacattccacactcaactgatatttcccgcaaagaacactcagataatgttttttggaattatacattaaataggcaggttttttatttccccctttcttctcggaattctgtgtgatttcgttaaagtcaccaccacaaacccaagctcctttaaacatcagttgtaggcgcttcaacaatttccaactttccttgcgacctcttgggtccggacttccataaaaatcagtaaaacgccaagtaaaacccaagtcgttttcgaccaaagcatcgatatgagacaccgtcaacaatttaacttgcattttaacagagtcagcccaaagaagtgccaagccaccactttttcctttagcactaactgaaaaacaaccttcgaaacccagctgcacccgaatgaattccattggagaacttgaaagtctagtttcgga

SEQ ID NO: 26592 - DNA, 1717 bp, Cannabis sativa
atatatttatatataataatttaggcgtatgcttccataaatgaatagttgacctatataatatcgttggacaaagtcatcatctttaattacaatataatatatattattttgtatacttaggattccttaattaatactttaacaaaaatagattcctttctcttcatttatatatacatgttcttcaacaataacaataatcattaacgatgaagatgggaaatattaaagctacaaaaagcttaataataacattagtgttgttaatgatattggtatgttctttaactctaaacattttctttataatatttaagagatcaaattttgatgaggatgaaagaagtgagttgagttggagtaaaagggcagcaaaggaagctgaggctgtggcagcaatctcatgttctggtcatggaagagcctatttggatagttttattattggttttgatcaacaaaaattaccaatttgtgagtgtaattcttgctatgttggatctcattgtcagaactttcttccttcttgtcctgcaaatgctgatgggtctctctctctatactattttgtttttttggtctttttttttttcaatagcataattagtgtataatattctagggtatgtgtagaagttggattttgattagaaaattaaaaaatataaggaaattataggagagaaatccgtgtttcatataattttgcctcctatgccaaacatgagaattatttattttactttttgtttcttactaaaattcaatttgcaaacatatagtacacatatggttagtgattttttttatctacaataaattaaaattctttaagtttgactttcatatgctttacactttcataattttttttttttaatttttaaaaaatatttattaaagatacataaaaagttactatatatagaaaatcaaccttgattttaaattttttgttaattggaaaaaaaataattttcatatttgagtttaaattctccctttcacaatgtaaaatctaaaattttcaacacagttaaaaattaaaattgcataaaatacataaatcaaataaaagtcaaattggtaggttaagtagttattttgttattttataggagagttaaaatgtcataataataatcatataatatataatatatatgaatataattaatgcagtggagatccacttttcttggagccattttggatgaaaaatgcagataggagtgcaatcatggtggctggttggcacagaatgagttatatctttaaccattcaggctccatgtctaaacaacttgaagctcaaattcaccatatccatgacattgttggaaatgcattaactcaaggaaaatacattatttttggaactggctcaacacaacttattaatgctgctattcatgccctttcacctcataattcctcttctccttctatagttgtgcctttaatcccttattacccggttagtttctctttccatcaaatctacttaattatacagtgtagtaattctattaaaatgttgattggatttgtaattttggcgctttaagcctttattaagtatccatttttgataggagtgttcgcagtgcgggtaatacggttttttgatcatttttcaaactaacttgcacatgcggtttttctaattatttggactatcaccaaataattaaactatcacaaatataataaa

SEQ ID NO: 26593 - DNA, 3112 bp, Cannabis sativa
ttgtgagtagatctatgatcctggtaaaataatttccaacaacaacttcctcccttctacttcattaaaagcatacacaaatgtaacttgaaaaccaaacttaccatctaaagtagccacttgtaaatgaataagctcgctggtacatttgaggatgttcaccgaaaagctaaaaggattccatgccacaatcattcgacctccttcatgccacactatattcgaagtaaagcaccaccctctgaacatgttaacatataaggccccaagcttcgggaccttaactctcatctcgaggagaccaacaagcccaattttatgaacatgtatcatgttctttacttgattttgcttgtataggtcattaatccctcggacgttccagcagacaatcttatccttctccaagaggaggaactccccctcctcttatcttgtcaattgtatgaattctgtgagatccaatagagattgcacctgctctaattgtaacctctataccttcctctgaaacacaagccaaagcattgtaagagttatctaattgagtctcagcaactaccacattttctctagttttaccacccttattgacttgttggaaaccatctttatccactgcaacattattcatagcaaattccacttctttatcccctgcaacattattcacagcagtttccacattagttttagttccttaatcacccattgttgctctttccctgccttcttcttgcaatcagcagtagaaagcccaagtccatggcaatggtgacaaaatattggtttccattcataagtaatggaagaaaatacatcataaccatgctcatcttcaaatagtatacgatctggaaactcttgctgaatagcaacttcaataagaaccctcagatagctcaacttgtttctttctttagtcattgcatccaacctgaaggggtgtgcccagctgcccaacaatcttaaaaagagatttctcaccccagtaattcaattcaagatcaggtaattgaatccaaattggcactgatctgatatcttcctttttaaaattaactttagggtcccaagccttcatcacaacaggtcgattattgaaaaacacatatcctccattaagtatttcatcccttatctcaactgtatcaaactgaactaggaagaccccataggacagagatccaaccttatcaactttccctttccatactctcctaatgaatccatcaatcacagataacgggggattataaccaagaacataacaaacaatagaggaactccaataatgaacctcatcctcaatatcctctagagttattttaaccttgctagaattaccagaattcttaaatgtactttctaaattcctcactacgttaccagatcgaaggattggaggagtgataggattaccttgaactacacttgcagcacagcttcgattcgcctgaaggaagtaatcaaagtccttgttgatatcttcttgtctcttgatagcttatagtgataatttaggtaataatggagcctgaaacagatcaacatctactcgcactttctctgtattgtcatccccttcttccttagaaaaaacgattggttcaacaccaataatcgaatcaagtgtcttcatcttacgaacatcaatagtagaggttggccctcgttttttaggtttcttaatctctgattttaatttcccctgcctccccctagtcttcgccatagcaccaacccaggagagctgcacaagagaggaagggaaaaattttcacgggattttcattaaataatcagtttcatataacttagaatatgtagatctttcgattaagatagttaaatatatttgtatgattattaagttagttgcttaatattacaaaaaaaatttatattaactcaaccatattactagattaactattgtagttgtctataaaagtttcatgcagggtaaaccattcgaccaacgtcaattttagggccacttcgcatatgccgcccaaggtaaatgcaatagagaaagtcgacactttcctcctatatttatcaattaaatccgtattttcaagggattttcacacgtgaatactgtaacttaggaatgtaactagtttttctttttatttcttttggaaaacctaattaatgtaattcttccctataaatagttgaaccatttaactatttattgatccaaaatcaataattcaatagagcacttacgctgctaaaatttttgtaaaagctttcgagagagatcaaaaacttcttgtttcttttctcataagttaatataagtaaaaggggagtaggctattaccactatcataggaccgaacctctataacaaatttgtgttcttattacttaattatcatttattatctctaatcctttaattgactcaacgttgttggctaaaagtgaggtcaacacctatagttttaggcatcagtttaaaactaacaataattccagctactattgtcgtcagttttcgatggtcggtaacatttgttaccgactaaatgttaccgacttttttttttccactgatgcctattgcacccagttttgcatcagtggcataggcgtcagttttaagacccaacaacaataccttacccatttattttaagcagttgggaagagtctttttttttagtagtgacaccaacaatacacatttgatccaaacttattcttatcttctctagtgcacttgcaattctctctatgatttcacattgtatttcatgtttttagaaagattttgctttgtatttcaaaacacatattcaaaactactcggttgtaggtgaggttgacattgcttttgtaaacaacctgagtagagtcagattgtcacttcaacaatttgatagtaagattgtcactacaacaattcagttgaaaggtgaagttggcacctatgggaaaaataactcggttagctaatgagattaacacttcaacaattcattgaggttaatatttcttggtagggttgtatataaacttttgtaaaccgccaaaaccaaaccgagataactcgacaaaaaatacaaattgaaaaacccgatgaaaatatagcctg

SEQ ID NO: 26594 - DNA, 2087 bp, Cannabis sativa
tggcattttagataagattctactctgaattgactcagaagcaaaggtaaaagttaagaaaagacctgaatcaaatttgtctttgatctttatgttccactccgcctctttcactcgccagattcctcccagcacccgtttcagaaatcccctgctatgctctacgttagtgcacaatcgtccccttagattgtattttgcaattgtaagagacaggttcttgtccacttcccactcatcttcatacgagacctgaagtttgtgagttttcgacagcaattcatccattgctaaggtgagaaacaccacccgacacgtcgggaacccttcagagacgagggaggagtccaaggactgaccggagcagagcccaaacagagccctagcagagcgaatcttggagcagatattttccttaatacgatatatattttatagggtaactttttatttatatataataaaataaatctaaaaaaaaacgatttaagatagacattgtcatttatacgattgagaatggaagcttaaaatccccaaaaaaatattattggtttaaagctatgcgaagtaaacccccaaaaattctaaccacaattccacaaattctgcttctattgtaaggttctcgccctccccagtaaagaaaattaaaaaacctatataattatttaacttgtgaataaaatagagaaaaataaattttgcatagcctcaacaaaaacttcagtacgcaccgtcgcaagaaactcaccgccaccaccataggtttcctcactttgttttgttgttgcatttatgaattgatgtttgagtgttctactaaaatgtacatagatacattattttagtttgatattatgtgactttctgtacattgaaatgtgtatttattttttgttacaagaaatatgactattttttttttcaaatttagaaaattttttatttgatttttgaattaattgcaatggggtagaagaaatatggtttaagtttagaaaagttgtgagtgcctccaatggagtcggtgaatcgcgaaactctcatctctgatgacgaaggattgaagcccaagcactgtgcagatttcattctcccgacttcaagaattctttattcgaagtgtgatataattttgtattgtttcatcttcagcttcagttgccttcccaccattactaccgcctccggatagtataagtttcatgttattgtcgatttatgatggtttgtgttcgtcgtccgttattattattattattttatgaaaacatattattattattattattattaactaaaaattcgacaagtattcaatttatataaatcggactatataattaaattaaattaaagtagtggaaaatttaatttaataattattcccttttaattttcaaaattgtaagtttctttctaattttgaaaaccttcatactttgttttctttaacaataagacataaatttatttttttttacaaaaatatcaacaatttatatattatttaactttcaatttcataaatttaatattattgcttttgttatattttattaccattttgagtttaatttttattttttaaaattttacacaatatattattattttttttttcaaattactattatactttctataattatcattctaaaattatttattttaaaattacatataatatttatttttttaaaaaaaaaaacttaaatataactaatcatgcgtggcttgacacgtaacatccatctagtatatatataagcactcataattagactggcataattagggtatttacctttaaaatagtaacaagttacacactgatgataactgaagttacttataatataggtaactacctgcccctaaggttctactaagttatcttgatggtataatataatataagtaatttaatataattaggtaatacgtgaaaacagatatgagtgtattttactccttccgactaattgatgtcccctaataattacacattggtcgtggtacttcccataaaatactcttttttttgtgggtaatcttgtgagtggatactactgagtactgat

SEQ ID NO: 26595 - DNA, 1438 bp, Cannabis sativa
tttttttttttttttacaattacttggaaagtcacagacgctcccctctgccatcccaatgaaaaagtgtacctatgagaaagaaaagtgcttatttgattaaaaggtataaatgaaaatactctcaatcccagttttttcaaatacattttcaataaaattaaaatattgtaaaattattttaattaataaatttagaataattagtatttgtgctcttgatattaccaaatgtgcatgtggatttaagttgtccattatgtaatgttgaagttgaaaccatatgccatgtgttagttcaatgtggttttgcaagatcatgttggaacatttcggttgttaattatgctggggaggaggtcacggattttacaagctggtttggagatttattgacaaaaaaacagataggagtaggggaagaagcaggaatggttgcttggcgtatatggatggcctgtgatgatatcctttggaacaataaaagtattaaagcttttgatgtggttaagttggctagaactaatcttgtgagttggagaaatgctcaaaatcaaaaatcagatccattacttaatgtgaattacagtaatgacatggagcattcgaggaagccggttgtttataaatacaagatcaatattgatggagccatttttgaagctgacaatcgttttagtgtgggaatagtcattcaggattagaatgctcaacttgttgtagctgtgtcaattagtaaagttggtgtggtgactccagaaattgctgaagttattggggtcaaggaagctctaactggataaaaaaacatagcctctctgatgttgaaatagaaactgactccttagtagctgttgaagctattaatggggaggttcatatgccatatcaatttggtatgttagtacaagattgtcgcaagatggtttcttttctgaacaatgtgttaatttcttttgttaaacgatttgcaaataaggctctcattgtgttgcgagacagtcttgtttaatgtcaggttgtatctttagcaagttgaatgctccttttgatttattatctgttgtaatggatgaacgttctcgttaaataaaaattcttcaaaaaaaaaaaaaaacatacataaagacgtattttgtaggccatataagagttgtattgtattaaataataagcaacactactttggataagacattatattgtaataatttttatgataaaaaatttcaatacaatgtaaatcgtattatttaatactaataaatagtttgtattagattgtattataacaattgtgtatttctttcaaactttacacttataagagattttttatatttatattatccatacttcatttcttttaatttatactattttttatttattttagcttctataaagtttttttactacccctttctcctctctctct

SEQ ID NO: 26596 - DNA, 1322 bp, Cannabis sativa
ttagtgtctcaaatcactattcggttttgtctcgagtacctttgtgttttctttctttttaagttgaacttttgttctgtctagctgaacaaaattaggagctgaaatgtcaactgtaagagagtcattgcctttgttctgtattagaagtgaaagatggggtgattctgaaaaacaaaaaggaaacagtaaaaacaacgaaaggttatcgagttcaaaagaaaattcattcatcagcatcatgaacagctatattgtattcatgtaattatctgtaaacataaaatgaatataatgttctaatcattttgaccaaagaatctgtcattcaaggatcaaagttaaagagaaactgaacttaacaaactgtaatagaacataccatttccgggaactctcaaacaggcaatcaattggttccctgcatcagtgcacttaatagataaataacattcatcaacactacttcctgtagtctcctctggcaatttcaaattcccaaccccgacaacgccttgcttctcatcgctcttcctaatctcatcatttttaacaactccattttcttccctattccgagacaagtctttcgcttcaacaatctcatcatccttcttattcttttcacctgactccccctttcccttttccacattgagaggctttttagcctcttcttcacttgattttcgcctatcttcgtccaatttaacacccgcattcaaatctcctttggttttagcttggtgaagacttttcttaggttcaacaacaatgacatctaccttcctaccattctccacactctgatctttccccaagttcttcggtttattcgatttggccttaaccaaactcgagccattcctttcagccccatttcctccacctaaattctttacttcatttctcttagtctgataatccaaagtcaaattcaaaccatttgaatctccacttctttctaaatctaatgaggttttcaattctgtatctgttgtttcattagcttttacctaaaattaataataaaacacttaattaagcacaaacccagattaaaattaacaacaattaacactgaagtcaaaatctttctctattgttttacctgaaaatcagcaccaaagaactgagccaaatgtaatgacagtaaaaccccaatcaaaagagctaatttcttctccatttttttgagagatataaaaactcgttcttcaatcaaaactacaaaaagatcctatttttaatgaaattgggaaccaaacaaacaaaacccaggtacgaaattgatcagattcttccctcaaaaaaaaaaaaaa

SEQ ID NO: 26597 - DNA, 1203 bp, Cannabis sativa
gaattctacatagaaatccttattacaactagcactgcaatttaaatcgcaacaaaaaaatatataacaatctacatagaaatcaccggagtaaccattttaaaaacccaaactataaatttaaaaagaaaaaaaagtatatggagtaattctcctaaatttaattgtaataaatataatatttaaaaaaaacttaaaaatattaaataaatcatcataaataagaaaaaatattataaaaaacttaaaaaattctatataaatgaaaattaatttcttaataaaaaatctaattttttgataaaagatctttgaggagtaatttatgtaaagattaaatttatgtacaattgacaaaacaaatcctataaaatagttttttttaaaaaaaaaaaaaaaataccataaaaattaatcaaacttaaagttatcaattaaagaaaacattaattaccttctctctatgtgtatatatatataatcattatgtgcatatactcatttctcactactctcacaaaattaaaccaaacccctcttataccaaaaaaaaaaaaaaatggagcaacataataattcttcaaaaactcatgaaagtaagattgagttaactcaatctgacctattactcatacaacattactatatccaaaaaggtcttctcttcaaaaaaccacaagatcaaattaccttctctcatcaatggatccaacgcttaaacagatctttccttttcactcgatattttctttccactctcaggttgccttgtcatgaccccaaacgacgacgttcactctactaaatcattcttcattgactgtaataacggagccggcgcttcatttgaccacgtggcattagacggcgttacagtgtcagatattctcgacccgatttatatctcgaacgacgtcgtttactctttctttccattaaacgatgttcagaattaccaaggagtttcgaagccgttagttgccgttaaagtaacggaattagttgacggcgttttcatcggtttaagtatgaatcactccgttgctgacggtactgtattttggcttttcttcaacacttggtctaaaatctctaacgacaacgagaacgacgtcgttttagccaacactcctcatctcgttttcgaccgcgaacagttttctaacggtaacgttttcccaattcgtgtaccgttcaatattc

SEQ ID NO: 26598 - DNA, 2402 bp, Cannabis sativa
tatttgtacgtgtaaagatttttttttatatatttttttacattttttttataaaaacaatatgaaaataacaagaaaattacaaataagtaataaaaaagtatcatccaaacaacatcaaaacaataacataaaataacatacaaataacaaaaaattaataataaattaacatgagtgcagcataaaaagactttagtttttgtaaataaaatcataaaaattgcaaaaatatttaaaatttaaactgtatttttgtaattctttttgttaatttttgtgtatttgtgaaataattccatatttcttaccttcctttctattgtgagataaatacttaagtttatgagtaatttgtagtataaatattttaattttattttcagttgtagataaatacttaagatacttaagtttaataataatacctaagttatatttttaaaacttttgtaaatacatgatcgttaagtgaaatcaatgaccatgtagcagttcctagtttaagtcattaaatttttattttttatatgaaaattaatttaaatatactaataaaaatgacatgtagataatgactttttttttttggatagggaaaagggtgacaaagccaccccaaacaaaataccattcaactaaagtcaaaatacaagcacaaaccgcaaaccaaaagcaaaaaatcaagaattacagtcccattcagtataatcatcaagcacactcggtgcaatcctcccaaggggcactaaaccaaaagtgttattacaaaaggcctaatttgctacgctatgcgccatgaaattacaccgtctagagacatgaatcaatccccactccttgaaccgcctgcacagattaaagaatctgttcctagccgcagagagggtaaaatcaattgttacctctatgctggtgttgaaggcattggaaaccccagcattatcacattggaaaatcaccaaatcaaggccactctcacccgccagctctgccgcaaggcaaactgcctgagcttcgcaactcaagggatcaatacacaaggtcttagcctttttaatggctaggatctcaccccattcgtttctcaagacagcagccaacaccgctccatcgacacaaagcttcatatctgaattacaacacacccattttgggggagggggtctctaaacaagaacaggttctaattcgtttctcgataccagagtatgatcattgatgcttcttttaattagacaaaggagattcgacataggagtaatcgtaccttcatgcactttacggtttcgctctttccagaccgcctcaactatacaaagggttgtgactatgaactcatcaaaagagacatcaggtggacaattcgaatcaacttggaaccagtccatccacgctctccaacatcccactttcactgaatccgtggtaattccccatggtgtactaaaccaaattgccttagcaaagcagcactcccagaataggtgcaatgaggtttccgaggcacacccacaaagagcacacaggttcgaatccaacctcatgatgttagacagcttgcttttggtgaggaaggcatcatgaagcaatttccaccaaagaaccttcaaacacgaatggagtctatatttccaaaccaatttccaaaccgaatcagttgcgtcaaccccaagggatcttttaatagacttacaagctgatctgatagagaaatctccgttcttttccccaagccatagccaagagtccccggttgggtgatccgggaggtcaatgttgagaatgtcctttgcatcttcctccgagaaccagtccctaatcttgacaacatttcgcctattaccttcggttatgaactgtttcacccaggccaccccctccgaaacatcatgttgtggcaaaggagaccgattaccagtgggaacccacggatcaaaccaaatagacgtacttgcgccatcaccaattttccggcaaatacccctttccaagaccaattttgcgtcaataatggccttccacatagctgaatccccagttcttttctctacatcgagaaacttccttcccccaagatacttcgcatttaccacagagtaccaaagactttgattaccaatcaaggcattccaagcccacttaagcataaaagctttattgactgtggctaattctctgaaccccaaacctccttggagttttggtttgcataattgatgccaagcgatagtgtggatagtttttttatcctcagtatctccccaccaaaagtccctcaagcatttgtcaaccttctgagctattgatagagggatgggatccgtagctgccacatatagtatcttaaaaaagtaaatatttttcaataattatattttttttaataaaaaatagtaaaa

SEQ ID NO: 26599 - DNA, 3965 bp, Cannabis sativa
  modified_base (2206)..(2211): a, c, t, g, unknown or other
gttacgaatacccttttttctagtagtgtcaaaagacacaacaatagatttgttgcaccaggttcactcaactattgtgaaagctacgtaactgcaccactaacagctacttcagccgatgaaaacttgttagtcccaacctctaacatcaatttaatggtgaggcattgaagaaaaaagaagacgaaccaacaacaaaataaaataaaacaaaaccatatcacgtatacaagagtaatcacagtaacctaaacaaaagacaattaaaaccatgtcacagagataagactaatcgaagtagcaaaaacttaatcgcagtagcaaaacatgacccaaacccagccgcgcctacaccgagggaggtccagagcgccttgacggatgaaaaaaaaccttaggcgactatggatttaggaaaaaaaaaaaaccttacgagacgatataaaatatttaaaaaaactctagcgtgaactaccttaataactctatttgtattaactaatttctttaggtatttaaaaaaatggggttttacaaaaatattgaattttaggcaaaaatttgtaatcttactgccacacagaattttttacaaaaatattacctttttataaaacaactataaaacaataaaatagaacaattaaaaataattgtggaacaactataaaacaataaaatagaacaattaaaaataattgtggaacaactaaacaacaactataaaacaacagtaaaaaaaaaaaaaaaaaattcgtgtaaaaaccccttaaaaaaaaatattcttgcggtttacaaatgtatctctattgaaaatccaattgtgaatccattattttttttttcttttttaatgtaattaagtataatttgtaaaaaaaaataaaaaaaaaaaagtttaattacgtataattttgtgatgtcacattttctattacctgtaattggcaaatgcaacttcatttgaaacattttagcttcaaaatccacttgtaaacacatatcgatcaacgctaataataatataaggtcaaactaatatacagacaaacaagctgcaatgatgataattattagcaaaaacagctagatcattcatatatatatatagaacccaccattaaaaatattagttacttttttctttaatcttttcccagccttgtaattagttgttcgtcctctaatcgagggcattttggtaatttaaacacgcacatattttataataggaaaaaattaatagtataaaaataaagagtttcgtttgcagatgttgaattctctaactaatttataagctaaactaagcttattccttggcctgcgatattagattattttctctcattagtgatgaaatcatcataacatctcccctagcctaaaccgaccaagttgacttactcttctctctataatatatattagtcattattatatcatataataataatataaaaaaaatatctaagttctccatagatcggagaagcttaagtagggctgagatagcacatatatatatgtatatataaatggataataataataataagtttgagctgatgaaatgggaatctgaagatcagatcagtggtttgagtgatctggtgacgaggtcgtatagttgtagtttttgcaagcgaggattttcaaatgcacaagctctagggggtcatatgaatattcatagaagagacagagcaatcatccgacaaagattctccgaggaaaacaaggtaaataataattattcctctgaatatacaaacccagatcatcatgaccaatatggtttatcatcatcgaaaactcagaaaagtgataatcatcatcgtcaacatcaaaacctaggttctattccggtacaattagacttatcactgttagccgaacagcatagtaacaagccacgtgttgattctcagacgatgacgggatcagatgatgaccatgttggttcctttgttggggaaccatcggtgaccgctgccgcagccgtggtggaggagcggaagacggaggagttggaccttgagctcaggttagggccagagcgtcgacatcatgatgataggaccacgttgagtacaagggaattcttttgatccatgttttgagcatgcatatatctgaagatttatatatgttggctttttggaaatgaaaacactagaggttattaattatatatatatatatnnnnnnatatatatatttatatatacataagtatattcttatttcttgggtctacaatcatctatttttctgattcattcatttgcatggtgttttcatttcttcttcactttaatatttagatatagtgtgttatgaaacaatatttaaggaatatagatattttattgattgtaattgttcttaatgttgttatattaaaattataaaaataattcaaacaaaagttattaagatatttctatcttgcattggaaaggttattttgttcattttaagaagaaatagtcatttcatttcaatactttaaaatacaatcaataaagaaatgtaataattttttttttttcgatttcattccatttcattactttcagcaaaaagttacattgcactactacacaaaaggagtttagaggctgttatttttgctgaaaactaaaaaatggacactaaagggctgtttatcaattttatgtttaaaattgacatttagtgttggttatattataataaccgacaccataggagttggcttagggttatataaacacattaagaaataactgacgccatatgtgaacgcaacggttgacacgtgtcacttatagcatcgggtatttcataataacgacgacataagggtttatatatatataaccctaagctagtttcatctttctcatttcttgacctttaaagtagagccaccgagagaaattgttaaatagtaaaaaaaatgcttatttattagtgtaaaaatacaaaataaaattaatactgtataatattttttataaaattaatgtaataaatttttatttgaaaatattgtagtgttgagttaattttataaaaaaaaataacactttatgacacaaataaggaaaagaaagaaataaaagtaataaagaaaacacatatttattattaaagacactacaaattaattaaattttagataaatattttcataaaattaatttgatatattttctgttaaaataatttttttatatttaattttatctttatttggagttgaaaatagtatttgtggcactattggaaaagaaataaaaagtgataaatatatggcccaaaattatgaagaaatggcattagtaaaaagcccaaagtccaagaaaagaggcccaaaattggcccaagaagacccaaaatcctctcggccgacatcaggtgccaagtggcacctccgaattcgcccctactccactctctctccgtgcctgccagcgggccccacgtaaacaggcacattaggtgccttttgtccctcgcccaacccacgcgcacgtgaggagcacagcgccgtgtggtccaggcgtgccacgcacgtgccaaaagcacgactctgtcgtttggctccggtccgcaacaacctaaaaagtccaattttcacaccatttttagccaatccgtgtgtgacacgtggacgaggttgcccaagtcatccaattagagaacgacatggcattctcgttttaactatagggtaactgtatttttacccaaatgcaatttgtaataagtttaattgcacattagtccttatagcttcctataaatagaagcttaggatttatgaatttactacaatttcagacagaaaatctaaagaaaatacttgaagctctcggtgttagtttaccgcttttttagttaattttctcatggatttctaagtgctcttattattaaggcagacgatgaaacttagtgtatttaattaagtattt

SEQ ID NO: 26600 - DNA, 2576 bp, Cannabis sativa
tgttactgtatattaacaataatattcatattttgaaaagtgtgaaatggttacaaaaatatacaccgtagtacatatatattaaaatatttttttttcccaatacgtcagcttattccaatctggtggtcttttgactgaatcatctgtggatcgatcttattgtcacatataatttactagtaaactagtttaaatattaattatgggtatcgtgctggatatactaattatgggtgcactttcttcaacaaaaaaataccacccctgaaaaatgaaaccatacagattcagattcttgctctgtttatacatcaaataatacaacttaattatattataatatataatattatttttcttgtataattaccaataatatcgcaatattagttgtatacatatctagttgtctggctgtgatatatagtgatttttttcattatgcatacccttctagaaaacctatatatattttgggcaatttgagagaataattgatcagggtcgtcgacaacaaattaaaagggctaatcaaaatcatcattttctctgtttattctaataaataaattagtagtgacctatcatgttggattcgtagagatatgtattattcctttgattttaacttggggagcaaaatacaaattatttggtttatttaaaaatgaaaagaattttaagcttcattaatttagtagattaggacaaaagtaattataattttgtactattgcttctttatttagatagagtagtactatatttgtgtatacatcaagtatatacatgtctttatatatatgtacattaatatttatgttatatggctcacatgcatgccctagctatagatatttatagctggtatcaatccacaatgttatctacaaaaagtaataatgcatgtacgtgtatgaataaatatcaaatatatatattctttcttttagttttggaaatgtttatgattaattgagttggtttaatgattcagcaaaaaaaaaattgagttgttttacgaaacgatgtgtcgcataataatcgggtcatcactagtgcaaaatacgacaattgtcgtttgatatataaatagctgttattaaatagtaaagtatttaattaatttgtcattattcacactatatggtttataatttccaagaatatatatttgattaatcaattattggagtggtgatgaggtactcgatctcatcaatcagtgagacacatttttggtcaactatatataaataaacatgcactaattattaaatgaataaaaagaatattataatataaaaataaatctctctctctctctctctctctctaaaaatatatgtgtaaatattatagtatagtttaataaaaagagaaaaaagagatagcgtctttgaaaagaatgacataggctaggccctcctactactttgcatcgatggttcccattgacaaacataataactagacgatttccttttcccttccttttggaaaacaaactcaaaaacgtgagatatttatatatatatatatttactatatatatgatctcctttaagtgctcacaaaagttatgccgtatagctatagaaagtgggctgatatgatgacaattaataatatacattgaggtccagtcaattgttatttttgatttttagtgtcaatagagtaattatatgaacttctgactaattcagaaaaaataaaattagtatatatataataatatacaaaagttaataaagctttaaagttgggacggcctttatttattaaagtagcataacctcatcacaaattgagaaatgttaaaatgtagtgttataatttaatatatatgtaattattattattggctatcgagtcttatataatttaatataatttttaaaaaatatctctaatcaatcacaataccatgtgtttaaaaatactaagtaccattcataccaaataacaatactctcacaaatataattaattatatataaaaagaaagaagtcaagttaaacatggaaactagtgaaactactaaatggtggtcagtattaatacaagaaaaatattggccggtgcactaatgtagtgacacttaattatttatttttggtttttacaaaaaaaaaaagaaaaaaaaaactctactcgatcgttgggaattaatttcatccactactttttagaatcatgaaaagaaaatgatattgatataaacatatgtgaatactcaatacttttatatatgtatataatatatttaggtacaacatatataagcatagttgtacttaatatatataaaactatataagtttattgcatcagcttttttaaattaaaatatatataaaataaataagtgaaaaagaccttttttgtttagatatagaggtcccctccttaacaagtgaatcttcatttttcgtatactgtgaattcaatctgtggtagttgttaaatataatacaacaaaatgaatgtagtattatattgactaggggatgatgatgatgaggtatctaaatatataattaataatatgtatttcttcttcttcttc

SEQ ID NO: 26601 - DNA, 3585 bp, Cannabis sativa
ctatgaagaatttatttccttgagttgtttgttgaagggcttgttaactctttgtgggcaaccatgctactttgagttcgtttggtctcttcttctttcccttttgtcaatggatcctccgagcaagatgtttttacctcttggtcactgaagaccagaagtatgagagcagactgctggtggatcgaatcggccagggtaagaccaggtggcaagttacattgaggaagcatttcctagctggttgaatgaggccatggccggccaacatgtggaggtagtgaccggccagcttgtatattttattgtgaggtagcctgtttagtggtcagcctatcttctagaggccaagtcgatgttgtagtttgatcttgtatacactcgattggctttgcttcccaatgtaaacaccgtagagccattgtgcacttctatcaatagctcttcatcttctttcttggtaatgctccttagaagtggggttgggaaacaacatctgtgtgttatactgtgcatgattggacagcctaaaaccatccccccaatccctactttctggcaaggattctgtttggaggtatgttgttgtaggtgtatccacgttgattgtgcaataagtctatttcttttgaaataaggagttagttctttaaagaactaagcaggaccaagtttgccttggttatcaaggcctagctggctaatctagtgagtgtgtcggctgttgtgtcatctttggaagttgccttttagtacagcctttgagctaacttaacagctcaagtaggccatcatcttcttgtattaagttgtatattcacctaggacataacctaagactagttaagatttctggtgtatgtctaggtggttaacccgcacttcgtgtgctagcctaaggccagcattaacagcttcatgttcagcctcgttgttagaagctttgaaactaaccttgttaactcatgcctcaattgcccccaggtgccttgggggccatgcctgaactgggcaggtggtcaatgcacctcttgggttcttgctctcacttcttctttggctcctgcttttcttccaaactttgtgagatttggggagatatgcttctatgattagctattaagctggtgagtgcttggcctttattggctgagtctcggtggttcacttgagtgggcagtttgatgcttcaggtttctgtagaacctaccgcaactttgatcggtgtacaactttttgaaagccaagagcaagctatgggtcagcttctccatgagtgggtaccgactttcagcgtccatcagtctcttgcaaatgtaatagataggtctttgtactccaccttcttctcttgttaggacaacactcacaggatgttctgtgacagccaggtaaacacctagctcttctttgtctaggttttgagcaacacaggtggctgagccagttatttcttcagctcctggaatgccatttcacattcctttgtccactgaatttttttgttgcctgtaagaatgttgaagaagggtacacatttgtctgtagacttggacacaaatgtgcttagtgcagcaacacgtcctgtttggcgttatattgccttgatagttgtaggaaacttcatgtccaaaagggcttggatcttgtctgggtttgagcttatgttatagatgtggacgattttgaagcatttgtctaggtcctgcatatgcccccacccttttggacttgacaagcatgtcgtccacatacacctccatgttgcggctattaggatcgttgaacattttattcccaagcctctgatatgtggctcctgcattctttagccttgaagggcatgactttgtagtagtacaggcctaagtctgtcatgaagcttgtaagctcctaatctggtgaatgcatcttttttttggctttggacaaggccaagttgtaatagtgacaggcagattcttgatctcctctcgacatctacctcattccttgttgggaatttcaagcaaaggtcatacatggatgttactaccttcaagttatatagggctagttagcctatcatggttgtgaaagctgagggaacgtcgattacgatgaactgggccatcagagttttggtagttggattttctccaacagtgaggggtaatcttatatacccgatgggtgcgatgcctttgccaaagaggccatacatcacttgactgtagggtgccaagtcagcgagttgtagcctcatcttttcatatgtttatttgaagagaatgttgaaggaggctccattttcaaccatgcatcttactacaatcatattcccaaattgtatagtaacgaccacggatcgttgtgggggaaactgacttaggtaggatctccttttgagaaagagatcgtgggctctccaaggtttggttggctagagtctcattcttcgcttgctaggatgtcgcttttgaactcatgacagagtgtctgggcatagcgctccctagctttactggtctcgcctgcaatatggggtccgccaatgacgacctctaagtgtcctaccattaaaggtttcagcaaagtttttggcacctgcctgtgcgcctgacaagagattgaggccaaccttcgaagtgcttgttgctaattggccctgctgggatgtctgggcatgctttgcgttgggagttttggtacgagaatgaagcatgcacacttctcctccttctctcttagacttcatagcataagggaatcgttgaatttacctcttttgccaatatgttgcttagttcaatcgttgttgcacttgcctccacaattctcattgttggagaattgatagagatcgtgtgcactggtcagcatgtcaaatagtgcttggggcgctatgaggccctgtgtttgttcgtcatggacctgctctcttgtctgggcttgccaaacatcttctttcaactttatgaagcaattagctcccttaaggaactcctccatgttgttcgtttagattctcctgatatctttccagaagttaatcaacggtaggatgcctccgagtatggatgtatattggccttttattattaggcttttcaacttggtggcctcagccataaaccgttgaatgtagtccctcaatggttcacttattttttctttgttttgacatgatcctccaatcaggcaggtatttgccttgaagcatagaactgaatatagaatttctggaagattctttccaagaattaagtcttcccaaggccatcttgaaataccattgttgtgctattttagctagagttttctggaaagattctgcatcgcacatctccagatacttgttggagatttgtggatctcaaagtactttaggtgtactaggggatcttctttccccatgtacatcttccaagtaggcatcttgaatttagccaagggtaaggcattgatgtatgcatagaatggtgatccccttgacctggcaaagttcaagtttggaaggttttggaccaactagtcccttgagcatgcctcatatttgatatattttttcttgcacataatgatctgtttttgtaagggcttcgt

SEQ ID NO: 26602 - DNA, 2661 bp, Cannabis sativa
  modified_base (2408)..(2413): a, c, t, g, unknown or other
ttcaccaatgatgatagattcaaagaccagatggtggtagctttcaattctgttgatcagagctattttgttaacaacacaccgagcatccaattcttgatatcttctgcactaagcccttctctcgaagcaaacatcaaagctgacatatcatgtttctcacttgatgagaagccaagaaactcgaatttcttatcaccaataactataccttctctcaaaatgataagtatcctatcataaactcttgtgcactttttctcatttgaagaacttggactcgtcgaaaaatcattccaatgcatcttatcgaagtcttcatcaacaaaagtgacacgaagaaagttttcgatatcatttggataattacacaacacgctattgcagagttttccctcaggctcaggaccagtgaagtaaacttttgtgggtgttatttgaacctggtgtaagtacactaaatctttatctaaatgtaatttaggaatccatccactctttttgtacttcttatattgtttagtaagccatttaagtggctcgtagcagcattccttgcgttgaaagagtttgtcaagcgcagactctatgtattcaatctttattctacttggatcgactaactgaaaaaactcgagaccaagtgtctctccaggaagacatccttgttgaactaaggagtttatcttgaacaaaatcttgtatggcaagttaatttcttcaggtggaagtaccatgggaacaaggtaagagttggaagagaaaggagaaactttctttaaaagaaattggctttcatcttctttatagtaaatgaagttgttgcgcaaattcggaagatgagctgttgttgggatttccaagcatatggcagatgattgcccaatgcagcctgattcagtgaaatcaacatcccttatccagctgctaccagacctgtccttaaagttgtttaaaacagactcttctctcttataaattcgaggggcaccaagtaactagtagacataaaggagaaaaggaaagataatgaaagctagttagtcattttaatctaatgaacttcaagatagcaaggattaatacttctaacaacattgaacatacaaaaatgagtactaatagcaatgtctagaagaatttatatacatcttaaaacaaacctgaaggacaagaaacattgtggtttgtcccaatgggcggtgcaactcaatttgccatatacttttatgagagagctcaagcttatactcaacagaagaataaacaaaatagaagtagaggctcatctttcgcagtcttgttctgaatttcatactcacattctttgttttccacagaacagagaacatttcctttgaaacctgacatccaaagtacattattatgttctgatccatgttccacaacacagctttcggcttcgaaacgttttctctgttcagctcccaagctttgagacacgaattaccataccataattcgcgatcattcgccatggacaatattttttcagcacttgcaaagtcagtgaagtgaacatttgcatgagcggcattatgtgcccttgactgaccgatctcaacaccacatacagttccttctccactatatttctccaaaaacttcttgactattgcttcatcattgatctgatcaaaacaagaaaatccatacaactgaattgtagtatttgatcccatatcaattttatatttcacccttggactgaactgattgatatgggtattaattagtgttctcactcattatatgaccatccattgtgcccatatttatagttatacgtagaggtgaaaccttgtagcacaagccagtgtaacagattatggctacgtggtgaaacataattggaagagagggagtagtttattggaactgtgaatggcctagtagtatgtaagcactctccttgtgtaagaagggcttaatggttcgaactcttcttgtgttacaagtatatttgtccagtttggaaaggtcaatgcttttttgaccacaattgacctaatcattgtttaaagataagcacaaacgttttaacttaatggtaaacacacacaatttgtctagttaatattattaaaagaattctgtactaggaatagtctagaataacctagaacaaagtggggaaagctaaaaagattttcttagacaagaatataaaagaacctcttagtttaagtcaacgaaaaagaattagaattacaaataacagtaataagaaaattgtgttaggtgcccacaatcatgcaccatatgcttaataattagactagacgagcaaagaacaaacactactacaattttagacttttagggctcgtttagtacgtagtattgtattgtattatgttgaattatattgtattgtattagtattnnnnnntacaatactatgtttggtattaatctgtattaatatattgtattagtattatttaatttgggtcccggatttgggtctgggtcctaggtcggagttcgagtcgggaccggaagccggggtgcgaatccgggtcccaggtccagattggagattggtgttgactaaatattataatacaagctaatacagaccatttattatgtattaaataatacaaaacacattgcattaaaatttttggtcgtaat

SEQ ID NO: 26603 - DNA, 4291 bp, Cannabis sativa
tttatttacgtggagtgtaattaaagcccacaattttggggaatattgttatgggatttggatttaaatgtaattaactgtcaaccaatattactataaaataggggcagattatacaaaaaggggtcaaaaaatcttagagagaaaagggatatattgattgtaaaaccctaattctgtatccagaaatatctcaataagatagactcctgaactatacagagttaattataaaaccaagtaaaaatctcagtgtcatcgttattattttctttacatttgtgcttggtttattacaaaataggctcataatcgttaacaaaaaactgcgttaatagtttggtactttcattgagagcctatacgataaaagctcaaaaaaatccctccttacgaaagaaggaatttcttctccatggctgataatggggaaaacgacaacactcatcctgaagagactactcgtcgtcctggaaagaagccaatgggctcacagaggccccccaattcacgagcaactcattcaacacgatcaacacgctcaaaaagaagccaatgtgatgatgatcaaaacccaaaaattgggaatgaggaaattaacactaattctggtggttctactcccatgagcgcccttctaagaaaatccatattcttcttgggagtagatggctttagttcctagaacggcaggagaccttggctcacggataccctccgtgtagctagcagtcaaggtactctccttcacagggactcttcctgcaaagttggtggctatatcttctcgtagcaccaattgagaaagtttgttaactaatgagttctcaacttttcttgattaaaatccatgtgtcatgattacaaaaacatggacaacatttacccacaagcttccagggcgtataatggtctgagagcttccagtatcttctcctgaaagatttcaagcatgtgtggtttacgacaaaccctttattacatgacgccatcagctaccaattgaagtgtcattactcagaaggcataatttcttatattttctcgttagggttttaaatgctgaattttgagtttcgcgcgcgtgctaggcgcgtcttctgcgggatgcccaaaaacgacggtgattacatttgagcggactttccatttaccaagaactttttaagatgcatgcaatgatgggagccatctattgggaggcaatacatcttctcagcttcctacttatccaagcgttagatttcccttggatgaacgagtcaaaccgttcgcttctcgtggaaggtgcctcttcctggtacccattaattaccttaagcagcaacttcatacttttcattttttctgacagtcgtactagagtcctttggtttcagtcctttctctgccctgcgaggccttcttaacacctccatacccaagcacatattccaccgggacgaatgcagcactagggtcaccaacctcattttctcttagtaactggtaagctttcttcaccatttacttgttgtagagtcctgagggaattgtgcatgttttgtgcgatcatttgccttggaatattggcattgtgcttgtagttttttagagttctgtggtcttgtgctatgttgacctattttgtttttgtaccaatgtctagcaactacattaggtctgtaatggagaggaccggttcttccaaggcagcgtgcgacagtgcccctgataggaaaaggctaaggcttgagatatccacttttaaaactaggggggctcaccccccccagcgtcatgatccgccactgaggttgggccagccccaattgtatcatccttcagccatgccaaaaataccctcagtggggttcacatctcaaggaagctcgtccctcttgatcctcttgacatgcagaaggagagggaagtgaatagggccctaaaaagatgcttggaggtggagaggctacaagttcttagaagggccaccgtgttcttagcggtgcaaaaggccaagattttagatgggatgcccactctacctcctactgggccaaccgtggaggttgaagccttggagaagcgcctgtctattaaggtggggagagaggttgcccccttcactgccgagcttttggatcaggtggctgcgaatgcctctgagctgcccatggagacttaggcgtttagcagcagcatggacatcttcgtgttgcccactttgccaagctccaggtagtcgaggtaaggccttgagacattcttatcctctctttttcattttttagttctaccccctgttctaatactagggttctttcaattttgaccgtttcgacaggtggccttgctagcagagaggactacccaggaggcttgcatgctgatgacaaaactggagcaagtcaaggtgaatcaccgtgacttgagcaatgccaacgagacccttctagtcgagctcactgaggtcaagcttcaagttgaaggcttacataaggagaaccagctgcttgaggccaactatgctcaacagactctcctcatacggggtacaaaggcaattcatgacttataccgagagatggtggagcggtcgtttggagcagggtcctctggctcatcttgtgacgcccagtcttgaactttagtaggcctttttgaattgttgttgttatgtttttttttttcttttttgtatatatccctccttttgctatacttttcaagacgcagaggtaattttaattttccctggctgcgggggctatttgtaatagtaactaaagtgttttgccatttcttgacgaagatttattttgatagagttcttaggggttggtcacgtcatcaaaacatctggctccaacagctagtatttcaacctttcttgttggtcttaatcatctttcaatcgatccaggaatcatttttggctttaccctttcctccccagagatgtaatgcttcttcctgcaacttaccctcttgtttgataaaaccacctgtcaggagttatcctgaagacattttcccttgcaaaaaggatccttagttttttcttacattctcctcaagctttagttcttttacgaggttcagtctcgagagccacgcccacgactgctttagacttccatgcatttttcttatctagatccttgtcagcctgaacttttagctaatcatgcaacctaatggactaaacttataggaagtccatagagatttgtaagaaggaattcaggcgtatttttcttttcaagaattttggccgaatacacatcttatcctcggattcatacttaagtttagcttttgaggaaagaattcaagcacgtttccctcgggaagactttgttgaaaacatttcaagcttttggttgcatgtgttcacttaaactaataactttggcaaacagacgtatgaaattactgttgtcaacaatcaggcgtactatacccccaaatgagctgagaattttagcctcaaattctcagtcatttgcttgaaatctaactcattttcttttccagtccttgaggaggagatttaagtgtggttctattttgctctaggaacatactatttactcgagccatgtcgttcctttccgtgatagcttgaaggggaattcttgaaagtgtagcagtaatctcttggcttttgtgagaaaaagccgtggagttataggtgaaaacccaattgtatggctggccccaaatgatccctccatgacatggaccttgtaagggcaaatatagtccttcacggcactgtaggcttctggtttcccgaagggagagctgggccttcatctttgtgctggaaattttccttatgctaaggtccatttcaatgagcaagagttatgtcgaattttacaatggcaaacttttggctttgactaggaaaggctaagatgcaccaaaaattctaacacggacttcacttgtaaaaactggagggtgtaacattgccgggtgcgtggaagacttcaagtagtcctttttttcaaggagggttgaagacgtgccacacgttcagtgatcttctacacatgagaaacattatgcatgcgagagtcatgttgaatttttatgtagcaagctttagcttccacgagagaaggctaaagttgcataaaaattaatgcaatgacttcccttgaaaagatcaaagggaggaagcatcacgaggagtaaacagacttcgagcagtcctaccattctgggaaagagggttgaagatgtgtcatacccccagtgatccttcttggaagaaaaacatcgtgcatgggagagtcat

SEQ ID NO: 26604 - DNA, 2231 bp, Cannabis sativa
ttggctcagcttaggtgagattttcttttgggtgggggatttttagggttttatgtttgtttgattaggaagatctgttagattgttcggtaggctttgaaagcaattatctttcgcttgattttaactcgtgagtcgtgattggctagaaaatcgaacgcctcattgaattgtttcacatgattatgaaaaatagttgcatgtttagacattgtatttttggggtttcagaaactatctttgacattagttaagaaacggataaaaacatttggtctaccgtctacgatgctagtcttgcatgatttagggcaattctttttggtactagatccaatattgtattgactaaaacaaatgacgcttgatcatgttaaacttaaagttttgtgttttgttctcatggggtttggagagcaatttctcatgggaatttgctagattttttgtcttccaaatattgtagacttgtagtattagagaatggatggactcttaaccctattgataactcaaaaggtttgatccaagagggctagctaaaatgatcagacatgtggggtgcttttataataggtctgagtttcagttccctccggtatctaggtagcaattgttttaggttcaaggtctccaaatattgtagggttagaaggttcgagtctaggtggtctcgcggtctatatagcagtcacattcgcggcttgaaatccttcttttgtggatatgtgatcatcttgttcttttttctctgtaggtttctatatcatgtttgtttgatctgagctttggccataacatgaactttttaacaatttaagaacgtcttactttaatggtcgttgatttgtttcagttcctaatttcaggtttttgttgttactacagtgaggccgtatttggtgcaaacttggattcacagaggattgcatagcgtttagtttcttttctgtttatttagttaaatttaaacactttggatttacatgaaagaatccatagaaattcaaacttttttgttttgataatatcagtaatatgtcattcaaatttttagttgattttttacgtttagcttttttactgtaatcgtaatgtttatgttagataatttatatatttaatagaagaaaccaagaatagttacaattcaacaaaaaaatgctaagaaaatgttactacattaatacttaagattacaagcaaataacattaattctcaattacaactcaaagtttggtgtaaaataagaaccatactttcacttgcacaactttaagtgaagtgtttgtggttgtgggtaggggttctttttctcctaatctaattagtaattagatttggaaaatcattatccgattcaatctaattagattttaaaatcaaatttaattactaattggattggatcgatattttaattgaatattcaattatatacctaaatattaatattaatataaaaacatgaagaaaaatatgtaaaaattaaatatcttcctttatttaagtttaagactctgtaaacattataatatcatgtaactaaaagttttaaataattaaaacaataacatttttaagtaataaaatcgaacaaagtattataaaaataaatacacaaaacaactagtgttacaaagtcaataaaaaaaactaataattttttctaacatatataaatataattggataggattgatttttaattggattttgagattgatatccaacaaatgatctaatccaattgatatacaacttttagcatccaattcaatctaattgtaattggatattcaattttttataattgaattggattgaattagtttgatttggtttaatgggattatgatgttgcccacccctaattgtaagggtcaccaatttgtaataactttgtgaaattaggacgaaaaaaagtatgggttcacaaatttgtagcatttattaatagaattatgcacacgatattgacgtggcatgccacattagcaccaacaaagtactaagtacctataagcaatttgttaattaagtagaactgaaacagacataacataatttaataaaataaatatttcgaaaggatttttaataagtggaaaagtttggccgacataatatgaaagtgataataatttagggagatgaatccttttcactctttttctttattcataatcgtgcactaagtaaatattttattgcgtatgaataattttct

SEQ ID NO: 26605 - DNA, 1604 bp, Cannabis sativa
gatttttggaaaacaaattataagcaattagaattgaaaaaataaacaattcaatgaaagaaatataatatagaagctggatttttatgtgattgggatgttaacgagccttagtccacgagtcaatattattatatattttttgctataaaagtctttgagaatacaatgaatataagttctttattttttcctgagcaagtgttgtcagagaattcaacctttcatctgaatgaattgttgggtttttataatatttataggaattataattagtttccattttccctctaatggggagtttacatgaaaatacacaaagttagtttgttttcgtaaggctcagcccatgaatagattgatctattgactaggcagataggatacaattaagctgtcattatcgtgtcctttaattgtggacattaattgtttgacctccattttaggtagtttctctttttagtcttatttttatacgagatttgaggtgagttaattccttatagggtgcgcttgaataaaaagggaaaccaggctagtcttataggaacacgctgtttagccctccgggatcacggtactagaactacttccggatgcagactgtccttggcggaagctcatctgattatggagctaaggtacctcctaaaagcacctgtttaactcaggcttgacccaaattatcttctttgggcccacttgtgggcttttgatgctgacgtggagtccatgtgtcccttgccaaaaacacggataacatttatccctcaaactttcagaatgttgtgtattgtggaagcttgccccaatccatatgagtggacatgtagaggtttgaaagtaatatttttttatttctttgcaggtgctaactgatcatggaagatgaacttccgtcttcagaattggaaaatagacgtggaatcatctgttggtggatgagaacgtttattgaggagttactttctaagaaagcttttattttggcgggtgtttgttattggcacggaaattaagaaaagcattttcatctttaatttgtgcctcgattccagagtgcattaagtgcttgacacgcttgatgtctggacttttgacccgttggatgtgcttgtactttcagagatacgatctaggatttttcattcttttcctcgtggatagccaccttaggtataaataccctcaagaaacaccatttaccacttttccccaattttaaattttcaatcttctgaattcgaatttctttgagaacaaaactgtaacaccctaccagtttaggcgtgttattgtgatttaaagctaactatgtcattcgttgctaatcaacgagtttgttgaaaaacgtgtttaattaaaaatttacttaaataacctttagttaaaataaatatactttacataaactgtgatcctgtatttaaaaaatgttacaattatattacaaaatattagttacaaaagttatcgcctagcgactaataaaaatacagcctactgtcctgaagatcgaacactctaggtctaaccgccctgatatgtacaatcttcatctactcgcactcactgctatgcagccttagctttacccttac

SEQ ID NO: 26606 - DNA, 4279 bp, Cannabis sativa
tttatagatattgttggttcagcctacgcttgttcttgcaggtgtttctttaatcaaagactgttagttagttgagttcttggtttggtagttgtctattatgtcttttaggtgacgtttggtttgaggtaataaaatggaatggaaaagaaataatttttattatattcctgtttagttggattttaaagtatttgaatgacttttctattatttttgcagaatgactattctattttgaaataaaaggaaagaccattttaatgcaagatgataaaaaatttaataattttcttatcaatttttttttatatattttaaatttaattccattcctattcttatttatatttccattctcatttttacatttttattcattccaactaaatgccaccttagtgtctactcttataaagctagttagtctatgtaaaggctcctagctcatttgttcagatgaaaaagtttctgatccaagactgtattatgagataaccgtagagggagaaacagagagagccaagtgctagtgtgagatgaatatctaagctgcacagtcgagtctgaatagagaagttttcagggacctatgtcaggttaccttggattgtaatattagacattgagcatcatagtggaagatctgaatccaaactttgggagtttagaagagaggaatgggctcttcaacaattgttggaggaagttctattcgaacctctacaaaattcttggtgttctttactttttttggttttgatttgtttatgctttgttcttggatttgctgcgctgttttgtgctttgatgtgtttatgtgtacagggagttgagattggggttggattgatttccaacagatgtaatgagctttcaatcgatgcttattcatgtttgctaactgctttaattttcagttaaatgcagagattgcaggctacaatgaagcaagagaatcagagttacctcttgtacaagatgtagatgcaaaggttaaagaattgcatcaaaccattggaagcctcaacagtagccaggcatcactgagaaacactttacgaaagctgaaagagaagactggtgaaatggatgagaaggttggattttcgtataatgatttaactcttttaagttttctctataagccagtacttctattatattcaactagactgtatatgtatgcctgtattggacgtcctaattaattagaactaatactttagttatgtaagttcttcacttgactctctttgtgaactaatattttgttgaagggagaatatttttgaacaattagtagtatatgatgatctgggttgggtcatcttggattttcatgcacaatgcaatgtgattctaataatttatgataattttgtttcaagtttattattatgcagattggttttggttatgagagttagttttagttatgcttccttctttccatgtccagatatccagtgctgaatttgctcttgtacaaagtgcccaagagaatgcaaatttacgttccaagattgtgcaatcaccagataaactgcaggtaattttttcttcttccaaattgatgtacctgatttccaatgaacatattgtttggtgtggtccgacttagtattcttctgaacaattttctaataagaaaccatactagattgttattattgtctagaaaaattacaaacaaaggagtctgttaggaacacaccaaacaaagtattcgtctggagatgtattccaatccctaggcctgaacatgaaagttaattaaccactaagggcatcgttagaaaatcaatttgaacaaatgaatgacttttaagcagttagaaatgtaaaatgcagggtaagtattgataagcctaagacttatcaaatgtatcactgaaggaataaatgaaatacttaagtcttttcatgtacatagattgagttgtcttagtagttctcttggtccaactgtaagcctaggtgaccctagtcttttaaaggccaatgcctataaatagagaggtaacaacctcatttaaacaagctgggaattatcggaagattactcttttggagagaccaaacctcttgaaaatttggaatatgaaagaaagtctctcaaagagcttgtctttgtaactcttgaagattcaatagagtttctggtgggatttcaatatttgtgtctgaattatttgttatactatttataaactaagaaaagtctgtcatgtgtataagatggtaaggtcacaacttacaagtcattttaaaatgacacaacctcaatatttttagtataaggttatatgcttgtttgtctgcatccatacttatctttttctgttttaggttaatttatataaacgatcttaagatgtttttttttctcttaaagagagctctggaggagaagaaatctgtacgggaggaagcaaagaatactgaaaagttggctatgcaatcttttcaacagaagactgctgtagctgagatttatgccaaggtaacaaactttctgttgacataaaaacatacatgcgtgagcaagtaagatgtagtacaatataactcatagcctgaagagacgctggaaaattttgaagttaattgattgtattttctattggtttttctcaggtttctaagaaaatgacaaagcacttaactcaaatgcaggctatacaggaacaggttcatatacatatactgttgttatgtctcacttttttttcttttcacaaaaaagtttagtcagtttacatataatatttggggtgataagtttaagcttatcatttaaaatttttacatggattttgagtaatgagagttgttcttcacaagtacaagtttccattgcccaaacaggtaaactctgcaaaatctgttgataaagagtacaagactttaaaaactaaactaagtgatgatgtagtattggacaagtcactagaagcgaaattgttggatcggcgtggaaaaggtgtggttagaattctatttgatttgatgtgttgtttgtaccttttcttttaattacttggaatgaatgagaagactgttgttgggtaatgcttatagcctcatatagtacaaagatgaagccttaagccttgttttctccttttcctcagtggagcagttggaggaatacaaaaagcaacttgaaaaagaaaatgaactaaaatgcgaggaagctagaaaacagcttaatcaagtaagacttgaggtggaatctaagaggcgtaatttggaagcacggcagaagactgttgaagctgtcgtagcagaggtgttattttcataatttttacctcaaacgagccctaaatcggtttgatgttgtgatgatctaaaacctttgttgcaatctgtaggtggatgatataacttcaagaacaacacaagtaaaagagtccggagcagctaaacagcaagagttactctcaaagtgtgaggagcttgccaatgaggtacaatccacacactgctttcgaaatacccttttagccttttaacctagtagcgttttttctcaagcatttttcattttctaatcattgtcttcactctttcgcttgttggtggttgcagtttcatcagtacacgaattctataagcgatgcagtcacttcgatggatttcgaagcagtgaacgataatactcaaactgtaagtacttagcctatggaaacggtttggacgatttgccatggaacagtactctactgtaagtatatagtgtacggaaacggttaggacaagttttaggcaaattgaaatcttttatttagagtgaatttggctattgttttacgattcactcctagattttcaggcattgaacgcttagctctttagtctttagtggctgaacatcttgttcaatctttcacaaaatgcattgtagctactttaatcatataattattgataacaactattatgactaaaaaaaatacttctgcattgatacaaagtctataatacatcatcattgtttgtttgttttaccaattagtgagcaatccccaccacaaaatctcactaaaatttatgtcatttctttctcctcattacttggaaagagagttgagtttgttttacttggaaatttgcttgaggagaccagccacagaaccacaatgtgtggagttgttattacacttctcacaacatgattgcagcttttgaatgacactaacacacctgtcaatcaagtaaaaagtattagatgttgcacaattcaagatctttttgtaaaaatctaactatc

SEQ ID NO: 26607 - DNA, 2656 bp, Cannabis sativa
  modified_base (2630)..(2630): a, c, t, g, unknown or other
acattaaacaataaacatgaaaattacatgtaaacttaaatgatttctagtcttctagtgatagaaaataagattatattgaaatgaattttatttatggtataaaatcctaacacagagttactcagcctaagaatgactcaaagtcactcggcctcgtagtgacaagagtcaatgggctccaagagcggctcaaagtcacttggcctcaccgtgaccaatgtcgctcggctgaagagtgacttaacttcacttagcctcgtagtgaccagagtcacccgaccccaagagcaactcaaagtcactcggcctcacaatgactagagtaactcggcccctaaagcgactcaaagtcacttggtcttgcggtgactagaatcacacggccaaaggattaaaaaaaaatcttggcctcgagagcgaatcaaagtcacttggcctcatgataaccaaggtcattcgatcgcatggtgatttaggtcactcgacaacaaaaaagcgaaaagaaaaaaagaggttggacgaggttcaaacccgcgaaagctcttagacaaggtgagaagcatttgtcgatactccacggtgtagattgtgaagtgaaactcaaggaagggaggtccccaatctatagtgggcaaatccttgataatcatggagattgtaaggctcacactgcaactgagaaaaaccccaattcacttagtcgacaagaacacttaaaagaattcttttagactggaggcaagtgttaacccaaaaaatcgacagagtggattttcaagattcgtccataattagtccttataccatcgagagacatcgactgtataagagtcggtcgaggaatgactgaatcaatgtgtatggcccagggctcattaatctcaaggatcaatgctttcaagtctctgggtttatccatgcaactcggaggtcaaccccgtagaaacccactagtagagttagtaagattaactaactaagttataatttttggaggatttttataatgatgcattgagaattagatcttgtcataggcttaaagtccatagatctctttctcaactttccaacgcatttttcatcgtccaatgtcgacatatataaagagagttatgtctaaaatactaagactgttaaattgtgacaactgagtgtgtgatctaatgtgccattgtgcaagcccatgagctattgtgcgagcccatgagacactgtatgagcccattagttgttggacaaaccaaggagtaattgggtgagtcatggttgcaagtggtggagcatctgagtcagccatggtgaagcttctgctcaagctgtggtggagcattgatgcgagtcatggtaatgtatgtgcgaggggctcacatgtgagaaggagttggaaaatcagtcttgtaacttgaacttgagaacaatagaaggtttataattttatctatattttgagatagcaatttgaatgcatatttcatctttcttttcatcttagatctaagcttgaagcatagtttgattttttggccaataagttaattgatgagttctcaccgtgaacaaagcttgtatctcaagtttagagatgaaggaaggtgtacagagatgtgtataactaagatctataagtgtctatttaaagtaatgtcatagttttagggttagaattaaatggactaaagaaaaagatataaaatggcctttattagatgccttaatcaaatgcctataggagagcccaatggtttcaattttaccattttagtcatactttatgttatctgcgttttcaccgaaatgacatgtagatactaattaaaggaggataaggagtcattaggctgcataagtgcctcacattgagctcaaggaagataacaacataaaccttgtagaactagtccccataagcgaagtcttcttgggaagaggccacgaaagagatgtccgcgagctaacaaaatcctccattccaaaagatggaaccctttgctctagcaagaggtacaagcctaccactaggatgcgttagtccgggatatgcctacaactcgcaaaaattcagtccgtgtatgccaggctacgggcccactgactgcgctttttgaccatgtacgatgtcagagtttgtctcccacgccacgctaccatgcagagcatgcttgtccttgtgtactgtgctaagagatccaacggctagggatgcgggacattgaaatgagaatgacactgagacgactcatgtctagagtcccgctagtgtagctagtacgatctgacatcagtaaagaccacatagaaaatgtgccacctaccaatccaacgatgggtgttaatccctatgaagatcaattgaagacgagatgcgccatggaattgacctataaatactctactagtgcacaagaaagggagagagactcatctttcagattttcacctgaaaattcgagacatcttcttcacaaagaaaatacatcatattgtaaccctacagataactctagaatattcatactaagattcttcttcttcaagaggaacacgagggaataggagctaagtccattattttttatttgtataaacaatctctagccaaagagcctaataaaatggactcgtgnactaaggatagttaatgcttgaacca

SEQ ID NO: 26608 - DNA, 1190 bp, Cannabis sativa
atgttgagctctaagtccaattatgcttttaggatcatccagtattataattaagttccgccttgtaaaaccgagcttgtcggcttttactattttccaccacaatatgcatacatccctccaaatgactccaaatgaatgattagtctttaaaatgacttaataaattataatcacactaatcgataatttaaagaattaatttaagaatattaatacatagattgactaaatttataagacaaaatatgaactcatcaggaggattgtattgtttacctttgggaatgggggaggatcaattgatgtttactgagatttttagaaaaatacatattagctaaaagaagtatgattaagaagaaactaagaaactaatttttacgtggttgggatattaacgagtctttgtccacgagtcactgctattgagctctttggctatgttgtttacagtgtatttttgctttttggacactaccgattctaaccctttgcatgaatgggttatgccatatctataggcaaattgttgatagatcgggttgacccagactcgttagagttcttgttagtccaaacaacccactgatgaggtaaaatacaacatattatgagctattgggatgggtaggtgaggcccaatttagattaagctactctccgtacacggttgtactgtttgatagtgacaggtgggcgtgagccatcgtggggaataaagaatgtcagaatagtggatataagcccaaaaaggtgatttcctttttgttgtgagcctttccaaagtgtgacacaagggacaagcccccttatttcttgggatcgtgtcagaagagtgccacgtgggtcggcttcaaggacattatgtggtcacagatgccctttcatattctattcccggatgacccataaggttatctgtcttgagtttatgtcgttctacttgataagtgctaactgttgattcgggatttagtgttagaatctattgttaataagtgatcaaggaagttggaccatgtgtctaactttgttgatgagaaatgtttgtagaaactggaccttgagtttggttctgcccatctttaaagaacgggtcgcgtaattggcccttatggacctagtgaatcaacttggtatctctaattggccttcataatggctcacgtgctagctatccaaaaata

SEQ ID NO: 26609 - DNA, 1848 bp, Cannabis sativa
tagtaagtgagaatgagaatatataaacataataagctagtcattttattttggaagagattaaaatattctacttgccaaatggctagaatttttgttagtggtgcaaaatgtaattcctactgcaaaatgaagcagccaaaaagaaagaaaaaaaatgctaaaacagttgcataatagtccatcaataataattctttctactattgtttgcatgtattgacttaggtatttctcttctatctatatcatgagaaatgtatctaaaactctttactattctctttactattttttgtttgctttgatctaacctcaatacttatggcactttgatatggattcaggaggaccttgccaaaatgggagtgatgatccgtcattacaacagcaaagaactaaaggggtttgttcgtgtatctgttgggaagcctgaacacactgatattttgatggattgcctaagacggttctattaatccattgcctgttttaagctttaagtttttttcttgttctcctttgctctaaagaagaagcagaaccttcattcaaattgaaccagttgaattgaataaaattgaaccatgtttgtggtggtctgtgtactactttggttgaagctaggttatatatgctctattcacctcaatttgtctaatttagtgaaattggttaactaggtgttgtaatgtcaagtgtgcaatggccataccttattattgttattattttctttaggttgttcaattgactaattagactaatttagtgaaattggttaactaggtgttgtaatgtcaagtgtgcagtggccaaaccttattattgttatttttttctttaggttgttcaattgactaattagactaatccctatccctaagggatagctgaagatgtttctgtggatgctaatggatttgtctcactccaagtgattcttacataattgagatggaagataagggtgatcccaatcctacatcaattttttttgggggacccctcttactcactactaagaatttggatatgaaagtatggatacctacaaatacaatggagtttgacgatgcagtaattaagtataatgtgttagattctattgataaatacataaagaatgagtctttgttagaagacccgatgtgaagatctcatgagcacgacatgcagtcaaactaacaacgctaaacaaagtagctaaacaaagtaaataaacaaagtaaatttatgggataaatttatgggagtttttcttactttttttttttttttttttgcattgagcttatttaattgagccttgaggacaatgcttatagtaagtgtggagggagattaactgtcgtgtctatccagttttttttctttagttatttatttttatcgtttttttagtttatattaatttttcttgctttaattttagtaagtgtgggttgaatgaaattctattgacaatgattgctcgtgtttgatgtgtgattttacttagatgtcttatgcatggtcttggggaaaatcattttgttgttgatgaaattcttgattgtatgatagttataattctctaaaaatgatagattctcatgatttgtgtgcttaactcatgattaattactgctcaagcttgatttttttttttaaaaaaagtgcacatcagttaaattagcatatttgctaatgtttggaaagatgaatacatgtttgacttttgatttaaaatctcaactactctggaacttatttgataattatttgaggcaaaattaataaattacacatagttttaagatatgatatcagcaatttttttggatcgattgaacttttcaagcctac

SEQ ID NO: 26610 - DNA, 2541 bp, Cannabis sativa
ggcttcaaactcgttaaacctgatgatgcttttctattttactgcttaattcattatcttgaattcttgagattttttagtatattatttcttgatcgtgttgcgtgttttgttggtactgtaaactgaattgtaagtgaaaataataaaaataaatagggcttaagatattttaggggaaaaggaaaaataaaagaactgggtatgaaatattagatattttcttcactcaatattgagcaatgagcaccacttaaaagattgtaggaagagccaaaatgattttgtttggactttgggggcccaagctatgttggcatttacctttgtctccactctacaccttgataataacatacttactttattatcatttcagttccagaagttgtaaaagtaaatgtaaagggcctttgataatcaagagaaaaaaaaaatgaggtgaacaaacgtatggattgagttgtcagatgtaagaaaggtaatttggtattggtaaagataatgaagatgggatgtcaagtcataatctatacctcttgtaattggcattattcaaaaaataatgctccctatactaatgcacttaacatgtgcacaaccaacctatatcttattccattgcccacttttcataccaaatacaagacatgagtagtctaattaatgtcttagtgataaggtttgttgtggacatatatatatatataattagcaaatgatacaatggaatcctagaatgttaaattattattaaaaaaattaatcaactttatcaacgttgtctttcaatagtttagattgattaaaattactcattttagaaaattaaattcaatgttctgtgaagcttagcttattattaaggagagcattctaaataaaaaaaaagcaaagaataatgtatctggaaattttagccttaattaaaaatttagttataatcaattactgcaacatattttttaattaatgatatgacataaatatcatataagttgtttttagttatttatttatttgctactctccttttgagaaattatttgattaacttttattgacattttatatgtgcaatggcaattactagtgatcttttttctggtatcaaattgtattttccagcatggatcttctttttgtttgaatatccgataataaatgtggtagtttcgttatttaatgatgtgaatatatcaatgcagtagtatataatactaaatcagatataattatattaattatgtgcaaattttctaaaaaaaaattatatttattatattggtcggttatattgaagtgatgatgcgaaattaatggacttcattaacttttttttttgataggatggacttcattactaattaaaagcagtagtatataaatatttatatctcgatacaataagttggtcatagtcttaaatttgtcaacgataaataaaaaaagaagctacagagaaaacgtttaattaaatgattttatattaatcagatctaatcaacattaattatgtctagtgtacatgcatcaaaagaattaatgattctgatcgaagaattgcactactacacaaacgaaagtcaatacagatagaataaacgattacatatatatggtagctagttatacatatatagctatagccttattcttctacattaaatattgttttgaactaaaatttgcctcttagaagcaaataaaccatacacgtaaatatatatggttttaattgtaaacattgttcttcatatataattctaaaacttgtataaatactacataataattaaggaagaagaagaagaagaagaacaaggaattgagaataggagtgattcttagagagcttgaaggtggaggcatatagtagttgggatagtatgaagccggcggagcatcacccaccggcatatatgggggacgtggcataataggagttggatattggggactgttattactgccaccttcaccgccgggaggaccataattaccaccacctccgccgcaaatattctcttggcaaggaggtttaggcattggaggaggtgggcattctggttctttgtagggcggtggagaaggcggcggaggagctggtggcggcgggcattcgacgactggtggcggtggtgttggcaagggctcacatgggttttcacacgcgtcgcacatcgtgcatgctacttgctctttcgacacaactgaggccttcttggtagtagtggttgtggacgtggcttgatctgttgcattgtttgaatggcttagaagaagtagaataatggaaaatattaggagtgagatttgtgtaacaatggaattggccattgctactagtcactacttttgattagagagaaaaagaaagagaaagggagagaaagagatgggagatgatgaggaaaggtgatggcaatatatattagctatatagggatttggtatatggtatgagaagagtgcatgtgtattggtgaccgcaccatatgtcggtgtattatcttctacgataccatcatcaaatcagga

SEQ ID NO: 26611 - DNA, 3183 bp, Cannabis sativa
atttaatattttaaatctagtatcaattgtattagattcatcaaattttttttttaaaaaaaaaaagtaaaattttaatgttagtttttatataataaatttttttgtgtataatataaaatctaattactcatttaattaaattaaatgaaaatattaattagttaaattgaatgttaaattaatttgttgaatttttggacattccatggaatatctaattggatgatattgaaaaataatattcaatcttatgtgatcacaattaaatattcaacatttatatgtttattataatatgattcatcaattatcattagattgaattaatttaaaaacaccctactaataattgaatacatatacacgacatttgtttgctgatatgaagttaatatttgcttattattttgtaaataatttcttaattatatatattattaaaaaaaaattgctataattatagggggttgaaatgtactgcatgagtagagcgcgtagctttatatttaaagtggttaatgtagatttctttgaagaaaataaactttagagtccaaatgtgggtagtaagtaagattcgagagatcataataaataatctttctccaattaagaaaggaaacttgatctctttattaacgtcaatcacgcaaacatgtttcagatcacttacttgcatacgccaataatggtggaccctctaaccctctcaccctatcatttcatcatcctatttcaattcctatacatcttgcaacctacctatatttattcccctctctaacactttacacaaacaatgaattaataagtagatgtcatagatcaacattcttctacaagctacctagctctagttttatttccaaattccaccatgtttgcttttttatgtacgttacatttttctgaaccaaccccatctgcacatgcatctcatccatttaatttggaccatctccatcacatatatatatatatatgttattaattataagttatacacaatatcatatatatatatatgtacgtacttgtaacaatatcgtagaaacaaaaattaaccaataacaacgtacgtacccgtgatttacattatgacgaacgcgagtgtcggagatgactgcctgccttcgtaaaattctattttgtaatatgtaggtacgttgaaatcgtatacaaactaacaaattaatcaaataaatatagagagcatgagccttgaatatctcgtgatactacatatacctgtcttattcactcactacaataaatgtaacaataaagtccaaaaactctatactaattgcactttgaattagcgagagatgtccgacaaatgcgatcatcattggtataataggatccctttttagtgtcactaactactgtcgtaacaaaaatttctttctccacactatctatctatatatataaccaaaatatatactcaaagcccccacttttgggtttcttgctctaggtttttccctcattttatatccaccttttacattgggattttcgcaaccaactcttactttttctctctttttattttctcttttaacactcagacaattaaactcctatataccccaactactagtccctactactttcatctaaccctttccaaatataagtttaaactagaactattattgcttacactcttttatttatatttgaaaccaagctgatcattcatcattaacattattgcttacactctctatctcactctctctctctctctctatatatatatacgaataagacattattctactatatataaatattatagtacttatggatgccgccacagctgccgactctccaccattaaagctcttcgggttcaacatttccgacgacaaccatataaacctaccatcagatcatcacgtcgactcagataataataacaacaatactactagtctccaaccagtaaacgacgtcgttggacagcagaaatacgaatgccagtactgttttcgagagttcgccaattcccaagccttgggaggccaccaaaacgcacacaagaaagagagacagcttttgaagagagctcaaatgcatgccaataacaacacttccaccgttgctgcagccgccgccagaaactatgctcttgcggccgccatggctgcaaattattctcatgcatcggggggattcgtgtcgccgccccagcctcagcagccgccacatcttctgggcttgcaagcaccagagtcctcttcctggtactacatggctgggccgcaatactcaccgacgttgttgtcgcagagtggtggccgttcggcctatctttcgagggcaaattccatgccgggaaggcgcgtctatgaaggagagggcaatgctttcagagctttgtcggacggcgtcgtttatgacaattatcgtgttttggaggattttgatcatgatagagatctgactatgaatgatagtgggctaattattagtggtgatggtggtcatcgtttggacaagggcttgggattggatttgcatctgggtcttggacctgctaacccttgatttcaagtagtagtgtagttgaaattattactagctggatatgaggaagaatcatgatctagtggtataatgcccttgtctttgttgattaattttatcttgatgatcaaaaaaaaaattaaagagcttctctttttaaaatatctacaggcacgatgtgtaaattatatgctcaatgattattctaaattttcaacttaattcataattatcttcctaattaatttttaattagttggcctagtattttatttactaatattataaaactatatcaaattttgatatttgtcattttttatattagtataagtaatttttttattttgaataaaaggcttttatagattaaaacaaaagaattagatttcacgcttattatatataacgttgtttggtattgaaaaaaattccaccatactctaaacattcataacaaaagcccaattggctatattatgggctacaaaattacatgatcttaaaataaacaaaaaaattacaatttaataaatgattagagagatttttacattgagtcgcgtagttaccaagactacaactggagcatgttctgttcaatgtcctgataattatctcagagtcactctcaatcat

SEQ ID NO: 26612 - DNA, 2434 bp, Cannabis sativa
tagggcacaaaacccaacaagaaaaggaggggcttaactaatcgactcgtggaggaagacggggacccttgcacttggccaagatagcttccagtttcttgttcttcccccaaaattgagctataacagccttaggatcgagaaagaaggggaggtgaggttcgaacttgttggctttccaacacataaacactccatcctcaaagcgcttctcacaatgcttataagtaactagagccagtaaatcatctctcgcagccttggcggcctccttgcgggttcggtcccagaattcgcgaaggtcactgacttcaacaatcatgttggtcgttgtctccaagtcagtctggtgcagctcctcttgagatttgagcttcacaataagttcttgcttctcctctttggaatcccggtggtccttcttgcccgaagcaatgatgccatccttagctttcagtgccgcctgatgattttgctcaatgagggccttctcctctcgggcctcattgcaaagggcttccattcggtccatgtgaccgaactctgacacggtgaacccttgattgatcaaagtcttagagagccgatcgacctccgcagtgatctagcaacaaaaaaagaagaaaaaggttagaactttgaaaataaagcataaaaagaggcgtggaaaattgacacttaccgtagtcaaggcaacactcatgtgctggatctgataaacggggttggaagaagcacaagttgcatacctcttggtgggaagctgggttaaatctataacaaaatgactcatcatttctgaggcaaatggagccacgttaggtcccacaaagtgtttaaaccagtccgtcatgggatctaaattcaaatcccaaacgtccccggtatacttgcctcgaaaaggcccatctttagcctccctcagccacttcttcagggcctccactttagcgtctcccttggacaattcatccacatcgtaattgtgtttggaaatgcggagctggatcctttcttcaccaggatgggcaggagtcagaatgatgcctaggggcacaagatacttgtcaacctcagaaggaatccctaaatcgatactagggctgggggtgtcaaccctcttcaacttttttgaaggctccgactaagaaacgtcgctcttatgctttcgatcgagaggaggaaccacctcttcttccttttcgtcaattaagaccacctcctggtttccgatagcttcgacaacaggtccccccggagtcacactgactcgagggtgctccagcatgtctaactcagggctatgagtctgagcaatggcgtcaagaagaccttccatgggtttcgctattcaaaattagcaagaggtcagaataacactaaaaattataagtgaaagtacagtgcagcgagactaatcctaccccggtgatctaacttagccctagcaaatttataaattaaaaagctggtgtcgtcatctcctaaaaagctatcagaaggaagaaaccaactcaaagtcatgtaggaggaatgatccaaaatgattggtataggaggactccagcccatccgagaccgacccaagaaatgacttaaactggagaaataaaaacccttagcgttatcaccgcaccgggaatggggcatccaaaagctatataatcttttatcaaattccactggccttaagttagcatagtcttggacagaaggaacgaagtgaaaattcaaaggagacttaaaggctctagaggtgcttgcaccaggggctccggagttgggaactgagaacagaaatttgggccagactgaagtcttctccttccttacctcctctcgggagaccctcccagaggcagcctacaggtgagcatacaccagctcctgctccctcttgtatctatacttgttgtatttatcttttgcatataaaatgatgttcgccctgagcgccttctcacttccaagattccgaatctttgggcaaagaaccttggataagttgaaatcatcaacagattggctctttaggatcagcttggccctcttgaagttgactgttgttactaggtcccccacattcaagtcttccttcttgtaactagaaaaaacttttgcgtggttaaggaaaagttgggtgggggcagtacgatgcatgggaggatcctaacccagtccgttagcagattcagacactcgaaggccttgaatacagaagaaaagaaaaacttgtggcgatactcctttacattttctaaaaattaaagggtaccggagtctcattggccgaatgggcctgcagtttgtaaaaaccatccttaaactagtccccctttttggggactaagagtagtttgtaaaagtataaaatttcggcaaggctaggcggagcccagctcctggctacataaaaaaataagcctgataacag

SEQ ID NO: 26613 - DNA, 2098 bp, Cannabis sativa
  modified_base (1545)..(1555): a, c, t, g, unknown or other
ctataatacgtaccttgacttgtaactgaagaaacttaacataactaatggctttttctaacatggttaccaaatcaacctgcataattaagattacaatttatatatcaatatttgactaaatattaatagagaaaacttaaattaattgcagttggtttgatgacctcatctaaaatgtaagtagaaagaaatgaaagagctagcagagcataaaaatggcaccttagagccattaggcacgagttcttggagcatcttaagccgctcgctgattcgctctcggcgattctgaataatgacatacacaattatattaattaattaattcatatagcttttaccatgatcatgagttgatcaatttctcttctcaatattattattaagacttggaaaaaaaacacattttatataccttagctgcaatactttgaggatccttggagggacaaggtttctgtactttaggcttcttattgttgttatttgaagaactagtacattgcttcttaagagcttgagtattattattctctccctgccaaaaaatacacatatataccatcaaatttccaaaaccatttacctaaatctagatatatccaattataatattgagcattaatattccaagggtcacaaatgaatgagttaggtatgtatatataaggagatatgtaaaattgaatttaattaaatttaccatatggggacgcttatggaagccaggagattgatcttgtgttccagattcctcaaagctatcagcaatgacagttgcttcagagtataaccacccatatgatccatcagctgatcctccatgttgatttcctttatcagatgctgtttggaaacaattataatcagagctgaacctgggattatgattattccacgtataattactctgatccggattattagtagcactgctactactgtagtactcctccttagcagtgtgattatttgaagccctctggccaaagctaagcaaagaatgatcatcacaactattattagtgacaaaaccagtgaagtttatgactgactgagcatcttcagattgattattattattattggctgcagctctgtaggaatggttcgtggctaaattattcttgccacaaccactagtagtgatagtgctattagtagtactcataatcatttctttttcttcatcgaaagctactgctgctgctagcggtttgtggagatcttggtgctcaacattgttgtaggttgtttgtggagagagaattgaactcatgatcatacaagggtcatggggaagtactattgatctttccttggccagagccatatttagctaaagacaaagataataaatatggttttattaataataagtactggtctctatactattactagtcccaagatatataataagcaagcaaaggaatatatatggtgaaaggagagagctagctagttgaagcctatttctaaggtcatatccaacaatatacaaaaaatagaaactagttcatcattattattattattatnnnnnnnnnnnttattattattattattatactattattggttatgggtctgattgctatagttactgaaacaactaattcatagaaagaatgaataattaataataaaagaaatgtgtttcagcatatatagttaagaaaagtcttaaatggacctggaggcttatgttttaaataatatatagagaattatgtctcatgtgaactgaatataataataaaatgtgataactatgactatatgtataattattggtaacttaattaattaatggtggatgcattgggattgttagctggcagaggtaaaatatgagtgagagagagagagagaagagaggggaagaaaatgagaaataaataagcagaatggtcgccgtatctatcgccaaacccacgtcttagagaattgagagattcctctaattgaacattcataaatagattaggcaatttccttgcttctttccttctcagttgggcacgtggacttgtccctttataaaatactactattttcattccttgaataatgcatgcatgtaaattataat

SEQ ID NO: 26614 - DNA, 1864 bp, Cannabis sativa
atgaaactagcaatacgtggctcggcacgtacattcacctagtatatatatatattacaagacatgccattatagaaatgttataaaatataaaattatattcagaacatttgaaatacaattttttataactcagcatcactttccggatgagctatatgtacatttggtggagaagactcctgactcatagttgtccaaacgtgtggaaattttattaaaataggaaatcaattaataaaataaacaaagaaagtatctctaaagatttcagctgcatttatcctggtcagtgtatgtgggtttattgtgagattaacattggtcggacggtgtcatttaccctatctgaatattccaacttattcttcaaacaagttgtttttgaggaataacccaccctggacaacatgtcaaatatggtatcacccgtctagatcttaaagtattccacatatcacctaaatgaacgccacgtcaccttgtgtagaaattgagataacacgcctcacatataccaaattcttcccattaattgtttcatgctactacatttgttactccactgttgatacctaaatcattatatcttcaactgttagttaaattacggctctcagatcttgcagtcaccatggctagaaagctaaatatagctaaagacaaattatcattgcaagaataattctctttattgatgttaaaaaaaaatagtgggatggaggttgtaactaaagcactgactgttaaaggcatgttttgtcaaaccaaaatcagcgagcaacatgggacaaaactaccctaaaaaatttagacaattaagctatagcgtcctcaaacagcacactcaaagagctagagctttaacttcatactacacaccaattcattaacatatcaaaaatgatccccaaaatatctacaaaaaaaaaaagataaaagtgaattaatcctctagcgataatattaacctaataaaaaattctcaatagtaaaaagataacagctctcaaataaattatttttaaaataaacttatcgacaaatctctgtaatagttgaccctcttcaaaacagacctgcagattaacaaaaataaactctattacacaataatttaaagaaaaaaatagttaatgtgaatgaagatggtaaaacaatccacatcattatgtcacgactttaaacacttatttgtcaaatctaaaaaatcatttgtagaaggcatgagtacaaaaagaaacacttctcatacccatggactatatcacaaatctaccgtaaaaatagcacaaaaatcataaaagacatgaaaatcatcaaaaaaaaaaaaaatggtgcaaaaacaattgattttaaaagtttgtttttgtaataaaatgttacatatttaattaggtcaactcaaataaaatcaatgaaaaaaattatgattaattgtcttcaattatataaattttaattttaaatttaaaaatttaatatataattatgagcaatttgcttaaaattgataaacttttattgattgttttttttgagacaatttttattatttaagttatttgtttaaaaaaatgatgtttgagcttttttgcctaatattttgctaatggcttaaagtataatgttatttttttttttggacttttattgtaaagtactttatggcatagacccacaaagagcacatataattagatgtggttttgttaggtgaaggtacggattgaacaaatggttacatttttattacttattatatacaaaagttaatatactcattttcaaatgaaaagaaaaagtgatttaatagtcatgcattacataacataatattaataatttaaagaaaaggtcatat

SEQ ID NO: 26615 - DNA, 3411 bp, Cannabis sativa
  modified_base (404)..(404): a, c, t, g, unknown or other
tggattgaaatttaactgtaatcacatattaacaatattgttttacaagaacaataattaaaggaaacttttgttcccataaaactaagtttcgactatgcctaccgccaatattattaaggtgacgtttggttggaaggaatgaaaacataaaaataggaatgagaatgaaaataagaataagaatggaatggaataaattttaaaatacataaaaaaaattattaaattttttctcatcatgcattggaatgatctttccttctattttaaaatggaatactagtcattccaccaaaatggtggaaaagtcattctatattggaatgacattccaatactttaatatgcaatcaaataaaggaatgaaatgaaaattgtttcctttccattccatttcattncctccaaccaaacgccacctaacttcttaatctcggttcctttataagaaagaccacaccaaatgacaatttcctccaaaaatttcctgctatatatagcagcagttaattaaagaagaagtgattgtgccattcattatctaaaccacacaaaagacaagtgtaattaatcttgaattctaccaaacatgaataactgatcctcttgtagggaatctttctgaagggacaatcacctaagcacctaatcaccttatgtttaggcacaatatgaacctgtcccaaatcagattatattacttctccatattagtttgttgcattttgtcacacaaacctgaaattaaacttttgaaactcatttttagagaaaaaagctttaatttttttcttgttattatttttcttcaataccaactaattacatcaagtggaacttcatagtcccatcattcctcttcttttaattaagtacactgagttaatccaattaacccacaagttatctttcttcttagtgatatatagcctaaacatgcttgcctatgtcacatagattccataaggcaataatatcttaattcatgtttgtacgtacgtaggtagataaataaatttttccctatgtttttgctaatatatatatgaagatctaaagagaggccattattttttctatatatcttccttttcttgttcttgattttgtttgtttttttttttttttcaatagaaaatgatcacactcccaacacacacatatatatatagagagagagaaaagaaaaaccctttttataaattaaactccagaaaacaaaaataagatcacacgaaaccaaagaatatcaaactcataattatacaaataaaacaaagcttataagacacatacatagaccaaaccaggcgccaccaaatgtctcaaagcgcatgcatgcatgcacttttgagattattattattattattgcttaattaaacaaacaacacacaccatgactatatattgactagtacttgtggcggccttgttatatagtttgtgatgataaggtgttgtgttgagcatctaaggccaatctagggttacatgtgcctcctgagtgagctgagcacagcatggggtagcaacaaggatttgtaagcatagcacaaggctgaccaggtgctatacagtgttgatcatggacacatcttcgattctcaccccatccccaatcaccttcacaatgcagtcctgagcagcattgcttgtcttgtgcccaatgacaatattcaccaggtgtcatacaccgccacttaggtaccaaattcagatgaatatccgcttgtagtcgcccaaagcaccccacaaccatcacaccagctaccaaataaaaggtagaaagtgtggagttgaaatggttggagagaggatccattcgtctgatatggcagggaagggtagaaatataagaacagagggtagactaccgtggtcagtggtggttatcgggaagaggcggctgaagaaggtggttatgtaagcagaaattcaaaaaactgggcaataaggaagttgaatgcgtccaaggttgaacacgaatgacagttaaagcacataacggcaacagatacaaaaagggcacatagactattattgtagcagttgtaaatttttatcaataaataatatctatgtgttgcaaatttataataataatgtatcatcaaataaaatttgaatatatataaatatatatgtgtgtgccttttgcatcaagttaatgaaagagtaatgcatgacattttttccttattaataatcaaccgccgttgactgttctaaactaattaattaaataaatagaacgacaagaaaaaataaaaaggcttgtacagaacgttatctaatttatgtatatatatatatataaacattgcccaactcacacatatgtatctattgctattttgatttttgaaatagaaaaaaataaataaaaaatgaagggtgatgatgataagctgtactactcttattatcggccagaaaatgtgatactatggggaacagtggcaacaacattagcactagtccaattaccatatgagaagatcatagatggaaatggtgttacagtagtgatgatcccaactatcatatttaggaataataattataataataatagtaataatattattaccttattctatgcttttgtattgtcactcaatttctccttctttggttcttttgcaacaattacattacgccaaagatatcccaagctggctcggtgtacccttttgctggctatcatttctgtcactcttggaatttctattctcacatacaacctctcctatggttttatatcatcaataatgttccaaattaaatgtgcttttgttcttgatcatcatgcacgtgtatgtatttaaacaataatattatatagtattgtaattatatatacatgaatatttagttttgtttatatacaattcttcttcttccttttttttttttggtaatcaaataagattgtattgcactctcaacaactttttacaaacaaagagctgaagcttaattacaaattgctagggtattggtatagactatagagcattttctcttttttcaaatgagaaaatctagtaagtacacaaatgtgtgtatatttttgtttttaaatttcatctaacaatatatatatgcctataacttttttaaaaaatagtatatcctctatgaatatgtttaatatatcttgcttatgaatttttgaattaagaggtgacaaatagctagtataaaacaactacaattttgacctgaaatggaaacgcataggtgagcaatcgaaggatattttagctatatatatagctagcaagccttaaattttctatttaatcactagtttgtaattacttaaggttatcaatcactcattattataacaagtgatttgtacaattcatctaaaagcatctctaatagggtaataagtaa

SEQ ID NO: 26616 - DNA, 1313 bp, Cannabis sativa
  modified_base (26)..(31): a, c, t, g, unknown or other
  modified_base (83)..(90): a, c, t, g, unknown or other
ttttctaactttatatgtgtttattnnnnnngttttagaattcatattaggttgtcaaacaaacatacttgttagtaaatctnnnnnnnngtaaaataatttccaacacgaagcactcatcaccaagacttgtcttattttatccaggtatctgcgttttgatcaaatttcttcgataggaatttccttgtgctcatcacacggcattagaattccctctccaaatcctcggccttctctgagttcttcatccccttccagttcttctttaaacatgtttcttttttttacctttctagaattttgattactgtttggtttcaacattcttttttcaaattttgcatgcttgccttgagttgttgatgaataggatctaagcctcagagtgattgtgagtatttagtagaaataagatattttccacatactgtctatagtcttgactaggttctattagattttttccttttctattggatattaaattaaaatacccacattttagcaatagggatggttaaaactacttcctctatccgagacctttatggttttggtgatatgtcatttatactttcaattggatttttgtgttcctgatctgatcatctggaaataatattttttgagaactttgcttccaggcgtagggtttggtggggacctttccaagtagttttaggggaggactctcccgtgtccatgctatcttcttcagtatgagtgtctaactacttggtgttttttctttcttgttcttgtccagtttctatcatggctgaagctattcacgcagatgaagttaacatcgtggagcgagtggatgctaaagttccacgagtagtgtacaattcatctcaataggagatggattagtacactaacaagtttagaaattacggagccatcctgaagtacgaggtatatcttggccttcagagtactctgagactcttgtagaatagacaatctgtccttggggagtctccttgtaaatgatatatggctttgacatctagagttgggcccatatggaggtgacaccacatcttccactctatagctactttgcaaacttccgcgtggaggtgggtgttacccctttccaatttattccacaagtttataagctacttgcgagatggttcgttctttgccgagccaagaaagtggacgtctcgactccgtaaggaattctttattcctacctgtttattgagatttttagtaaccaataatgtaataccctagaaattaagaaatggattagcaaaaccctaattagataattatgaataattgaggaatta

SEQ ID NO: 26617 - DNA, 1315 bp, Cannabis sativa
gatttgaggagggaagctaaaggacccactttttcgaggtcagctttccgatggaggcttctgtagtgacgtagattgacccaaatggtttttgggaacagaagggcatgtttagagcgtagcattgtgagttgttctaggatttggattgaagatgactacggcggatgaagaagtagcaatggcggtgtaaaaaggaagatactgggtgtagagagtagagacacgtgagctcagatgattaatctgggtttgtggcacgtgtcctctaagacgtttgttcgtgatgaaaatgaaggagagctgcccaagtgttcgataaaattcccgaatgaagagaagacggatccatgaagacacgttacacgtaggtgtagttcatttttgttcattagtttttaggttgacttcattaattgggtgattatttctcttaaaaacaaaattcaggtgttcataaaatagctcatttaattcaatctgaatgatttaattcaatttgcaaagtagataattaaaaaattataggatattctacaatggactcctataaaatagatgaactaatgcactctctacttattttaccatctagaagaatttttcagtttatttttttatattcacgtatgttataactattttagataccttacaaaattttgaaaaattcggaataatttacaacatggaaaattatattcatacagtctattttacatgcgtataaaataaagtagtcacgagcgcaacacactatttgaaagcaatttttcggcgtgttaaactttttcaaatttcttaaaattttgcagaattttctaaataactataatttatatgactgtgagaaaaaaattagttcggatactataacatttaaagatgtattaatgcattccttttaagggagtgtattatagaatttttcaaaattatatatacaattaatattttagtaaaaaaaataataatataaaaatttaatacatataatacaattatatttctattcttatgaataatttttttgtacataaatacataattttttttctttaaatttgttattttatttattttaatttgttatttgagacatataataacaataatttattttattttattgctaattatgtaaaatataataataaaatgtaaccaatctaaaataattaatctgtgcaaattgaattgcatttgaactattatgcgaattagattagatctaataaataaaatcggcctatcgaatgtactatgagcaaggcaatgcaaattggagtggattagaggaaattacacttagtat

SEQ ID NO: 26618 - DNA, 2274 bp, Cannabis sativa
  modified_base (2197)..(2227): a, c, t, g, unknown or other
tagacacaattacacaatataaacattaattgatccacaattcacattaaattcaagcttaaagatatgaaaataactctaaatcttagagttatcaaaagcagatccaaaaaatcttggaactttaggcgtccgcaaagataaaggcaaaggaattgctgttgaagaactagagaagactccttccacaaaatagcctaaaaagtctaaagcttctgaccaacctcaatagaagaggaaaggaaaccacacctcaaggcacggtgaccagaccaattctagaggcagagtcacgtagagaaataagactgatgccggagtttggaagccagagtctcgaagggaaaagcttcctcccaatgattccagtaaccacgatgaggatgttgataaagtactgcaagtatcagataacaatggtggaagcctttccacaaatgatctccgaagaagattgaacaccaagaaggaaataaccaaaactaaaaaagcaagatcccgcaggaaagatttataaaaccacatcaacgattgcgttcacataagagaatcctcaagtgataaaacccaacgcctggaacgtaaggttgaggatttgatgaagatcatggaaaagatttctagaaaacaaagtggtgcggtatctgactctgaggaagaagatacagagccttgtgtgaagaaaatcattgatgcaccattgccaaagcgtttcaaaatgccccagatggagctgtatggatgtacggaccctagggaccatttgtccaaatacaactgcatcatgcaagtcgccaaggccagtgatgatgcaaaatgtctatgtttttcattgacgcgaagaaagtctgcggaggactagtggaagaggttatctccgggatcgatccacaactggagaggcctacaagtaatgttcagaaagtagtttatagcagtcaatgactatgatttggaagccaactccttgaccagcattaagcaacaacaaggagaaagccttaagaagtttattcaaagcatgatggatgtggctgttaaaaccaaagtcactgatgacatgaaaatggtggctcaaacatcaagacttacaactggatctttactgtggggagatcttcagcgcaaaagggtagatacatagagtgagttcttaacaagaactcaaggatttataaatctagatgatgcttatgctcaagcatatggagtactcccagtgccttccaccaaagtaataaatgaccagccttcgcaaatgacaactccatccatttaccctctgccaactacttttactactcaaacgatatatggactaagtacttccgtgcagccagctgcacaagctagtttttctgggttcgagctacacaaacgtaatacaatgccgctcccagacaaacaaaccaaaaaacagaagttccagagtccaatataacccactcatgaattaaaaggagtacgaagggtccaaatcgaagtgagtctgcgaagaagggaaaaacccaagaatcaagatacaccgagtacacaagtctcatagatacttgggagaatgtatacaaggaaatctggaccatggttcactacaggaagcctccaccaatgtataaaggcagaaaacaaagaagtgatctgaacaaaaagtatgaatatcatggtgatagtggtcacaccaccaatgaataggactacataagagatgaaattgaggggttagtacggaatggacactaaccaattaggtaataatcccaatcatctatccgggacaggcagttgcacatggacaacttttcattccaggacaatagggagctataagtcctcctcagggagtaggtcatccacaagttcctggaatacaagctccaattgtacaagccctttagggggcacaaaacgctccaatagtggcagtagttgtagcccccagtcccagaaatctgtacccttcaggagctgcattaccagtcgtagatggtcaggtagcaactatttcaagtggacttcatattgcttggagcactcaaaatgcacagaagcgtacatgaatgagttgaatcaaggtgaagcttgccacatggtacaatcacctacccagcgtccaaggatgatgaattagccaatgacttttactgaagacgacaccaggcacatgcacttcatgttgggattattttaccaggatctnnnnnnnnnnnnnnnnnnnnnnnnnnnnnnncctaaatatgaattccctaaaataatgaaatatacacataagggttt

SEQ ID NO: 26619 - DNA, 4444 bp, Cannabis sativa
ttagttggttgcaaaaaaacaaaacctggccacttaaggaggttatgccgcgaattaggatttttggttaattaggatttttgtcacttaaattttaacatgtataaatttctggcctttgaacttgtctttccattaaaaattccccgaaactattgagattgttagatctaaagacttttttccaattttagtaagaaaaatcaaacataacattagttcagagggcttgattttgtgcatatcaaaattcgaggggcatgatttggtagatatcaaaatctaaggagcatgattttgtacatgaacaatcacaaaattagtaaaattgaatgaaattagataaatgtccttaaatccaacaatctcaatagttcaggagaattttataacggaaaaaaaagttcaggagcataatttgatacatgtcaaagttcaagaaaaaaaaaatcctaattagcctttaattgtagtggtctctaaactttttattttattttcaaaactaatatattatttagaattaattttgaatgattaatttattaaaataacaattttttttaaatcaaataacaattcatttgaaattattaattaattcgaaatcaattattcaatctcaataatcacataattgtgtatttgacttgaagattgattcatgtatcaactcttcccttgagtagtgttgatagagccgctcattaaacttataatttcaatctccaataaattttgatcatggattaaaactctttaatctaatagtcataatttattaatctcattataagattacattcttaataattatagacatatatttactaagtactttattataatcattgagagtccattaatatatgttcaccaaaacttttgacaactacttaatcttgctaattaagtttgattatattatgagaaaataaatttttatatagttggggcattaatcaagtttagtccacgagtaaattgtattgatgcttttaagatagtttttctacaatggacttttttgcaaaactcaatgcagaatcctttctaacctccctcattatctccttttttcttcttcctcttcctttaaaacctttcgatatttataggcaaaaatggggaagtgtcttagtggtctggtacatccttccttgctagctaggatctatgttatcatctctacacttaggaaatgatgtgtggtaataggtgtatcgggtaggatctaaagtagacgtttggtgagacaagactagacttgttcacgactgatgggacagtgttgaaacaagttatcaatagatattcaagtaaatacaaatgtatgataagcaaatatattgagcaaataataaagcttgtaaagtaaagagtttaagggtaagaaattgtaaattctcgatttttacaatgttcagtagaacaaagtcacttacgtccctatcgagccaagttatggacctagctttgagatctactatcgagccaagttaacaggcttgactaacccttacaaccgagaatttttcaccaaggtattttcaaacctcttacaatagttttggaccactaaggactagcaacctcaaactcaaattgctgtagcgtcaatctcactctaactaagttgtttacaataccggtgccaacctcacctcaacacaatatgaaaatatgtttatgattacaagaaaattcactatagaaaagtaagaatacaatgatgaacctagaatgattagcaagcatacttaaaagatgtaaaacaaattttggcttaagtgtgtgaaaagtgtttaattggattgaacactagggagctctcataaacacttttagtatgtttggtaaataaatgaatgctcagccaactctcaaaaatacggagttgagtttaaatatagttatggaagaaagtaattgttcttagtcgtttgacacaaaaatcaagacaggctactgggaattttgattcactgtttcctaaatagtaaacctatttttgggaaaaatggttcaccgtttggcaaacggttaaccgaaaattaacagaggtaaaagtctttttttcggcattaaaatgcttataactactagctcgtttatccgatttcaaaaattataattgcattatcttattttaatggtatgtgatttgaaaaattaatttagaatatttagatatcatttttgtgaaataatttgtcgcatcccaaagcgcgctgccctcctaggcgcgcaacactaagtaatccaagccaactcacattactgactaacggtagataatcatatttcttagaggtactaaatacaactccatgaatgagcaaaatgaaggttgcattaatgataaagatctctggggaaactgctaaaaaaagattgaacatgtggaaggatccgaacgaattctactttcgtttccctcgttacgaagcactgagttacttacgatacggtcttcaacaggcaggctgcactctaggcggcggctaggagggatcactagaccagcaaccagaccaacaatgaatgtgtaataatggtgattccacacaggctcaataaataattgaatgtagaaaggggttcctaaacaaaaaggagtccatgacccgcgtataaggagaggtcgaattccaaacttttctctcgagtatacccatgaaccaaatttcatacttagaaattttagggtgtgggcttgtaaatcattgtacaagactatgaaatgtataaaaccttcattgagtcttttcttgagttcctttcgggtcactttcgagaattttttggtataattaccattttgtccttagagtcaattttgaccttaaaatacttaattatctttaatttaagctacaaaattaacaaattattagtgataaataataattaaatatttggtaatcatcaaatcgaggagacttaagagtttgagtcaacaatctcccttttttttgatgatatcaaatatttgattattttgaaaaggaaagaagataaattgaaacaatatattagattagctcccccttaatgtgtgcaaaagttaaaaaaaattaccttttggttttatcttacatgattttgtaaactttccctcaatttattacttaaattcaaataacgttaatggtccaaaatttgaggttttagccaaaaaaaaaaaaaaaatcaatcttagaattcttccccttatgattcataaaaaagggtggctaaggaatttacaaaataaatggcaaaaaaaaaacataagataccatccattgaagaaatataaccataaatcataaacattcaaatccaaacaagcataaaggagtcaagttcaaacatccaaaagaaaaacaaactaacatgtggatagtcaaatgcgctaggccttgcaaacatactataaataagaaaaacataaacataaaaacgatgtgaacacatgatgcaagggggctaagttggtggaggtccaaaacagtccatataagctctccattgtgccatctcctcttgagcatcggaaaacctgtgctccatgtcactcctcatagtggccatgtcacatctcatggtggtcatctcattttggagggtagtttagtgggtgttgatttcccttctcaagttggtgaaattggtagtaatggaggtgtggagatgagggaaatcatcctcaatgttgtattggaggaattgagacattagaggaacttgaacttcttcttcctcttcaccttgagcttgggcatctcgttcttcctcttcactttcacttgaggccaagtgtacttcctcttgggcatgtggatcttgtatgctatgttatgcactagaccagaactttgttaagcagcaggaattgtgagcaggtatcagtcaaatctaatagaggaacattggactgcagttaagcatattttgaaatatttaaagaggacaagacattatgtgttagtctacaagggtggtgctttaaatctcgtaggctattacaggaagtctacatctgggatggtatttactcttgggggtggagcagttatttggagaagtgtcaagcaatctgcaataggccaaatacatagctactgatgaggctgctaaggaactggtccagctaagaaattttttttacagaacttggtgttgttcctggtatggaaaaaccactttttactttgtgacaacactggtgctatagccaacattaaaaagcctcgaagccacaagaagagtaaacatattgagaggaaataccacatcatcagagaatatgtggcaagagggaatgtactggtagaaaaggatgatactgaaaataacctagctgacccatttaccgagacttttgttgaccaaaagtcattcactcatttattttgatgataaacaaatatttgattattatttgttactaatcttttct

SEQ ID NO: 26620 - DNA, 3635 bp, Cannabis sativa
  modified_base (2991)..(3004): a, c, t, g, unknown or other
tagtagtttgagaattatatttaggttttctttttcctctattggggaatgtacactgaataacacacttgggctgcttcgttaagtccagcccacgatggagaggatttgctgactaggtagattagatttgcttggattttgttaacaccgtgttctttgattatgggaaatcatctgtgaattaattgcttgatatccgttttaggaagttttcccatttagcatgataagatcctctttcaagatctagtaactattgtttccttatttatgtgcaggaatgaaaacggataatggatgagtcttctaggaacacactgtctcacccttccgccctcacggttccaggcttgcttccacgaatgagttgtcaatgatggaatgctctatggtctcagagcttgatacgttcctagaaagacttgtctaaatgggattggcccactttatctgcactgaggaacctactaatgggcccattatgtaaacatgaatatgttcaatgctagaaatactgataacatttacactcaaagcttctagaatgttacgtatggtggaagcttgcttcactccttcaatatgaacatgtggaggatgagggataatatcatgaggttttaggtgttactcgatcccaaaaggtgacttgtatctttgattgtagtacatccccgtgtaaatcacatgatggtggaagggcgcaaccaatgaggagttgctttccaaaaatggctatattttgacagctgttcaattttctggcgcaaaaattgaaaaattgtatcttcatcattaatgtgtgccttgatcttagggagaatcaattatggagatgtgagtggatcattgaactccctagccatcaaatgaagcttgtgtttatggaggttggatcatggaccatccatcatttctcatgttggttgttcttttcaagtataaatacatttgacgaattccaattacaacttttcattcattttgtaacttttaaaccctttaaagcttctaactttctaataactctttaagacaaagaactgaatcaagagctaacttttcttcgtcaccctagaatgtgctgtcaatttttgcattcaccttatattgatgattcgagtgcgagaacttcgacatcatcaactcacaatgctcgtgagttttgcacaagaagaggaaagcatcaatctagattttgacgtagaagttaacttgttgatcaccctagtaccctgcctctgtgaaatgtacgatcgactcatccagctgaacccaataatgattagtttgacatctccacttttgacatcaggtttgttgctctttttgtctctggataataatttcaggatttaatgttataagttgttttcgcatgttttgttctagcatgtgattagggattttatcagtttgattgtcattgtaattagatttaggcaccacaaaccatttctattttttgaattccttgttacaaattcttggagtcgagcatttccaatacatgtgttggaaaaattttcccatgcccaaaatccttctggttttgggctcttcgttgatctttgttctactcttcttctttgttgttcctgacttcctatctagaacgagtggctctgggagttctcatttctacatagttagtctaattaggacctctctaattagtttatgggggaggaccccctactccctttctatgataggtagttagggtggctaaatgcttaggttctcttcttttgtatagaaatcatgcctaagaaggtccaccaagaggaagtttacacagaggaggaattcatagagctaaagggtgctccgaagttgattctaaatggtagtccatgggagatggaccaacatatcaataagtttaggtttataacaattttagaaagtatgagaccaaaatggggctccatagtgttctaggactgctccacaatagactctccatttagggagagattcataacaagtgcgcagaaggggtctttggcgtctagagctaggctcatgtcgaaatgggtgcacattttcccttgaggtgttagttctctatcttttgtatcatttttggagtagcaccttcccagtttattcccgaggtgtacccctgttgttggggtggtatgttttctgtgcttagcacgacaaacctacaccgacgctggaggaggtcttgtactttacaagatcaaatcataacccatgagaggacataatgagaaagtagattttcacaggttaaaacactactctatgagttttccttgtctaaccagctccatgaagtaaatgcatgacttcagagactactacttctacacttgtggcttcctattgaacagggttccaacccttagtttggatttcaacatagcaagtaagttttgttccttttcttgaattttaaattttatttttcctcctatttgttgtattctaatacatttttatatttgtgagattttttcccttcaccctaaagttggtggagaggatatacaacttcttttcatccaaggaattgcaagtggaaaaactcctaaccaccaaaaacctttgaaaggttttcctcatttcttcccattatgacgtggacaatctttcagtgaaggaaaatgtcaaggcaattaaggtcgatgagcaatggttggttaattgggggagacaattgttgggttttgagccctaaataaaacccattttaatacaatcaaatttactaattaataagagatcaaaaaatcagtatatgttgcatggtccacatgatttctttgatgaaattatatttaatgtataaattatattaaatccacaacatatagtcattcatgattttagtgttgtcaacacagtagagtataatcatgattatatgtttcaaagtttaagtaccatgatttttcagtacacccgatttagactgacatgataatcagtgatagagcttacttacaccttggatannnnnnnnnnnnnntccagggcattggcaaagtatgcaaggattagatgtatggagtacacattagactggagtgatactgaacttggataagatatcataaaattatcattgtatttatctaagtcaatatatgttatttgatcttaggtccatagatcttaaccctgaaatagttaggttcgatcttaaatgtattatctatgttcttagagttgttcattaaagctcgaatgacctaatacttacatattggaaacatgatagtacaattgagtaggagcgctaatcatacatatcgaatatataacttctatatattctagaagtgaaacggtgatttctttcaagcttatcgcaatagagataaatgattgaggcctcattttagaaattttattagtttactgaaacattatttctaggtagctatgtgttttaaggataaaatacatacaatggtagaatggtaaatttatccctattccatgtatatcatctacagaggatctttgactatttgaattagaacgatggataattcatagcgtatctaaatcttggtacatatagaacgttctgtataattaagagtgcaattccaaatatatagtggtgcacgaatgaattaataagttagagaatt

SEQ ID NO: 26621 - DNA, 2123 bp, Cannabis sativa
ttatattaaaaaaaaaaattattgaaaattgagctcagagtcctatttttaccattttagaaaatataggatctattttgtcatttaataaaacagatgttccattcgataacttttgcaagacacatggtccaaaatagttaaagcaccactcaaacttgattcgcacaatattaaggcaataaaaacacatggattagctaagcaatacttttagaatagacaataaattttttttttttttaacagaagaaattccccatcttgtgtaatatttgtcacctttaaatttaaccttttatcaatttttcccaccgaaaataagccctactatgtatgtcaagtattttttactaaaaactttatgctatgcctttccctcgataattagtaaaaacaaataaaaaatgcatctctcatcttattgttttttatttttcttttactatataactttgcttaatgtttattatataaaatatatattaaaaaaataaataacacaatcgtttgttaaaaatatatataactttgcttaatgtttattatataaaatatatattaaaaatatatatattaatgactgcaatagccgtttgttacattcacaagcttacatattttgcagtttaatttagagacattattgatttcaagaagaataagattattgcatcttatttagtacaatcaagtaaggggaaccaatattcaatgaggtaaacctttctaaaaccttactgctataaaccatttggttttaccaacaatggcaacttttttgtatctttctttctttttgtaaaacactgttcgatttcatgagctgtgcagcagttgtagcaattggtccctagttggcaacttccctcaatgatgacttcttcgataacatggccgaatgttgttccaagtattccttgctgttcatctctgttaatctgcaatcataagcaactaaaattgaatatacgcgggaaagatatgcgagtacgaaattgtagatcttacgataaaagaaagcaaaaagattgtaaaggcgaaaaagtatgtttcgatgtaaacaacttccatgacacaatgcagccaagccaaggctatggaaatgatatgacttcatcaccaaaatatcaaagcaaagtggactcattgacagaaacaggaaccgaaacatgtatttaaatgatcaataagttacagactgaaaaagagtgagcaacatacctgctgattatgcgatctttagcaaaacccaattcattgtcgacacaaagatcagaatcgtcattccttcttgacctcgaagaggttctaggtgcaatattttgagcatcagaaattgtcacaattctctcaaaaagttgtaatggggtcccctctgctgtacataaaagtctgcctttgttctcatacataacctgccacaataatgttgaataactcactacaacttcattcggaacaatcaaattcgttgtttgaataacaaatgtattaaggatagcctccagatttaacatctatgatatataatattcacagttttaataaaggtgtctcctttttttcattgggacatacatcaaccaaagtgacaaaccgaaatgcagctggcctattgtagagaccgaaaattgggacaccatccaatgccagagtatgaaatttctctgtaaaacaagatgaatgaacttgtataagtattaatattccgagtgaatttgttcaaagatgctcgtgtagtaatccacatgcacccaaaaagaaaaaaactatttaagaacttgttgtatcagtacatgttatgggaacaaaaacatgatccgtttggatgtcctggaaaagaaaacaaataaaactaacatccctagtctcaacaacatttcaaaacacaatgaattccaatttttcatgtatcagaaaagaaatcaataatctttaaatgaaaatagaaaaacatttctcccttaagaagtatcaaatcaatcatttaattatataatgaagttgtgaagcaaactcagtgaaccaaaattctatttttaaagttcaaatgctacgcatgtcaaaatccactctgataattatacaacttactgaataatccaaaataatctgcagct

SEQ ID NO: 26622 - DNA, 6639 bp, Cannabis sativa
gcgtggggtcgggcggtggccggaggtgggtcgccggagtgtggtggtgatggtggtttatgggtttttttttgggtttgtgtttgaagagagagaaaaggatagagatggatagagagagagagagggacgacagcactgtttttggtatatataatttttatttttttttatataaatatatatattatattatatttatttaattatagtcttcacacttgtagtgtgagtgtgtgtgaaaggatgatgggactatcactcttaaagtgatttcccttattattgtgagacatttctttgtaactattcattgtgttgagttttattattggacatatctcattgtgtactactaactttttaaacaataaagatccatgatccattcattctggagttaagtttttttttatctaatttcatctaagttctagttttaattttgtgattagttttaattttgtttgtgcattcttgaatattgtcactaatgtaacaacttgttttgagggtgagcattcaccacaattctattaatagtagcaacaatatatatagtagttgacacttctcttgcctaatatgtattattgttttaactctctcccaatgtgataaatggtagcagccattaaaatcgcgtaagtgtgttttctgaatttgtcatctaaatttgctcattttactccttgagatcccctgattatgtttagaatataattatgttgagtacttcttattccaaacgtcttattcatctgatcaaatcatcttttactaaaagtacaatgaataaagagatatcattgctgaccagaggcgaaacacatcctccactacaaagtcccaaaattagcaagagttaattatactagctgttcatataataaattattatgttatagtaaaagttgtgttcactggataataatgctagtatgcacacatataattaagtagataatatatatatgtatatgaactagtaatatagctttcttacttaagcaccatcatcacttgctgaaacttgtaatgacatttcaattaattagatgggtataataagcaaaaacaattatagggcaactcctcttggcaaggcatacattatcattgatttaacgatcccatatgaaagaaatcataataataatgcttgccacagaggggatgccctatggttggatttgcttagtgagctaacttgtgcttggtttgccacgacttatcaccaactcgttttataggcctccatacatattgtacgtatatactagctcgaagagagaaaaaaaaaagggatgagagagtatagggtagcatatgctgaacacacttacgaatatccatattcaatttcttaacattgctgattttcttttctgttgatttattcaacatgtctatggcttgaaaatgatttgtcacaaatacgattccccacaatatatacttttgcatagataaaatgatgagaaagggatatgagtaaacaattacgatgcatattccaagtttatatctatctttttttattttgttattacttttagcttttcgttgtcagatgagaatttaagggtaattccaattacaataatataacgccatagtgtttccattttcttttaattttcacttggtatgttggcagtggcaccatagcgccaagcccaataaattataatgttgaatttatgtagtagttggaggtattatttcaggtgcttttaatagttatatctctttttgaccaaattatactatagtatgacattaatttatacgattgaacgatcaatgtataatataaatatttatatatatttcataatcttttttcataagtgattgaagaaaatcaaattttaccattctacaccatctcactttcaaatcctaatgcatggttttgtttgttgtaagattggagctaatcaatttgactccctagcaaccatgtttatctacaagataacgttgaagaaaaaaatacaaacattgatccctaataacttatctatctaagaggaataaagataaacacattcaactgaaatataataaggtattattgttcctcaagctgacaacacattcaacacattcaaatttgactcatattcattctacaataaacaccatcaaaaagagctagagagagtttgtaaaatccataatccacaactgtatttctctctttttttgtagatctaaaatatgaagatctgtatgttaataaaattcacatgcatcaataacttgagctacatttatatttatgttcaatctacactcattattccgcattcatataaattaatgttcatacgtaccttcaattcactttattctaacaactcattcattttgttcttattcttattttaaaacacattcttattttcaaaatcatattcattatttttaaacaaaaacaaaaaaagatccattctcttcttcttcatcatattcattcttcttcaattttaagcaaaaattaattatacgacaaaaaaatcaaaaatcaaaataatagactcaaataatagaaagtatgcctagtaccaggggtgagcagagaaaatacaaggataacatttttcttccttatttattttattttaacgtttaattttattagtaaaaaataaaaaattcacagatgacagaaatttataaaacaaaaataattacacattttaacaattgcaatttagttttagtaaaacacatattatattacattttctaaacaaaatataataattttaattgattttctaatcagtttagtaaacaacttaataaaatataatctttaattatttatattaaatcaattcatttcttcaattgattaatttgattttaattataatttagtaaatgtgtcataatgacacataagcctaaataaataattatagagttatacataagaatgtgtaataaaatttgtatctttaagttgataacactttgacacgataattgtgcctctctctcactttcttcctcaatttcggtctctttctttgtcattttctgttaccggcgagaagctcgaaggttgtgaatgtgatcaagcagcagttcttgaacaaccaacaaaaatcaagaaaacaactagtgaagctttctctttgttgacgcggtttttcgtcaacggatcttaagaagatcgtaaaatgagcaagatgaacacaagaaatagttaatcaaagtaaactggggtctcacaaaactacatgtcctattcatagagtgaggagattgaaaagaatccttccacgttgagccttgtacttcctgcacaaaggagagtgctccatccctctcgctattgcagatatggccaattcatcctcccaagacggcccagaggaaaacgaagctcatattgctcctcaaaatcctcctactataggaagcggacttaacaagaggtaatgactcaacacatagtgactaagagacaaaggaagcagaaccaataagaggctcaacacatggtgactaccttagaggcgaaggcatgttatgaccctagtacttgggatcccagtgtcttaatcgaatgtccaaacagcaatttggaggcgtctgatgtgctgggttacctctctctttatcctcttggtgagggggtgaaggtagtcccgacaaagaaatgtcaaaatgtcggctctcccaagataattcatgtgcctggacaaaataccacattgaggttggggcgagcttgccacttcatgattactttcgagatgtggcgaactactttgaagtttccctagtccaaattactcatcgtgggtacctgaccttatttgctttgttcataatatatcaccagaagggatgaggaaggccttctcttcacaaaattcattacttcctttcctttcggacttgcctatctatgaaccattcaaaatacttctacttcatgaactgagaatggggtcaaccgtatgtttctggtattagtagcacacctcgcgcagacaagcatcgatcatcctacttttttacgacccccatggacactatccaccgtgctttcaaccatacgggtacatatctcagactagtcccgactgaggagatgatacaacacgcgacaactttcacaaccatgtcagtagctgagaagcatgccccaacgattgtacctgtggagatgctcaagttggtaggattgtgcccttctgagcataactcaattaccacaagtacgattgatggacctgatgctcttgttgtccccattgaccgagggaatccttctcataggaactttacaacagccgactcttctacacatatgtcgttacaacccaccacttcgaggagggatattagagtgattgttggtgtcgatatcaattccgagactactacagtgctcaatgattgaggctgaaggttcctttctctttcttttttatatatacttattcactattttgaacatattcatatgataatattatgatgttgtgtgtgttgcgatattaatgtttttttctctttttcttacaaattcaggtatgttccaccaactgctcacaagttatgatgagattgatgatgtgagtgagtctagagaagaggaaagcgctcaaacccatcctttagttcctcgagcatcgagttttcctaaattcatcccaataatgctacaattcagatgctagagtctgtgcacgacaacattgacctccttgttcaaaaaactgcaactattgaggtggtgcgtgacatatccaattatgaaggtggccctgtcactagaggagtccaagatatccttcgggtaagtgatggactattcatcaaaatgtattaataatggcttatcttttcatgtgcatgctcatattttttatatgatctcgcatccttttattgtgctaacaccctttaattctttctcttatttttaagggtgtaactcaattaatggtctcccaacctaattcttcaaatttacaagagaagctagctactgcagaaccagcgcttgaggagcagaaaaagctctcttctctttcggatgcaaagtataagcatgacaaggatgaacttgagagcattctctgtaagaggctcgcggaactccgtgatgcgcaaacagagttggagcaatgaaagggtcaagtgaattattacattgatcagaactttgcttattcgaagaagaatgaggagctagagaaggatgctaaagaacacgattcaacggttaaggcattgaaggccactattcagaagcatgaagatagggcagtgaaagaccgtcagaaatacaagcttgtcttcgacaacaaattttatcggttgtgaaaaaataaccaaaatcttgaccttttgcacttgcttctccaaactagagatacagagcttatgaagtgtaaggcaagactccttcgagaagccacacttcctcccactactaatactgccggtgctgctaattttatggacccgcgtgaagatactcttcctttagagttttagcctatgtgctatttatcctgagcgcatgtgctctttagttttattactctttagactacttgcatgggtaatttgtgtttttctttcattggttactttacatccaagtacttgacaaactctatttttctaagttatcctttgttaaatagctaattaaatgagtttgctctttaagctctcttgatgaacatgtttgacttactagttttttttttttagagttaatactcttttctaaattaagtgcttatcatgtatatgattaaatccattctctatccattataacatttagtctaagtgtttgtgattttaagaaattcaccacttttctaaaattattttcttaatggaaattgtaggattagaaacaagtatagtcaacttcataccattatgccccccaagtaactaaggtttgattattatccttggtgacatgtttttgagtttggcaatgtaactatcttttgaataaataaaaaaaaaatatccaaactttgaaaataacaatactaaaagtttctaagaatatgataatctaacaataatcttggatatgaaaaataaataaataaataactaaataattaactaagaggaaacttggctaaacatcaaactaaggtgaggacacacgaatgaggaagactcccattgtaacgccctaatgctaaggcacactatagtgctttttcagttacagtgctatctttgctaatcaaagaattttctcaaaaaatgtgtcaaattaaaacttttataataaatattaaacttcataatttacataatcatttacaaacaccgggatcccgtttctaggcttttataaaatatatgcaaaaatacatagcaggtcgcacatcaactacaaaataatatccccagatgtcccaagaccgaactctccaggtcatgccgccatgacatgtacaacctcatctcagctaggctccctcctcttcagcttctgcctttccttttcctacacatgaaagcaaatctgtgagtcgacagactcagtaataaaagcataaaacacatcatatactactgacttgtatctagaagcccatacacctatttacaaggcttaacaga

SEQ ID NO: 26623 - DNA, 1742 bp, Cannabis sativa
caaccactttaacttccagaaaatgtttgggaggatctagctaaggatttcattgtggggctccctaattcttttgtagtcacaaatattttggtcgtagtggatcgattcaaatacgctcattttggagctttgataaacaattattcttccacaaaagttgttgagatcttctcaaacatggtgatctgattacatggaatgtcgagatccattatcttggatcatgacccaatctttactagtgcttttcggtgaaaattattttagctaataggactaccttcaaaatgatctcttcttatcacccccaaatggatgggcaaacaaaggtgactaactgctacttggagcaatatcttaaagcattaacagttgagaatcctaagcattggagtaagtttccctcttaggtcgaatatcattataatacaaggaatcattctactataagtataccccttttctaagctgtatatgggagaacactacccatgattctagcataaacttgaggcactacaaccattcaagcaataaaagaacacttgctacgtagagatatcattctccaacaattgaagaataacctaatgcaagcccaacaccgcatgagacaacaagaaaataaaaagcaccaagacattcagtttcaacaaggagaattggtactggtaaaattgcaaccatatcattaagctacaatggctaagcatctcaactctaagttgtgtcaaaggtactttgatccaattggaatgggcctctcacttatactctcgacctactagcatgcagtaggatttaccggacctttcatgtgtcattgttgaagcaatttcatggtacaacccctcctacttgctatcctcttcccaagcttgcaatcaaaaacaagactatcatgattcctctagctatcgtggccacttgtgtccataaagtctagctatccttgagagcccctgaagatgctacttgggaagactttatcgaattttgccaaccttgacgacaaggtcatttttgaggaggggagtagtgttagcccaattcaaatgaccggctgaataacttaagaccaaggaatgatccaaaagaaagtctatgaatggatacaagatgttgccccaaaagaagatatggcttcttcattcgaatagagcaacgacaacgaagaagcaaaccaacaaaccatggaggaaggaagagagtgtgcatgtgggactcgtgtgtgcgtgagacccaaatggctctaagagtttgttagcatggagcaacactaattttgggtgagaatttgtttatttttattattcttgatttccctaaagtgcttgatataaatataccacttgtattgagagacgtttatatgttgaatgaaatagtaagagatttctcaggagatcgaccttgtctcaaagaaggcatttaatgtatcaacttgtctcttacacatcttttccctagtagtatttctccaaacattggtcttattcttgtcttctttcttcacctgaataatttttgccttttcaattctttccttctcctttgcatgcctcttttcatatattggtaggggtggtgtgactttggttggtatttttctgacttactgtgtctactcgctaaactccttctttaagttttataaatcgatctactcagtctaagaactctcccatcgaccccaaagtaagccttttgatatctttctataattctcctaggggttc

SEQ ID NO: 26624 - DNA, 1195 bp, Cannabis sativa
cgaagcttgctaagacatgtacaatcttcatcagagaagcttgctaagacatgtacaattctttgattattaaagcatgctaggaagaatattagattataattctttattttaagtgtgttgcctttaagttcgtaagagcggtattaagttttatgatcgctgtctaacctgcctggcttatgggttcgcaggctaagtcctataaaatgggcgcccagcgaaatacaagaagtcagggtaacatggttgagaccagaggcagtaagggaaataaaaatccccaaaatccccttggtcgcggccgtggctgtggcaaagctcaaggtggtcacctgtaaatccaccacaaactcctccggattgggagcagaggtttgcagaaatgcaagatcgaatccgccagcaggatgaagaaattcagagcttgaggtagcagggtcctcttgtcgtgcctccttagcaagttgctcacgcctagctccagcggtgccagcagaacaacatgttctggtaaccttatggagcccttatacgaaaggtttcgcaagcaagcacctccattgtttctgggaggtcctgatgtgatgaaggcagagcaatgactcacagtaattgagcgcattctaaaatttatgggagtggttgttaatgatcgggtgttctgtgccactttccacttccaggaggacgctgtcgtctagtgggagttgataaccctcacttgggacatcacggttatgacctaggaagaattcagggagttgtttaactctaaatattataatgaagacatccgcaatggtaagcggaaagagttcaccaagttagtgcaaaccgaggggatgtcggttactgagtatacgacaaagtttgatcgtctggtcaatctggctgtgggtattgtgccaacggacttcagtaagaaagaaaagtacctggctggattgaatgtgaagattagtcatgatctggtgatcactaccactgaagcaaccaattatgctgagatggttgaagaagctctgagagccgagggtgctgtgaaattctttctagggccttgagtgactgtgaatgttggtggaccccccacttgtcctactcctgcttatggtagggatggtggtgattccaccacagattagaaaaggaaacttaccccagcatctggtggtttggggcagagtaagcg

SEQ ID NO: 26625 - DNA, 1655 bp, Cannabis sativa
catatggaatgtttatgagagcacaaccatgccatcgaaaccacaagattggagccaagtggttgcgcaactgcttagaatttactgacgtcggtgaggagttaactcttccaactattgaaggtggttcaaatatggtaacttctgggatcacgtcaaacgtggagaagattgcgggaattattgatgtggtcgagaagatagaagccaataatgacccaacattctctgtcaatcaatcccacaattctggggatactcatacgctgacttaggagaattttatctcctctacaggttaaaatcccatcccagatgtcacgagtaatatgcttgtggtagttgatactaaaagacgtaggacccaggtgggcctgtctgatgggccatccaacatggaagaggaaatggttactagtaatgataataatgctattaatgtggggtcaaaaaatgattttcaggtgggctttggttttcaggcccaccgagaattatgagcctactcagttggaatttccatgggcttgggaacacgtgggccttacaattccttaagggtttggtgatctaaaagacacccaatttcatctttttatgtgagactcttagcaaaagagactacattgagagtttgcatatcgttgggcttgaaggtttatttgtggttgaagtgcaaggacatagtggtggtctgactctactttggagattcgatgaagaagctaacttgctgggattctcaaacttgcatattgacttgaaaatcacggtttttggtgctccctcatggcagttaactgggttgtatggagaacccatttggcatctctgacgtaagacttgggatttacttcatgatttgtcatctgaatccttgttaccttggtgtattataggagacctcaacaatattctaggtcatgatgacaaatggggtggtgatccttaccctgattggttattgtcggggtttcaacaagctgtagatgactaccatttacaagacttagagtcaattggctacctatttatgtgggaaaggagtagagggactcccgattggatagaagtttggctcgatcgtgcgcttgtatctgatgctttgcttgatttatttccaaatggtaagttacttaatctttaacctttctaattctgttcattaccccatcctttaagtgcctaagaatgaggtggctatctctagtaagaagcagtttagatttgaaaatgcttggttaagagaacctttatgtttctaaattattaaagatagctgggatctttgtaagggcaaggggattcaggagaaattctgtattgtggggaggtgttaggagagtggggtaaggattatagtggtaattgcaatgcttgaattcaaaattgtaaggctgagatcaaaaaatggaagtatggtcgagatgctcattctgttcaaaattttaaaaatgcaaaaaagaatatttttgaggtgtttactcggagagaggttttttagagacagtgatccaaacaattatggttataagtgggggatagcaattatgacagtcagtagtcccgtgatccgtaaggggaaatactgggtaagctgtgtaatcccacaccgcctggggaaggtcaactgggatgattctgagactgtgtag

SEQ ID NO: 26626 - DNA, 1081 bp, Cannabis sativa
taacaagcgtaaaaatgctccaaatacgattaaaactcaattaaaaatatactaaacttaatctaaaattaatactaaaaataacctaacattcaattgaattgaatgttgcctataatttataatataagattctcttgagctagcacttaacatattgcacatttcgaaactagctgaagttagattataaggtgtttgtagctaagctataaaaataaaattaaaaattattataattcttctagtattaaataatatattagttatactgtttgattacacagtgaggtaaatacgttattattttgaattacacatattcaataaagaccaattaacaaggcatcctaaatgaactcactgcacaattttggttaaaaacacttcatagagacaatcaagagttctctagagccttcaggatgcatgctctctgttttccctccagtacccaaactgggtttttggtccacccaaatcggtattgtggtggtatctggttcctcttttggggttctaatcctcatcatttcttttttcacttcattaattacagcattaatggtcctgacaattattatctccaaaatctttcttcagaccaaatttttcttagcattcattatcttctggcctctcgtttcactcttaggttgcatttgcatttattatcttccattttcttctaccaagtctctaactattaaatcatcagatatctcttaaacccattttccttcatcaaggtggcggcgaagagaatcgaaagacttgatgatgcttgggagaatggaataatcatgatgtctacccaggttagaggccaagctatgaccagaggcaagccaagaggtacccttaatagcctattttattccttatataaagatagatttaggttattttggttttcaccatatttcttctgctttttccctctctctgtaatcgttctgggttttaattttatgatggatgctcttaaccctttcccttctcaatctttgacccttacccctgatgaaaacactgtttatacccttgctgatgtccttgatgagtccactgataatatcaa

SEQ ID NO: 26627 - DNA, 2198 bp, Cannabis sativa
tggtgaacgagctttgttacatgtaggttgggaattaggatacggaaaagaaggaaacttttcgttccctaatgttccgcctatggccgacatcatttatgaagttgaacttgttgggtttgatgaggccaaagatgtaagttgcttccaaataaaatatgaagtttcaattactcgggtttttcaatttatattggccatataacttatagttaacttattctttattaataggggaaacctcgtagcgacatgactgtcgaggaaaggattggaacagcggatagaagaaagatggacggaaatgctttgtttaaggagggaaaactggaggaggctatgcaacagtatgcaatggtactcacttattttcattttattgatactaactttccttatgttctgtattgatgggtccattgttttcgggattgtcaggccataacgtacatgggcgatgatttcatgttccaattgttcgggaagtatcgagacatggccttatctgttaagaatccatgtcacctcaacatgtctgcatgtttaataaagctccagcgtttcgaagaagccattggacaatgcagcattgtgagtattccgctaaattatgcccgctacaatctcattattgtatataaagggactttttgtcgaacaagcaactcaggtgtaattaaaaaataagttcaagaaagaatcatgaaaattagagcgatatcgagaggacttaatgaaattaggaaacacaaactcatttaactaactaaaaacttaatcttttgctagcggtttttgacggatatgaatatgacttgacgaaactagaatcaattatgaaatcgtcttttgggcaggttttgtctgaagatgaaaacaatgtcaaggcactttttagaagaggaaaggccagggccgagcttgggcaaattgatgcagctcgtgaagattttctaaaggcacgaaaatatgctcccgaagacaaagcaattacaagggagttgcgattgttggcggagcatgacaaggctgtttatcagaagcagaaggagatatacaagggactctttggaccaccgccacaaccgaaaccaaagccaacaaattggctgatattgttctggcaatggttgttgtcattattccacggcctatttagacaccaaaggcagaagagtgactgactagtccaacttagaagagacaatttgtgagaattagataacatgacaaatgtttggaaaagaagtaaatttaagttgatggaactcatcaattgctttgtgatgtttgaatgcatcaagaaattccatcactatctgcatcttcttcttttttttaacatttttctatataatcaagtaaacattcagcttagtttgtggcttgatttggttaaccttcattatatcttgtgagttatgtattttacaatagagaaatgctaaaggttccaatggtgtgtagcagtttttaatgtgttatattattattggtgtaattgagtatcgttgtgataatttattataaaatattactaattaaacacaatgcacaaccctgatgtataatagatatgcaaataattcattaaaaatatatacatatatgtggtttacttaataaaaaaatgtacagtagtgtgtcaaaaagttatacaaatttaacacaaaaatgcattattttaagatttatatttatgttatttttattattttattagtatatttagctatattgttaaattacaaaagtatttatatatttttataattttaataaaaattttaattaaacattaaattttgtatcaagttttataattgtgtattcgggtacaatattaaaaattaatacatatatatcacaaagttattttctgtgataaatattatacaatttttatatttcatattgaagataatccaacaactattctgacataaatagatgaccccttcaaacaataaataaataaattaaatggtagctctaaactataataattttattaacacaattaaattcagccctaaaacaattttaaattctactcttactatttcaaaatattatacataaaaaaaaaaaaaattatactataaatacttaaatttaactcctagttgtacataaatatttaatttataactctgaaacttctgcaggtatctgacttgtaacgtccctgcttcaag

SEQ ID NO: 26628 - DNA, 1956 bp, Cannabis sativa
  modified_base (713)..(741): a, c, t, g, unknown or other
attattagaagcttgagtgtaactcactcttaaagattagacaaagatattatgaatttaaagctttagcaatcatcactattagtagtagtaggtttcaactacacttctttaaatcataatgtgatcttttattatgtacacacaagcaattacttaataattttgtgttatctgcatttatataggcaacacttcaaaaataggagtcaccctaaattgtctaacacgattttttaactaagtgatctgaattcaaaaaaaggatgcttttaagaaaatatcataattagacatcactaattagtgcaacatcttctcaaactaaattaactcattgtttaatttaagagcttaagggtccaaaagtaaaagttaaattatttttttattaggatattatactttagaagtgtttttaaaattataatttttttaatagaaataatatttttcttacatttgaataaagaaaaaataagaaatttataattaaaaatggagaaaatggacattttcaaaattttattataacttaaaaaaaattgttaattttatcaagctttttgataaaaacaaaaacaaaaacaaaaaatctaatatattattggggttttttcatttttacacttcaaaacaatttttttttacatttttatgaaattctacatagaaatccctgttgaacaatttttttttaattattattattnnnnnnnnnnnnnnnnnnnnnnnnnnnnntattattattattataaataaaaaaataagaatgggtcagtcaaagaggagagtaaattaaggagatattttctccacctccaccacttttacgttaagtggattttttttaaaaaaataattgatttcagaccattgtttccatgcacacaactttggctgcagagtaaaccaaccttgcatcctctgcatttagaaaaaaaaaaaaagataagttgtataagcataagcaaagtttatagaaaaaccaatgttgattacaggttgttatcttgtttctaggtgtttttcgaaataaacacacacccagccttattaatatgagggtaaatagcggtataagtattaaagttttaaatttataagtggcataaaccaataattattttagtaacaaaagtactaatgtttgtaaaactgtaatttttatccaattttattagtacagacttcattataaagcccacattttaaatcatcataaatttgaatggaaacatgtagtatcaattatttctaaatatttttttaataaattcaaaggaaaaaaagattacagttttcactgacattgagtacttatgctattaaaaaaatcattaagtttatgctgcttatatactcaaaactttaagtacttatgccgcaatcaaaccttaatatgaaatataaaaagaacataattcagtcattcatagagatattcaaatatcctatttcaattaagctatgagcaaaaggcattttttttttgacgcggtgatcaaaatcacacaagattatcaaagcagcaatccacaatcgacaacagcatctcctcgaaccaggatagctcattgtctaaccgaagggcatgctttgccaaaccatgcgctacagaattctcatcccaagccacatgggacaaaactgcccccagaaatttaaacaataaagctataacgccttcaaacagcaccacatcacattgaaaaaataccttcccattattaactagttgtctttagagtagcaaagcgaaactgaaaaattgcaacaccaaaacaaaaagtacacttatattagaatgacaatcttcaaaataaaataatatataaatttaaaaattaacacacgctttataactctagctatcagcaaattctaaaaaactaaaaaatcaacaaaatttcgaagaataactagccaaaggtattaccctttggctagtaacaa

SEQ ID NO: 26629 - DNA, 1831 bp, Cannabis sativa
gctttaatgaatgaaccaaaaacataataaacacaaacataatccgaatcaaaatcacacacactatttagtagtgcttagtaaaccatactagtaatattatattaaatgttacatagatttatacattactaactcatttcatttatatgttatgaacctaattctcttgtaatcttacaagatcatacatacactccaatatgagtaaataattttttgatattgattaattataacaagtaattaacatattcttatataatatatttatgtttcatatatttataaatatattatccttaatttacttttttttaaggcataaaccctaacatatggagacctagagaagcatgagcctcaaaaagggaataaagttgcaagaccccatcttgccaagggtaacatcttaccaggttcatgtggtgagcctcgtctcaccatagcacattctcttctttacttatcctctcctcttctcaccctctcttctcttctccttttcactttatctattttcttatctttttgctctctctttgtcaattttatggtactaaatcaggtacacaacggaagaattatttttcattatcattataccatatgcccaagatcgctatatgtatatttattaaactaaaagtaaaaatgtaaaaataatatttacctcttgatgcctatcaatgtatccttgaatctttttgtatgtttcatcctttcaggttaattagaaattgacacagtagtcttccaaatcgctccaccacacacaagaagtaatgtgggctactaagacaaagtgtatatgaagttcttgttttaatctcaacacataagcaagaaaaattcttttgtgataaatagaaaagcttttatgataaaaacctttttaggttgggcgtgtgatgctctctccttattctcatggcgaagaggaagaagacagaatcaaagcatgtaagaatagtttctactaatgagaatgattcgtgcgacctcgcttcgatccaagaggatgaatctatggttcaggtagaggtttttctcgatccttgcagtgagctggaaattgatctgaaagaagtcgatgttcttcgtgtgcctagtgctactaaattgaccccaaagtctgcgagttgggtggaggaggtggagaaaatagattttcaagattcagctaaggatgcttggagtaaattcaatgtgaattaggtaagaaccctttcttcacggttagattttactaaaccattggagatcaagttgttgctaaattagatttagaggaagttgaaattgaggcttcttactggaaatcatcgattgtttgtatagttttgggagcaaatcccctattcagagtgttcaaagggtttattaatagaatttaggggaatttaggagtggaaaagattgtgaggatgcattctagttttacttttgtaagctttagaaaagaagttactagagatgtaatccttgaaactatagtgatctactttgataagaaaccagtggttctaagaccatggacaactaatatggatacgatgcaaatggtgaagtctgtccctgtttaggttaggcttaatggattaaggctcaaatattgggggaagaataatttgagtgctttagtgagcactataaaaaacctatcatggtggacaaagtcactctagaaaggccaatgatcaaatatgctagagttttggttgatgttgaagttcaaataatcctccaaagtttattacctacattaacgagaggaaacaactcgttgagcagtaggctgaatacgagtggcttccatccaagtgttcag

SEQ ID NO: 26630 - DNA, 2287 bp, Cannabis sativa
atttcgttatgaaaatgggtaccgagaccctaaatctaacttcattagcaactttgtgtcccaaaacaactaactacattacaatgatagtgtcaccagtgtgtttgtacattagtagtgattttattatgaaaaggggtaccaagaccctaaatctaacttgattagcaactttatgtcctggaaccactaactacctacaatgatagtgtcactagtgtgtttgtacattagcaccactaatgagaagactaatttgatagtaaatattgatttcactatgaaaaggggtaccgagaccctaaatctaacatgattagcgactttgtatcccagaaccattaactacctacaatgataatgtcactagtgtgtttgtacttcaacaccattaatgagaagactacttcgatagtgattagtaatttcattattaaaattgttgttggaccctaaatcttacttgattagctactttgtatcctggaaccactaactacaatacaatgatagtgtcactattgagttagtacattggcaccactaaagataagactaactcgataacgatagtgatttcattatgaaaaggggtaccgagaccctaaatcaaacttgattagtgactttgtctcaagaccacaaactacactacaatgatagtgtcactagtgtgtttgtacattggcaccattaacgagaagactaattcaatactgattagtgattttgttatgaaaagggttaccaagttcctaatcgaacttgattagcgactttgtgttccaaaaccactaactagactacaatgatagtgtcactggtgtgtttctacattagcagaactaacgagaagactaattccgtagcgattagtaatttcattatgaaaagtggtaccgagaccctaaatcttacttcattaatgactttatatcctagaacccctaactacctacaatgatagtgtcactagtctgtttgtacattgtcacaactaacgagaagactaattcgatagtgattagtaatttcattatgaaaaggggtgttgagactttaaatctaacttgattagtaactttgtttccttgaaccactaactacctacaatgatagtgtcactagtgtgtttgtacatcgacaccactaaatgagaagactaattcaaaatcgattagtgatttcgttatgaaaataggtaccgagatcccaaaaacttgattagcgactttgtgtcccataaccaccaaccacactacaatgatagtgtcactagtgtgtttgtacattggcaccactaaagagaagaataatttgacagcgattagtgatttcattatgaaaaggggtaccaagaccctaaatcttacttgattagtggctttgtgtcccggaatcactaactgcctacattgatagtgtcactagtgtgtttgtacattggcacaactaacgagaagactaattcgatattgattagtgatatcattatgaaaagaggtactgagaccctaaatctaacttgattagtgattttgtgtcctgaaaccactaactacactacaatgattgtgtaactagtgtgtttgtacgtcgacaccaccaacgagaagactaaatcttgagcgataagtgattttattatgaaagtgggtaccgagaccctaaatctaacctgataagcgactttgtgtctcagaaccactaactacactataatttcataaaattaattgcagaacatttattattacctaatatgtagcaataacatatgtatatgcaaatgatatccattaacatattgctccttttcaactactatttatttatttggacatccttgtttattttttgtactttcaacttttaaaatgatatcatactaaaatattattttaatataaaaggactacttctgattgacaatatcaactttccaagctagccatgagccatgccctattaaatatatgtagggattataatagttgtataggtttataggtatagggtataaaagactttgaaaggtatattttttgggcaccaagagttactcactgaaatttcaatttacaaacgttttcaaaaaaaatcatttccccccattaattcatgtccacaagactatatgtatagagaccccacttttcttcttccgaaattaataccatacactatctccaccatttttaggacaactcaaaaatgtttttgaagcctcacaaattttagtaggttaaaaaataagacatggtggctagtggtggagaagactcat

SEQ ID NO: 26631 - DNA, 1262 bp, Cannabis sativa
atctgttcgtattagaaattatcttaaaattgattatattataaaataaaattgttaaaaattgagctcaaagtcttatttttaaaaataaaattattaaaaataaaactcaaggtcttacttttaaattgttaaaagaaagaccccgagcttaatttttactatttaacaaaacaaaaaattaattttatcatttaataaaataaaaaattcaattaataacttttacaaaatacagctatttataatcctactatatattacatacacatatgtgcatacatagtaatggtacgtaggatttgaaaccattcgatttggataagagaaatgctctaacacatatttaaaaatgatatttaatccaatttaatcacaataaaatatttaatatttagggctggattataaatggattgaatactcctacttgtaatctatcaatctcaagcctaaacagacagaatgaaatagaagtgagaaagagaagaagggtcatatatatatacataaatatataatatatatatatatatatatatatattatggcacgtgaagtgtttgatatagtcaatatagaagttggattttgctatatagttacgtacacatatataaacaaggcccccacccaaattaagttcaaattaaccacgtacagagaccacacgaattgaactctaagtactcttccataaatatttattatttatacaatatttggaaacaaaattttctatcctaaaattagtgtgccctctatttatacttatttaatatataaaaaattcgttaataaactctaaactaaattaatagagcattgctattagacactaatggtccagtggtgtctagcatcttctcgacatgtcctgttgcgattggctagcgatactctctaaaaactattatattcaattatatgagacccaatataagagagtgctaggcaccactagtgtcctttagtatttctcaaattaatatatagatgatgtatttaaaataaatagtgggagaaacaacataccaatttaataacaacaaaatttttcagaaaaataaacttaattagagattttatcacaaaataaaaattaaacatataaaaaaaatttgccacaattatatatacatatatatactagatcgatgttacattaatttttagttttttttaatatcataattttaaaattaataatatttaatgtagtgataatcattgaaatttaaaagcataatagtgatttaaat

SEQ ID NO: 26632 - DNA, 3030 bp, Cannabis sativa
  modified_base (2258)..(2275): a, c, t, g, unknown or other
aaaaaattaatttaatttttttatggtcgactactttgtagttattttagacatcttataaaattttaagaaatttaaaaaaatttaatacatcgaaaataaggttcaaacagtttatttcacatgcgtataaaataaaaaagtctcatgtgcaacaaactgtttgaattctatttttgacgtgttaaatattttcaaatctctcaaaatcttttaggatgttttaaataactacaacgtatacgtccatgaaaaaaattagactaaaaaattcactctgatgccaaaataaataagagtgcatcagtaaatctattttaagaggtgcattagaaatatccaatagcattgggtgctacactcaataaaatagatttacgaatgcacatcttcgtattttcttatattcgaatagttataattttattttaaataaaataaattcttcattaaattgcaacaatcaagaaaacaagtcacaaacaactcaaatacaatctcataaatctacccaccaaaccatagcatagtttaaatatagaactaatttgcaagactatgggctacaaaattattagttcgtttacaatgactaaacttaatgacacaaacattattacaaagtgatcgaatgtcatttaacaaaatatcaaattcaacaagaagtgattcctccttcgagagcgctatgcaaagtcgttgacattctaattctacctccacctccataaagcccagccaagaaaagagcaaaagtccataaaagaccgccatggcctcaactatgggaggcgacaatgacccccactccagagttacaactgaagccaaaaagaaaccaaaatgatctcgtaccactgccccgtaaccaagcctccgtccagtaacattaagatttgtgttgacattcagtttcagtcgacccactgacgtcaagacccactgagataagattggggaagcataacagaaccaatcttcccaatagtgtcaggtgatcgattctctttaacattcacagtagagaatcccattaccaaacatgccaaaggagcaccaacaacaagctcatctcctctctgttgagtagtgactcttgttcttgaagaaaagaatacaagttcgttctcggcaaagaagcaaaagtaagaacaaatcttacattagatgtgattgacttgaggctagagcaatcccaaagtgcatggaacgatgttttattatccactccacaaataggacacaataacttagtcaaaatgccatgatgagccaaaatggaatccaatccaaacaagctttccaaatgaagacattaatcttgggaggagcgttaaggctccaattagatagttccaccaagaagaaaaatcttaagaaacaaatggaccctttcttaataagtgaatagcattccagtacccactcttagcgaaaaactcacctaaagtattataatgccaaatgagttggtcaatttactgtaaaaacccaagaatagcaagaacttgaagagcttcatcaaaataaaataaatcatcaaccaaggaaaattccagtcaccattttccaattttaaatctcaaaccattgtaacagaaggaggaccatggaaagaataggcaagcaaagttgacttttttggaatccacatatgagatctaatattgacagttcgcccactcttaataagccagcacaccccatccaaaaacaactcgcgcccccacaaaatactttacaaatggagaattctttaaatgtttcaaaaacattaagaaagtctcaattagaaactcacacacttttcataactttgacagctaaagaattgggaaagttgtataatcttcaagcttgttttgcgaaaagagctttattttatacaaaaagatcacaaaaacatactgccattagattgtgccaacaaaatattttccaagtacaccagtgcattttcggttggattttatgccctaaatacaatttaatattatttaaatcaataaaactcataaatcatattttgactttatcaatcacatagttcacatgtttattacatggttatatattcaacatatagattctattaaatctcgaacatatagtgacatcatcatagtggaaaataattgtgattatatgcttcaaacttatttaaacttgagatttattagtgcactagatttatactgacgtgataatcagtaatatgtacgtgatctacttactgttggaatatattttaccaagannnnnnnnnnnnnnnnnntatgtttattaacatcctaaacataaattctctaaaatagtagaatttaaacacatataaagttaagaaaccttacattgattgcagcagaataatatgtttcctcccactcagatctctaacccttgtcatttctgtcgcaaagtattatcaagatctgagctcgattctctttcaagtgttggattcttcatagtcttacacactataatttagtacttgacttgctatgggtggacatgcactctttcactataggttcgaattatgaagagggagagagaggattttgaataggagaaggaatggaggctcaaaaactctagttatctgacagaatgtaaactaggttataagagttggatgagaatgagaccatcctatttcttttatactatttcacctagggttaggatttaaattatatggaataaaaaatgataaaataatagcaaattaaacactaagtggtcgaccgtatagatgggcccccactagttataattttacaatttttttaactatttatcttttatttccctaatgccatattttttaattttaatcctataaatgccaaaactatttatttaataattataattaattatgaaataaaattatcatttatcttatttatttaaaaaaaactttacaaagtttttaataacaaataaaccctaaaacattttttcttcacaattaaatcattgcttagtgaaaattcataaataagacatggtctaattttagaa

SEQ ID NO: 26633 - DNA, 1953 bp, Cannabis sativa
ttattacctattaatacgtacaaatgatcagcgagacaagctggtcacaaaaaatcacttggtgtggttaaagaatcgtacaaaattaaagaagataataagtgtgtgtgtttacttttctttctttttatttttaattaataaaaacatatcactacaaattccttactttttccttaatttcatgtttaaaacacaagaattgaagcaaaagagaaccacgcacactaaaaccaagcatgccataattttaatttagttgtccagcactctacaagtcgagtccggacaacaaattccaacagttcaatattcaaccacaaaaatttaatgattgttgtcaagataaccaacagtttgccattaggcatagagcaatgcaagcatttaagattctcacgcttaagcccaccataaacaattatcatcttgacgaataaaccaatcagtttagcagttgccaggggattgcagtgacgaaagcaatcttaccaggatcgggtaatgtcattttatctcagttatatcctttaaagaaggattgtaattttatgtccggttcattcttgatcttctattgtcatctctttcactttctttgtgtaaccttggctccaactgatccttattatgcggcctacttaatctcttttcatcccgcctatctctcgttgcttctatgtcatcataatcatgccttctggatctttctccttccctcttaccctgataacttctcatcttcacttgagcatcatcagcattgtgccttctcattctcctttcctccccaacatcctgctcctctcttgatcttggctcaaaatcgtaatcactatcccttcttgatcttttttcttctcttctatcgaaattgtttcgtgtctttggcacatcatcaccatgccctctaggccttctttcctccttcctatcatggcctcttgacctgagcaaaacttcttcgtcatcatgctttcctgatctcttcttctctcgcttatcattatcttcgcttgaatttggttcataatcattaccattaggccttcttgaacttctttctctgctatcacggtcttttgttcttagatcatgatcatcacattgacttcccagtctcttctctctcctgttgctttgtttaaaatccctttctatggtttccttggcctgttctctaaagcctgagcttttattgccttcttgaactgtatgctctgcaccgcgactaaatggattgttgccggatcttctctcatccgtttttggaccatcaaacctgtcatggccccaccttgactctttgtccttatcgccccaacctgtgtttgcagctctctaaacacaagcccaaaagaaatatataagtaccaaagtacagtacaataaaagtattaatgaatgcaatcacaaacaacagtagatacccaaaactcccagcaccctatcttaaatgttaaaaatgaatcaaggaaatttgctataaaaaaaaaaaaaaaaaacccagacagaatagttaagagttaggcaagaataatagaaaagggaagaaaacccagacggtacaacagatatacataagaagaggagatccaattcatttgggaactatgatccctctcaaaaaagaaaaagaagaagatctgaacagagtccatatacacaaataaaagcagactttctcttaagtttcacaatgctacctaagaacaaattcatacagctccaaaatttcccagatagtaactatctagaacaagttaaagtttttgcaaaatgttctaaatataaccaagaatataatgctacccttagaacaaattcacacacattctaaattttacgtgcaataactgcttggaacaagttcatataataacaaggacattttgcaaaaagttctaaatgtaggcaaaaatattcactataacaggtgacatgacatccaat

SEQ ID NO: 26634 - DNA, 1438 bp, Cannabis sativa
tacgagaaataatttggtccaagtcaaagtttagaagcataatttgtttgatgttaaagttgggtgatacaatttaatacttagataattataatatttgtaaaattaaataaaattaaaaaattcttaaatccaattaattaagtaagaattttaatctgcaacttaggggcataatttcgtaatagagaaaaaaaaaaagaaaaaggaagtctagttcccgcgctacatcacactagaatcagtagcctttgaccgccttgcgtaatagttaattaatacggtattagaagttgccacgtcaccacccaagccgagttttacaaaacgcaccgtcgtttgtagtcttcttcaacctctcctccatatccctagggtattataagtctcgtttatggcatgccctctttccttaaacctttaccgtcatcccaagtaagagaaaaatggctttctggggtaagttgtgtcatcttttttgggtcttattttctcttgattttggtcgcgtattggttgctgattatagactttcaatatgcatttctcaaaaaaattccgatcatttttttttctcttggtaaccaagaagcgcttgcatgttgttttgaatattttcaggaactgaagtaaaacccggaaagcctttcactcataatgttgatgatacgagaagtcggctccatgtttcgatggtaactctcttctcttaaagttcttttctttttcccctctctgtacaatgtttttctagatacatagggctcatggtttggaactgttgatgatactgaaatacaatttgaggttgtttatttccttttttttagtcagttctggtttcttgatgtatttctaggcgtcgcttgggatggggaaagcgacaacgaaaagtgttcttcagtgtaatgtaggaaacaagagccctgtttttctgtgctctttgtatcctgagaagactgagtcattgcaactgaatttggaatttgaagaggttgatgaagttatcttctctgttattggccctcggagcattcatctctctggctactacttaggtagtagtggtcgaagtcgtggtataagtgaagaatcgtatcctttttcttagttaatacttaggaatggtggattgatttaatattagccctctttctctctccctcttatttatatgtatttattctttttgtattattccttaactcgggtacaagggaatcatacggtgaagatatagctgacacagacacccagggatcagataatagtgaagaagaagaagattttgaagatagcttcattaatgatgaggacccagaagtttacccaccctctcccgtttctaatgatggagatggaggtaccactgttcttctaaaccatgcataatggttttttccccctttgaatctatcacttcaaatttatcagtata

SEQ ID NO: 26635 - DNA, 1694 bp, Cannabis sativa
gcctatggcgtcgattattagctaggaatcgatgccatatatacccctatggcgtcgcttccaagctaataatcggcgccacagaggtatatatggcgtcggttatttataaccctacaacgtcgcttgatcagcgtcggtagtaaatttcaccaaaatcgactctaaaaggactaaaaaaccgaatctaaaagaggttttgtagtagtgaatgttaatgataataataaaaatatttataaaaatctatttatggtaagtttactcattaatgtacttgatataatttaattatcaatttgtatgattttatgtaaatatgttttgaaatgtatacattttcaaatttttttgtaataaagttatttttattgtccactaataaaaaaaagcccttaataaattacatgtagcctatactaatttgatcttattttatttatgaatatatttggttttcttatgacacattaagtgagattaatttcaaacttaaatgtaattataattacaatttagtttttacaattaattactaaataattttttttatatgattacttacaaataattcaattcgaaaaatattttttttactaatgacataatagcatgttgacaacttaagtttattaaaaatatagctaccataattatatttttaatgtaattatttagtagtcacctaacttaaaaataagaaaagtagtaattaaaagaattcattaaatgacaatataacacaaagtttgtggtacgtttagaaagttattatgtaaatggatttgagtgtaattcaagttaagtattcacattagcatgtttttttgaatatataattacacgatgaagtaattgatcagtagtccaagtaacactctcaattctcatgccccgtgggaattaagagtaattatcaaataaatgatatgcattgcaagtgaatatagatcaaataagtagtcgaaaaaaattgacactataaaaaatagctacttttagtgacatttttaattacaatataaattttttttaactaaatgtgactttttagttacaataaaaatttacttgtaattaaaacaataatctaaataattttctattgaaatataatatcaaaattataaacatataaatttataaattttaaaagtgttaaaagtgtgtttatgtatagtttaaaaaaaaataataaaatgtgtatgtgtgatatcataataataatgctttaagtttattttaacaatgattttgaagtttttaataataaaaatgtttataaaaacagaaaataaataattttgtgaaattaaataaataaatattaaacaattttaatatttataaacaaaatgattttttattaagaaataaatatttattatttattttattttgaataaatataatttaattaattttttatagaaatataatatcaaaattattataaacattaataatatatatataatataaattataaaagtgtgtttatttatagtcttaaaagtaccaaaaaaattaataaaattcagatgtgtatttattatgttattctaataaatgtttataattatactaatgtgttttattttatacattatttacactatcacatattctttaataaatacaaaacaaataattttataaactaaatgaaaaattaaaataatttttttataaaa

SEQ ID NO: 26636 - DNA, 1623 bp, Cannabis sativa
  modified_base (1596)..(1597): a, c, t, g, unknown or other
cgccaaaaataggacttaggtattaatctgctactcggcataaaacttaggtatttttgccgcaaattactcttattattattcattctttgctttttctttaatttatatatacacacacaaaagtttaggctaaaattaaaataatgatcatcatgatcattaaaaaaatgttgtaatatatttaattgaatttgttaatcacatatacaactactaatttgagtaatcatttgtgaatattagatatattatactctcatctctaaaaaaaaacagctttagttggagactataattaaataattaataaggttgttatactagttaatggtgatattcaattttcagtacgtacgtgcatatataattccaaagtttatttataattatatatataaaaaaaatggccagttagtggctagtggtgtgtgtattagtgttagctatagctagggcattataaattataacatatatattaatcaaatcaattaattagtacaaattagtaattaggagcatgcatatgtacattaatttcaatatatatatatatatatatgatatatcttcatatacgtgttgggtttatgaacgtggacggctaccatacaatatagtgatctttatatgtataatgcacaaaatatatatatatatatatgtagtaattaaatggaaagaaacatgtattttatatacaattaattaagaattaaagatcgaacaaagatacacatataaccaaatatctgattatatttagttaattaactaataatgcatctacatatatactcattattacaaaacgatatctgattaggaagttattaataaatattaattaattacaaattatcaaaccatatacagagtatgtatcaactcactttaaccataaatatatatatacatgttattttgtctcattgtttggcttatatatatatgatgatcaatcataataatttcaaaattttcataacatatatatagagtgtccaaacccttttttcttttaggaaaaaagactaattaattaagggacgaataataatgagtaattattaagacttaattaataaatataaagaagaagaaagtgtggattagttaaatgcaaaaagtttaactacactactttaaaagctaaccaattattcagttagtagaaagcatgattagggcaagtgtcctaatcatgaatcccttataattatatatacatatatataaaaattgctagagctagagaatcaaatatggtgggtaatgattcttctatatatattcttaatttacaatataaatgttattattaagtatcaaaagcaaacgcttttattgattgaaagatttgggtgtggtacattgatcattaattaaattatttaataaatcaaattcattattaattataaagggtccttatttttatgcgccacatctcacaacataatttattataagcttatttggtattaacttatattaataggcatagaaaaattatatatattatctttatactacaaactcgatcccaataccgactctggttgtggatctagtgttaggttttatgccctnnataaaactctttacaatctgattagt

SEQ ID NO: 26637 - DNA, 1802 bp, Cannabis sativa
aagaaaggctacacatttacacaagcaaaaatagtaataataataataattaaaatcccacctcagaaatggtgcaaaagaagagaaatgagttgatttttacaaacaaatcggtggcatgaaatgtcaaaaggacaaggggttaacaaaatatgaacagggcctaaacaaaaacagttgaactcagagaaaaaggaggagtagtagaagaagcagagtacagagcccacctaagaaatatgaaggtggcaataatggtgatcagacatgagagttcttctccaatatcagttgtgtcaagtaccaagaatctaacatctggggagcacgacaaacaaacacaatgttcactgcacgaacactaaatcctcagagaaaccccacaagagcagaagcaaagactgaaaaatgaaaagaagaacaaaatacaccccattcaaaaagatgagctgtttctcatctttgacagccaccaccacacctacaactcaacgcaaaaagccaagctcttaagactgttcccactctctcattctctctttctctctctctacccctgaccctttgaatcagcaccaacgcccccaccatcaccaacaccaactttttctatatatcctcataatttccctcaaaacacaaatcccataaattaattttaattttaatttgtacccttaatattgtttttctttttaattacaaagaaaaggttctcttttggtggtagttaaagctcttacgcagaaagtaaaggcaacccagttgagaacaaagacctgtctctctctttctctctttatataatgtaaaagcacgccaatctgacaaacccaactttgctgctcccttatagaaatacagagtgagttcaaaggttatggttttaagagagagagagagagagagagagagagcttaccagttaccacccagccccctctttctaccagataacgactcatccatccccttcaactcgtacttccataataatgctttcttttcttttattaaattatccttttccactgttttatatttttttcataaattttaattaaataaattcttcttttaaaaaaaataataataaattttcttatatttatttatggtgataaaatgggcaatatatcgtggcattgaggggtgaacttggcccctctttctctctcctcttgattgaatgtgtcccatcacatcacatggcttttgctaatctgtttggacattttctcgtaaaacaaacaggttaatcacaattttaaattgataatatgaaaaggtactgaaacactttattattattttattttattttgattttttattttgaaaatttttattgaattttaaaagaataattagagtaaaagtttttaaaaaatttattttgtgtagataaatttttaattttaaaaatagtaataatagtgtctaagtttaagatttttataagtctattttaatagattgattagttgctcaaacaaaaaaaaaaatatcacgttttgacataaataaaagtcttctttacttaatttaatagcttagtttgtagtttttaaaattattacgtgctaaaattttattggtcaacatcataaaaaaaaattatttaaataataaaaaaatcattaaaaattttaataatttttttttattttattaaagattaaaaaattctatatataaaaaataaaatttttacgatttaccacccatccttcttagccgtggaagtttactactaaccggtaccattaagtagtgcaggttgtaacttttttcaaatcaag

SEQ ID NO: 26638 - DNA, 1823 bp, Cannabis sativa
  modified_base (1643)..(1645): a, c, t, g, unknown or other
atcttccgactgtacaagacaaactaaccaattcagacccaaataagctacagtataagcatagagatcaaattaaattaaaaggtgaaacctggccaggatgctcaagaagttccttgatttcaataatcttcttttgctcatcgtcaaacaaacctccatagggatctaatccctcatcgtcgttatcatcctcttccacccttccgatggactcaggtgtcgccggcgaaaccctctcctttacggcagagggtttggattccctgtcgtactgccgaggaggagaaaggcttctccgatcagcggcttccatgtttcggaacccagcagtaatattagtagtaggagctgaagaagtcgcagtcgccgtgtagagacgctcaacgataccgtctcggcgtttcttcagatcgctgccgtaatcaatggaagctacagcaattgctgtgtcgataagggtccaaacatccacgccggagctatccattatggtacgcaaatcatcgtaatccattctcgagattctgattgaccgatcaacaatggcgaacaaaaataaagggagaaaacaaaaactgagtttccaaaaagagccgtagattctcgatctacaagatgaaacgtggtgcgaaatcaatgaataagaaccgagcttgctccgtctctaacataaccaatcacaacaaactaagaaaacccaataatgctaatcagaaaataggagaaactcagatctgaaaatccggctgcaatctctaaaagtcgtcttcttcgtcgttaacgtcgtagcagtctcagtttcggcgcgaaaatattataacccctggaatttttccgggaaagttgaaactgggtcagaggattgtatgcggaaagtcaccgattatttctctaaagcaccgattcattcacgtacctcgaaatttcgatcgaaacaaacacaaccctagcaataatatctgcgaaaatagaaacaattttagttttttatcttatatatattttgggtagttttttttttgaaagaaatgtttatgaattgattttggattttgggtaagctcaatgctgagttaagatgaagcagccagccaccatgatatttttggatgctttctctctctccaggatttggttcagtgtgggttatgagagacaagaaagataaaacattatgtcataattataataataataataataataatagtaataagggattactttgaatatttcattgttggtgagaatatattatattttgtttatgtgcttagtgctttggtggcaattgaggatgagatgagaatattacagggttatcaattcttctattggtttatgtcaggggtattttggacattacaaaattacgtttgatacagaaagatattatatgcagagtattattacataacatgttattacaataaatgcaagagcactcgtgctttcaaaaaaatgcaagaccactaaacacattcttcactcaatttttaaaatatttcagtaaaattttaactttttctttttttattttataatacaattttacattataccatacctcaatatttttaaaatatatcaccaaaaatttacctttttaaaattttaatatatttatttattttaaatannnaatattaatatatacacatattctatacaaaaataattattaactcaaaagaattaataaaatatatttaaacaataaataatattctataaatatagattataaatagtaaaattaaaaaagagaatgaatttagagcaccttctataacatgtttttaatatgattctttaaaaat

SEQ ID NO: 26639 - DNA, 2696 bp, Cannabis sativa
taaaataaataaaacaaaaaacaacaaacacaagtaaagaaaaaaattatatgtagaaagaaatatttagttttgtaattatactgtgtacacttgcatagctagcaaattaattaccattgtgtgcacttacatagcaaataagtttgcaacaataaactattacatttgaatgatattaatgccttatcgcacgtcttataattatctaaaattgtcacacattattaaatttgaatgagatcgacggtaatcgagatcgtttagatattttttagtacaaaacttctcatctatttattatgtatttttttatttgaaaaaatttattattcaattttttatttgattattattattgcatgtgttattttattatgcattattatactatatgtaatataaccatcaatttatattaacaaataaaaatttaaaaatctccaccacataattataaactttaaaaattttataatataagaattgttgcatattaataaattttaaagaaatttaaattattgttttgaaaaaaaaaaatcaaattattaaattaatttaaaagcttaaattaaaaatgagtaaaataaaaaaaaatgatcatgttgttgtctcctaccgattagacgacaacttgtccctttgattgagatcaaatttggatgagatcaaggtaatcgagatcattcaatcttttttagtgtaaaatttttcatctatttattatgcatatttttctttgacaaagagcaataaacttttcatttagatattatatattaatttattgctttttaaaaaaaatctaattattaatttaaaagttaaattaaaaataaataaaataaaattaatcatttccttctattaaatttggatgagactatattcagatattttttcaaagcaaaattttcatctatttattatgtattttttttttacaaaatttattattcaattttatataatcataactttttattttattattattattgcatgtgttattttattgttcattattataatatatgtaataaagccgtcaatatatattaataaaaaatttaaagattttctaccacaataattacaaactttaaattattataatataaaaattgttctatattaataataaaaaaaaatattgaagatatttaaattattgtttagaaaaaaaaatcatgtctttacaaaagattaaacttatgacattgtagttaatgtaagaatattattatttacaccatgattatattattaattgtattgattattttagggttaaataacttgtatattttgtactcttttagctgtaattattgttaagcaaaaaataaaattaatatataaatttaaaatttaaaaataattaataattaaaattataaaaaattataagataaattagtaagaaaaattataagtttagagttaacactaaaagtattattaggtaaatctaattattaatatttaaaattaattataaataaaaaattaataattatattgtaattttcaaccgttaattttaagccatttgaataaaccaataactaaatcattatctagataaaatatacaatacttattagctccctatatataaaagttgtatgaagcataatattctttgcctttgggtcattcgcgtgaagtgaatatggatatgtgatgactgttcgtgatattctagctagaatccttgattttagttattgatttggtaataaattattatctaattagctaattaatccataagaagaatacgaagaaatattaattatgcatgtatgtggacactgtggactggaaagtgtatatataccaatacgatgacataaaaaaaatcgacaataaagatcacatttacttctcactaatatatcccgagagccttgtttgctctttccatcatttccttttatatatgctatctactacaaaatgaaattatatcataacactatatacaaattttacactatacaatgtgcaattaattttatatattattttttaaaaaaattaattaaaattttaccttcaaaactttatcatctatcaaattatactctttaaatttttaacacatgaacttagctaaaataataaagctacccctctagttaagctttaatcacacatttttttagctagaaataacacaattattttatgtataataacgaggcattataaaatagtttccctttttaacaaaataattttatgtttagtcccaataaaattttagttaaatgattattatcatttgcttgttgtcaatttctgactaagtgtattttttagttatcaaatcttatcattatgtcttcatttatataataaattggtgtggttagatatattattaatttttagtggctaataatttattattataactaagggtcatatattaaattttaaaagattatgttggaactaaaatggtaagtttattttgtaaggtggactaaaaatacattagcttaaccaatttttccgttgctgtgatatttagccatattgattttttctctttggtcacatctgacaaatttcttcaactagcgtgcgtatattattttgtagcaaatgatctcaagaagattttttgtgtcccccttctaataaaactaaattaattatcattatcattaagaatttgtata

SEQ ID NO: 26640 - DNA, 1291 bp, Cannabis sativa
agagctgttatgagaggatgcagtcagttgcattgttactctcttgattcttcatttcactctctgagtttcttttctctctggtttttctctttggtgctctgcaccagcaaacttgttcttgtttttacagttcaacactatgcactattgataccacataccaccttcttgcttgctagacattattttaaatattcttttctaaaatagttttcttattcatggcaaacacaatactgctatagctgattataatcatgagatattattctgtcttattcctactatattgttgtggtgaggtatcaagaaaccttgataaactttataactcttttggataatttttttaaaaaatatatatatatttatgtactttttgagaaaattataaatgaatatacatatcgattttgtctttatataaaaaaatcattataaaaagtagaaaaaaaggtgtaaacttataaataactgaaattaaataatgtaaatatatgtgtgtatgtttatctaagtaggactatttattgtcgcaaattgttttctcttgcataccttctgaagcctgataagacatcttcatatgccttattgtattctttttacaatcatacaagcaaactgcaaggggagttatttcaattatttcatatgcacacacatatgtagtaaagtatttcaatagttatttttggtatatgttgtttgtcactaaaatttgatcttatatgtataagctttgtcaaattatttatttatcatatctatcattgtttatctgttatttttttggtaaaaaaaaatgaatagatattatctaacttatgttgttttagttttgtcttaagaaaattaagttttttcttaagaaggaaatatatactgatatataaatatatatttatatttacatatatagaacaatctcaataatgaatggttactaaacaaatttaattataaaaattaattttaaaaaacttaaactatcaaattttaatctaataatgaataataaaagagaaatttgaatttttatacttaatttaactacttaattaaaaaaaaatatctcttttcacattaaattaacaatatgttcatgtaaaaatatataagtcaaactcaatttttacttttttttttttttgctaaaaaagtttttttaaattttttttttcaaccagtagaacaatctcaacccatatgatataaaaatgagagatttcttatattagataaaaaaaaaaaattaagcataaaaacttaatttttttttttattt

SEQ ID NO: 26641 - DNA, 5293 bp, Cannabis sativa
aatgttagagatgagaaagaagagtagatcatggacttaccaacacttttaatattcaggccagcaccattaccaacaagaactttttcattacctgcataagatgtgctagctccaagattagtagaatctggtctgagataatgtgtggcactcgaatcagggtaccagttgtcatcatgtacatcttttggggtggcatacattacatgcatcttagcaatgttagcagtggcaaggaaattagcaaaggattcagggccaatgaatgacttgtcaaaacaatagaaacattatttaaccaaatgaccaaatttgtgacataattggcagtgaggtttttgattcatttggtgaatttggccacgtctagggctagaatagccaccacgttggccagggggaccacttttatttagagtaggaccacctcgagacataagataccttgtataaccatcagtgcgagggggaccaccacggctgaatcttggtggaatagctagagttgagtacggtggacgattgtatgaattgaaaccattgaatcttgtgtgagaaagattggctttagctttcaaaatattaagattctttatgtgtttgtcaatgcgatctgattgacccattgacaaggcttctatctctgcaatagtgtagtcatctttccttgtagtaacagaggtgtcaagcacatcatagtcagctggtagtccattatattcagtatgatcttgaggcacttctacaaaatagatttttagtgtcggttcgagggatatttttttaaaaaaaaccgacaccaaagaccactccaactctttggtctcagtttataactgacacctataatgacttttagtgttggttagtagaccgacactaaaactataaccgagaccaattttttttttttaaaaaaaatataaatataaattgagtaaaagtatcaattcataaccaagactaaaagatcatttggtctcgattataaaccaacagttatcgacacattcttttaaagaaaattagaataaaaaagcaaaaagagggtataaatagaaactttatcccccttattttgaaaacccttaaagaaaaccctaactctctccctcaccctctcgtgcgcctaaaaccccaacccagcactctccctcaccctgtcatgtggcgttgaaggccaaccccaacctcagctctctccctcaccctcactggcgattgaaccaccaaccccaaaaccccttcttcttcgtgcgatgcccaaaccaaaaccttaggcgagccgacctctctctctcattcctctattcttcatgccacgtcggagctcaggtaagccactccagaaaaccacgagtcgagaaccctagagcccatctctcttcctctctgttctatctcaatgcaaccacggccaaagccacaatggtcgtgcacggtcatcgactgtccaagcgaatccaaaaaaccacgagcaagaacccagatccaatatttatttgaatattttagtgtaatttttagttcaatttttgttgattttattttataattgtttgtatttagcaactatatttttgggatttgtttgtgtattgagtttaatatatgtatttttttttattttgtactggttgtaaaattgataaattgttatgaaaaatgtatattttttttttatgtgttttaacaagtttttggaaatggaaattgttcattatacaattgttgtaatgctaaattttttatgttaatgagtttgataggtttagtaattttggaattactaaatcttatttttaacgattatttttttattcaaatactcatttagtctcagttttaaaccgacactaaaaaaaaacatttatgtatactttaagtgtcgattttaaaatgacaccaaaactcatttgtctcagtttataaaagacacttaaaatctgaatttttgtcactgtggaataggtgtcaattctatcaattgccactaacggtacaagtgctagtttaaaactgacaccaaaagtgcagtttgtagttttgaggtatctttttgtgaccaatcgtggcaagaagatcaacaatgcctttaatctcgagtagatagtcattgagagaacttgtcatcttggtgtttcaaaggtggatcttgtatattactatatttgttgcattaagagttgtatagtactcattgagagcgtgccaaatctaagcagtggtgtcagagcctatcattcgatttgtggtcttctcagacatggacaatagaagtaaagaaattaggagattgtcttgttgttcccagtctttgaattcagggttaaaagtgtgagatctttcatctgcaacactgacgtactttggtggagctctatcaggatcgacgtatttttgaagttgattgcctttattcgaggcaagaacttgatgttgacataggagataattgtattcatcgagtttaattgagatacaatgagtaaatgaaacagggtaggattttggcagtaaggcttggtgattgttctctatctctgcattgttcaatcttgatgctcaacttatagaggtatgaggaatcttcattgatgaacgaaagagaatgctctgataacttgtaaggttttgggacaaaaacagatagagaagaattgaaagaaaaagtattctatatttatttattaatgaagaggattacaaaacagtttatacatgcataaagaagataaaaaccttctaatcaatacattgaaagaacactcaacgaataagttagttagttaacagtataaactaactaactaaaaataacaaagtttgaatcactggcatataaaaatttggattgataattgttaagacagttaaaaattagttatgttagtttgcactgctgtcagctagtttgttattttctattataaagttgttctggttatgagctgtcaattggttgttgtaactaatctttcattgtcttagcattgtataaattctttctctatttttagagctaatcaatgaatcaatctctttctctgattcaatctttctcttccctctcttctctcttttctttcgttcttgatctttgttctgtttatccttttcttggttatcttttgcagtaatgtcaaggaggaatttcaacattgtatcagagcaatttccaccattaatggcgaatgtcattaccagcaactcgagcaatcaacatcaacactcaaccgatcctggagctgccaatggcagcgggaaggaatcaaatgaatcgtctactgtgttctttaatcatattctttttgagaaactcaatgaccacaactttctgctgtggaagcaacaagttatggcagctattagaggaaattgtttacggcactttattcaaggagctgctcctccacttaaatttctgtctgatgtagatcaagcctcgaacaatctgaatccagcttacgttgagtgggacgttcaagaccaattgcttgtgtcctggcttctctcatcttgtctgaaagcttgctaactcacatggtgggatgcgaatcagctggtcagatctagtgaacactggaaaaatacattacacttcaagtctcagccaagatacttgcgttcagaaccaagcttcagaacatcaagaaaggaaatcttggactgaatgagtaccttcttcgaatcaaacaacatatagatctgttagcttcggttggggaagttctatcagtacgagatcatattggagctattttcaaaggactgcctagcatatatgatacctttgtgatttttgtcaacacaaggatcgaaggctactctgtagctgagatcgaggctatgcttcttgcctctgagtcaagaattgagaagattgacactaaattggatgtcagttcttatgtcgttacaaatgaggctgatgttcatcctgaagctaattacaccagtaacaggaacttcagacaaagtcagcaagggaatcacaatcaatttcatcctcaaagagggaattacaatggaaacttcaatagaaacaatttttctcaaggtaacagtcctaacttttcttcaagtaactccttttactctaatgatcgtgcttttggaagtgtatcaagaggaggtggagctagtttttcaagaggaagattttctccatcgagtaataaacctcaatgtcaaatctgcttcagaattggtcatattgcttaggattgttactacagatttgataaatcttttagtcactctcctgcttctagctcaacagcaacaccacatactgcacaagctaatattgctgctgctaatcaaacttaagacaacaactggtaccccaattcaggagcaaccaatcactgcactccagatgctcaaaacatcatgaacagcagtgactacaatggccctgaacgcatgtatgttggtgatggcacagttcggcctatcaaacacattggtcacactttcatttcttaaaaatcttgtcattctcaacctttacttcttaaaaatctgttgcatgttcctactatcactaagaatcttgttagtgtatctaaatttgctgaagataatggtgtgtattttttagtttcattctaactgttgtcttgtgaaagatcaggtgacacatgctactcttctcatggggaaacacaagactggcctgtattcatttgaatttgaggacattcagctgcagtcatctcctcaagttcaaccctctcagtctagattcagacctcagtccaatgttaactcccttatggtgtcttctcaaccgagttcaagtgaattcatagctgccaataattgtacaagttgtagtcataattccaataattttatagtttttgatgtttggcataataggcttgaccatccatccaagaaaattgtaaagtctgtgctacaatcttgtaatatctcaatcaataaagaatccaattctgtttgtgaagcctcttgcttaggaaaaatccacaagctgccctttcctaaggcatctcaaacagtttacactgagcctttacaacttgttgtatcggacttatggggaccctcacatatagattctttcaatggatataaatattatgtccacctttgttgatgtatattccccgattcacttggatatatctgttgaaaaataaatctgaagctttgaaagtatttttaaacttcaaaaatgaagctgagttgcatcttcgcttcaagttaaaatgtcttcaaaccgactggggagggtagtataggtcatttaccagccatt

SEQ ID NO: 26642 - DNA, 3612 bp, Cannabis sativa
tgagcaattaatgctctgatcagaattaataagatgggaaagaaactcataataacccctagagcatttattacataggggaaatgggagagtaggcaaagaagagtaagcgccaaaggtcaaaccaccactataccagttagggtggacgagatcctccgattgaggaaccaaactcaaagaggacaaagagatggacgacatacctgctagaaggctccagagagaaaagcagatgtactattagttatataaggacatgttcaactatacttttctctctttttgttaaaaatgctttttttaaggagtgttttgagggcttatgtgtttttctttttaacttttataggccttttttttcttacactacaacaacatttcattgttagaaaaaaaaaaaaaaaaattatattatattacacttggaaagaatattcattcctgaatattgtataatataacaaaattttcaattttttaaaaaatatatgaaacaaattatttaatagattattgtttgttttacatacattgccaaaatggttagtaaaattgtttggctggtcgataagtttaatttttcactataaaaataaagttatagtgtggaatttctattagtacatggtcaactagtcttaattaattcattatttatgtgttatttttttattagtatatttaagttaatttttaaataaaaattaaaaatttaatatcataaattaatcaaggattgtcatataattattgatttgatacttaacggtcaggtacgtatagaaatttcgaaaacataacttaattatttttactgtcaaaaattaaatttttatcaagttggagttaaatttaagtatttatgtcgtaaattactttaaaaaataccatgtttaaataaaaatttgtattatattaattgttatgactataaacttaacacatatgtttttttattattttttattttaggtgaaggagattcgaatttaggacattctctttgtgatgagaagtgtgagcactaggctatgcttatgactacaaattttaacaaaatataaatcatattatttaattaatatacaacaaattatcagtattagcttgtattctaatatttagagagggtcttggggccaaggtccgagctatgccatatctaaggttcgggactaggtcgagtctgaggttcgaggtccaaaacggggtcgagtttggggtctgggtccaaggcggggtttgttgcaaagctggggtgtaagtctggaactggaatttgggtcgagttttagtaaagatagtataattttatacaacctattaatataagttaatactaaatataatattgtattaaatgtaaatattatacaatgcaatacaacatgatgtactaaacgagtcttatatgttttgagatagttctttatctaattttttttttctttttctataattatataatgtcataccaatcttatttaggactactagtaaatacaatacaacatgaattttgtttagaactactactaatgcattcttttatatttttcgacatttatgtagttttaatttttgttttttttatagattaatgttaaaaagcacgagtggtgccgaatattttttatgtgatatctctaaaagatgatagtcagtcactactggtgtctaataacaattatcctttttatatgataacgtacattgtaattatctaagatatcatgtaaatttttttaaaaaaattcaaaattacttaatatgctggaaaaaaaatatcaaacaatatgttacactcgtgccccttttttatacatgtgtgaaatgaatagttaaattccatttttttttattttaatttattgtaaaaatttaagactttacccaatgtataaataaaatattatattaaataattaggatatacacatgtaaaaataaaatgtgtagtgtagtgtagtggtagtgattgtttttactgacatccttccttacttgggtcaatgattcgaaacccaccacaactcttctcgaaagggattaaaggcttggccatcatgaaggctaacttagttgtgggtggtgtgatctgtctgatgaaaacgctgaagtattatcaatgatccaatcaatgcacggatatgcaccacataattctcttatagttgataatatacatagagtaatttgtggtataaatatctaagtttatttttttgcgataataatacttaaattatatttctaaaatttctgtagatacttaaccgttaaatgtctagtcattattcacgtattattttcttattgttatatttaaactatttatttaaaaaaaaaaatcaatagcctaaactaattaaaaattcctatataacaatttacttaataattaataattataaaaaattataatttaaacattattactacaaaaagttaaacttaaacatttattaataactaaaaattaaaatgaaaaatttatgagttcacacagttgagtaggcaataatagtttagtattgttgtgagttcatgtgagtgagacgatataatagaatctataataataataataatatcgtatggcgatatattgaagaagaatgtgagacgataaattgtagtacgtaggtgtttgtttttggacattttggtaaattacacttaaaacagctctgaaaccggagcagcatacatacaaacagacaaaccttaaccctttttcttagagtgagttaaaaaagctgacgtggttcttagggggccgacaatcattggtccgtgtctagcacgcgctatattaaggaagtgtggttgagaagcacggacggacggacggacggacaagtggaacacaacaacacagcattatgggccgctctgacatttaaggctttttcaagggttttattgttacatgttaaatacatcttttttaaccataaaattattaaagaataaatggtattcaaaaatggagattttttctcttctcccaaattactctaaaatatatatacacacatgatatcttttaagattcgtttggtatctcgtataagggtggtattatattaaataatgaataacactatatttagataaagcagtgtattatatcaattattacgaccaacttgtttaatacaatgtatgttgtattatttaatacataataaatggttcgtattaacttgtattataatatttacaaaagatttggggtcaacaccaatctccgacccggacccaggactcagactcggagccgagacccggacctaggacccggacccgaacctaaatcgagccccggacccagatcggaacccggacctgggactcaaacctagaccgggacctagacccggacccggacttggatccggacctggaaccggactcgagacccgagacccggactcggatcgggactcggacccagacgcagatccaggacccggacctggacccggacccgggacccggacctggacccggactcgggacccggacctggacccggacccatagttggtggtgggatctagtgtattaaaaatacattataactttacacaatcaattaataca

SEQ ID NO: 26643 - DNA, 4530 bp, Cannabis sativa
aaaataacgacctttcaaaacacggctgagtaaactatcaggattttggaaaatccgccaagcttgctttgccaataaagcttggttgaagtgtacaaaaaatctaaaccccataccaccactaccctttgatttacaaagaaacctccattttttccaatgaatttccttgttgtcagaagtagagccccaccaaaatctcgccatcatagcttcaatttccttgcaaaatttagcagataaacggaagcaactcattgcgtaagttggaatagattgcacaacagcttttaacaacacttccttgccacctatagaaaagatcttgtcattccatgcatgcataagtttccatatcttttctttgatgttactaaacaattgagatttgtcacgctcgctgtatgcaggtaagcctaaataagattcgtgacattcacatattggcatacccaagatctgttggaatgagttttgaacagactcaggtgtattaggtgagaaagacattacagatttgtctgcatttaattgttgcccagaagctcgatgataaatgtcaagtgctcttttaatagctccacaagatctatcgtttgcttgacaaaacaacaaactgtcatccgcaaataacagatgtgagatggttggagaatgacgagaaacagccagccctttcaatcgaccaatttgttcttcatatttaagtagtggatcaccttgtcgtagaccacgctgaggagtaactaaacccgtaacctcaccattgataatgaaagagaaagaattggtatgcaaacaagacatgattagtgagatccatctaatgttaaaacccatcttgctcataaccgcagcaataaagaccattcaaccctatcaaaagctttgctcatatcaagcttaagggttgcataaccattagaacctctctttctatgctttaaattatgaatcaattcaaaagcaacaagaatgttatctgtaatcaatctgttggaaaggaatgcactttgagttttcgagataactgagggaagaacctctttgaaacgggttgccaacatcttagagatgatcttataaatgacgttacaaagactgatcggtcgaaaatccttcatctcttttggcttttttatctttggaattaaagtgatcaaagttttgttgaaagcttctggactcccaccatgatttagaacattgagaacaacctttgtcacaagatcaccaactatatgccaataattttggtaaaacatagctgataaaccatccaccccaggactcttatccgatcccatggactttaatgcagcataaacttcaggaccagtaaattccagcagcaaggagtcattttgttgaggagagattgttgttggaatggtggacaacacatgagaaagtgcccaatgatcctcatcagttgctgtaaaaagcttagaaaaataatcagcaaccaaatgagctataccatccttagaagttatcacagaaccatcaacatctcgcaactctttaattttgttgtttgaacgtctagctgaagcttttgaatgaaaaaattttgtatttcgatcacccgattgtaaccattcaactcgagaacgttgatgccaatattgttcctcattggccaataattcttcaagtatacattcagcagattgcacggcttgtacatgggcagcagtagcagccggctccagatcagtaactgaagcaacagagttcaaacgagagacttctttctgagctttggaaatcttttttttcatcttgccatatttcttaatatgccagtcttgtagttgtttcgaacacctctccacacactcacgaaaaccagcagccggatctaagtgatctgcagaaaaccagcgacgagaaataatatcacagcattcttcatctttaagccagattttctcaaatcgaaaccgagatttccttctaacagctgggacttgttgttgagaaaaatttatttcagcacttagaactctatggtcagatccatagtaatccaagtgagttagaattggatgtactaaagaatctttccaaacattattgattaagcaccaatcaattctctcttttaaacctgtacctcttttcctgttctttgcccaagtaaaatcatctccgagaacatgtaaagcattcaagaaacattggtccatagttgatcgaaatgcttgcatttgattatcaggtcttaatggtccacaacttttgtgttcttgtgcgaaaatttcatttatatcaccaattaaaagccatggatcaagaggagaaacatcagcaagacgtctaattaaagcccatgtatgttttttgttgattgcttcaggaaatccataaattgcagaaagatgccaacgggggccatcatcaaacaagacataacaatcaaaatgatttgtattcatagataaaagagttacatcaacaccatccttccataataacattataccacccttcaaacccaccctagacacttctagaccattattaaaatttaaagacaatttaaaacgagaaagagcaccatcacataactttgtttccattaaaagtaacacctgaggagattgctcactaacaagcaattgtagacgacgaaatgcactcgaattccccaaacctcgtgcattccaactgaggagtttcatgatgagtagcgggattgcattgaaatcaccgctgcattgtcaatgataccatcagaatccgaagaatcatcagaaactgagagttgggaatccacttcgactgacaaagaagaagtgtctaagccttggctaccacgacatcttttaagtgtttgtctcaatgattttgattccttctgccttttaactctacaattaggattgacattttcttgatcaaccaggccttgtgcatgacagcaaccagatataattagttgagtagtggaagtggagtttggaataaatggcataggcaaaacagacgtggtcaagttattggaaatggaatcagtgggtggataagtagcaaagggtagatgaatttgtgtagttgggatatttgtagaatgaattccaatatcaggtatataaacatcaatgtgtgtagcagatgtaacaagcaaagaggaagaagctgatggagtgtgaataggatcagtagatgatgaggaaaacgtggttgttttgactgaagtagtagaaataagggaagaatttgtcaaaacaccaggggtaaaaatagtagaagcagccatattttggttatttgttgtagcatgatttgggccgtatggaggggtaactacccgagcattagagccttcaccaatcagcagaggttgtggatgggcaggcggtcgatgattaatccgtggaagagttgcagttaaagaattcctagccaatcgagtaagcaatggccacgcattcccctttgaaaaatccgagcggtaacgatcatatgatgaagatgggagaggagatccgttcagcgtaggaccataagacaattccggttcaatgccattgtcaatattttctaaaaactggggacacttctgatacaaatgaccaattacaccacattccatacaataattgggaaggcgttcataacgaaactcaagccaaaattcatcacgcacttttggcaaggaaatcattttgccccgaagtaaaggtttcgtaatatccaaacgcaccttaaatcttaaaaaaggaccccatccttcattcaaagaatcttcaaagacagtaacaaactcccctagcaaattccccaatgatttagctagtgaccttgacttactgaggaaaggaagtctgtatgcttgcacccaaaacggagtaaaaatcatagattcaggggttacattttgcaaagccattggtggataaagaacaatatgttgattttaaaaatgccaaggctctttgtccaaagccctcaaccgatcaccttcacaaccaaaacaaaggatgaaaaggcctgagaagtgctccttaatgttgaccttgaaacgaccatcccaatgatcagccatttgacgctagaaagtcgaaagccagacctttttatgcgtgatcactcgagcaaacagtgagaactcttcctggggaacttcttcacgagagccatcatcagtaatggcaaaaacaattttcattatcagataaagtcagtgtagccttcattttatgaatgaaaggatccatgaggagataatctaacagaagaggatcaagaagaagtggaggtattcaaaaatctgcagaacagaacagattggggttgaagaaaattgaaaaactgaaagaaaaccgttgaaggactgataactgccacagagcacaatattgggcagacgctctatatttatgcaatcagcataaatcctaatctttgcatcattttttttttctacttttttacttttcacaattgcctatccacatattatatatatatatataaactaaacaaaagtaaaaaacgcgtgggagtggtagattttttatt

SEQ ID NO: 26644 - DNA, 1545 bp, Cannabis sativa
aaggaattgtaaagatacccagatttttcaatttaggaggaatctttctttacaacatttcactgcagccttctgttaaagcaactatttcaaactcgtcaagcctcctcttctttgtcaaaatatcttttaagaatttcacatagttgggcatttgctctaaaccttccaccaagggaatgttgatatgtagttgctttaaaacatctaaaaacttcctgaattaacaatcttgttgttgcttcttgaacctctggggaaatggtggaggtgttttatgtaaaatatgttctgctacatgatgatgggctgatactgtagcatttggggtttttctagcagcaaaatttctagtttttcactagtttctccctcggcttggattgaagtgggctctttgctaccttttattttctccacattttcttccagaatccttccactccgtagagtgactgccttgcattgttccttgcgatccttacctggattctcggtatcacttggcaaagaacctaggggtatgttttttaagtcattagctagatgccccaattgtatatcaagatttctaagggtggctgtctggctctgaatcacaacatcattcttggccatataatccctcattaaactctccaaatagcttgattgagagctttgagtttgttgaggtcttggttattgagaaaatctcagtagaaatgattgttttccttctgtcgatgctccacttgaacttgctccttgagcccccgtgaaagatttgggtgatgcctccattctagattgaaatagtttgagtacgggttgttgttacagttgaaattctaatttcccacaaagtagaccgaagctggattcgaagggtaattctcaaaagtatgcctatcctaacaataaacacaagacatctctgcactttgaatggtagcaggtggttgtatgtttcctcccatattcatgttcttcaaaatgttggtcatttaggccatttgagccgttagagcggccaaagcatctacatcaagaacacatgctacttttcaacttgtatgagctctattagttgaccattgatagttgttgctagctatcctttccaaaatctcaggcagatagtatcacgattgagtgtgtaagtagaggtggtgaattattggagaagattagagcatcaattaaaaaattccatatggttgaatgttatttagttgaggaagttgcgtcacctactaatgaaatagggaatctcacacaagatgggcttgatttggaaaatggggttgtcacacaagatggccatgttttagatggtccatttgataatggtgggcgtgatttgagtgagaaggtcacacaagatgggcctgctatggatgatgacttagtggttagaattgaagatattggtactggtttggaagctcaatatgtagctagtttggaagatcaatctgcaactagtttggaggaaattctaccaagtttagaaggtgaaataggggttgttagtgatgaatcaataaggcctacaaatgagga

SEQ ID NO: 26645 - DNA, 2966 bp, Cannabis sativa
aattgaaatagttaagtctccaagtagtgttgagtaataaattaccacacactccaacaaatccaattacaaatccaacccaaattcccatatgaagccatgacatgtcaatccattcttcactatcttcatcaccatctgaatgatcttgaggaggatttggtgacccatctccaagacatgaattggtcaatggaggtccacacaatccatcattatgaatgtacatcgaagcattaaaagtttgtagttgagtaccggtggggattcttccgaacaatttgttatctgacaaatccaacaaagacaaagaagaaatacttgccaagcttgttggaattacaccagaaagcttgttgtgcgataaatctagagaatttagcttatttaagttcccaatcttcataggaattgtcccattcaaactattccttgataggttaagttgaaccaattcaacaaggtttgttaactcttgaggaatcttaccaatcaaattattactcgagagatcaatcactcttaataatccaagagtactactatactcgcgataagcacctctccacataatcgatgtaacaatttcatacgtgagaaatgcattctcatagaagggaacgtcataaaggggaactggtgcaaaaatattcaaaggttcctgattcttttcaactaaatctaccatagaggtgaaattctttatacatgaaggaataagtcctgctatggtattcatggagatgtcaaatattcgaagaaattgaagatgacacaaactagatggtatgactccataaaaatgatttgatcttactcgaagaaaaatcaaatttgtaagcctttccccaatccaagttggaatatttccttctaaattattatattcgacatcaagaacgtaaagttgtgtacagttctttaaagatgaaggaagatttcctgaaaaattattatgccccaaaaacaaatattgaattccatatgaggaaccaattgatcttggaatcattccagacaaattattgttatctaattttagaacagtcaattccttcatatgccaatgacaatcgggaaggcttccacttaacatattattggaaatgtcaagaagttttattgatctttgtaaggggtaacaaagaaaagtctttagatcaataaatttattatttgaaagaatcaatacgttcacgtttgatagatgaggtgggataggaccgtgaaatcgattcaaagatagatcaagaaaattcaattctagaggactactcaaaagccaattagcaggaatttcatcatgaattccattgtttgaaatgtcaaggcgtgagatatgtatctgggttctgagccaagtaggaaactgtggacctaaattgcaagacctcaagtatgccaagtctagttgaaatggtgggatccaagcactggaattgatcctcaaggttaaggagttatcggataaataaagatctttcaattcagaaagtttttcaaagtgaacttcagtgacaagcccagtaagaaggtttgagtttaggtacaagtactcgagatgatgaagcttaccaatatcttcaggtacagtaccattaaacttattgtaagaggcatccaacaatgtaagatttgaaaacattgaaagattgggaaatggtccttctaattgattagaattgatccataattcttttaaagagattgggaatgctttcaaactaggaaatgatcctcttaattggttctcctcaaaaactaaaacttctaaagaatttttagcacaaccactaagattttctaaaacatcagaaagccttgcattgaatttattgtggctcaaaactaatatttgaagattacaaagattccccaatgatttaggtatttcaccttctaatccatttccagccaaaataatgctctcaagagatctcatgtttccgaaagaatttggaagaggaccatttatttcattatctgtaaaggtgagattcactagattggtactcatatttagcaaccaaggaagtgttttgggagatatggtactctcccaaatatcaagattggtgagagagtttgaagaatttttgttggtgaagatatctattggttgaagtgtacatccacataactctaaacttgataaagattgtgctcttttaatcaagtgaaaccaatgtgtggatttcgaattcgttatgttgatgtaactcaactttaaaattctaagagaagagagatgagaaatccattcaagattagtactaatgttataagtaccatctagtttgagaacttgcaaccttgtgaggttcccaagctgagaataaggaatgaacatgataggattgtcttcaaagttgagatatgtgagtctacttaaagaaccaataaactcgggaattttaataaaattattgtgacgaaaatcaaagtacctcaaatgttgcaactcaaccaaagaaggaccaattttaccgcccaaataaagcgattttggaacatcacggtcagaatgaagatcaagactaataatatgatgatgagttgagttatcacacctgatacctctccatgcacaacaatctcgcctggtacttgtccacgaggatagacgattgccatcatcaacaaagcctttcttcaagctgagaagagcttgtctctccttctctatgcaataatggacatgatcatcagaatcacttgtactactccatacaaaactagtggttagcaccaacgtaagtactacaactttgatcatattgagaatacttttaagtggtgtgattgagatagttatcttattttgggttaatgcagatctagttaatcagattatatgtatatatgtaaataggaaacaaaaaatactactaaaaccaactcacctttttctttaattagggaaaactttgaaagtcaattaacacacaacacaatgataagttttt

SEQ ID NO: 26646 - DNA, 3446 bp, Cannabis sativa
  modified_base (528)..(537): a, c, t, g, unknown or other
catcaaatataaggcttatcaggttggtgattttatattgtttaattaggatttttgcttcctaaattttgacacgtatcaaatcatgtttcttaaatttttcaggtcgttaactattgagattgttaaatttaaagacttttattcaattttactaaagaaagtttgacgtgaatgaaaatttaagaagcacaatttttttttttttttttttgatattgaatcagaatatgtattggctcacaaaacacttgtttacaatctaatagtgcccaattagggtctaaataatcatctatatatgttcatctcaacacttacttctttcctatacaattacattattcacaaactataaaaccattgtgtatctatttctgaaattttctttggccaaaatagctcaatcctttgtgttactctcgatttgagctcttgtaacatcttaaggggcatgatttagtatatagacaatcgtcatataagtaaaattgaataaaattagacaaaagtctttaaattcaacannnnnnnnnnttcaggggaaatttttaacgacctgaaaagtttaaaaagatgatttggtacatattaaaattcaagggacaaaaatcttaattaaccttttaaatataataacattttaattaatgtaaaaaataaaataaagatttgattttgattttagtctttgtagtctaataatgtaagtaataaatgtgtttggtgcaggttccaccagctgaattagaacatttacttcactcccatcctgatattgctgatgcagctgtgataccgtaactactctgattttaattagaattttcaaattgtgatcttaaagcttattatgccaagtttagttaattttttcttctttgatgattgaatagataccctgatgaagtagcaggacaacttcccatggcctatgttgtgagaaagcctggaagtaatctcactgaggctcaagttatagattttgttgcccaaaaggcaagcttcatttttactgctttatatgtttttcaatcactactgaattagtttcactatcactacaataattaatgttactataaaaggtgcaaaaaattgcaactaagaaaatatcattataatcatgttgtgactaaacaaaatgtgattagagtgggaatagaattatagtcatgtatctaaaatagatatttacaaactttttagtaaaggtaatttagtgtataatacttttatagcaaccttcttacactaaaattgagtttgttcttattacaggttgctccttacaagaaggtgcggcgggttgcttttatcaacgcaattccaaaatctccggcgggaaagatcttgaggagggagctcgtcaatcacgctttgtctaagggttcagctaagttatgatcatctacttcgttgaagaagaagaagaaggattgcccttatcgaattgcttgagtcttaagttaatattcttcttgcaataaaatcatttttgtaacctatataggaggttttgattctttgagtacttgctattgctagctagtattttgtatgttcattgttcaaacattaaagaccttttcttggtgttaaatctcacttctttaatatttctattttctatttctctctcgttatcttttgctttatttatttacataaagagcttgttttaatatctaacttacactaattctttttcgttttagatccaacttacactaatctagttttatcaaaaacaaaataaatcatttatttcacaaatcaaaataaaataaatatatcttaaacataattttaatccaacttatttttaggtaagtaaatcttattttggacttatattttacaaaaattattaattagccctttaattttattaaattgcaattcaaatcttatattttataaaatagtacaaaataattctctaagttcaactcttttattgcattaattatatgtgatcacaaaagagttacaagtaacaaattgtaatttttcttcaagctacaatatataagttataaagtataagttaaaactatatattacacattaatttattacacacttaatatatattattcgcataataatatatttatcaaattttagcgggtatttattatataatcaattaatataataactttaaagtactccatagtaatgatatattaagtgcttgacaaataatggaaccaacaaataaataaaaaataaaaatgattactcaacatggcaccccatttaccaaaaaaaaaaaagggaaaatgacaccccacgagtcttgaccaaggagaatcgatttgcattataatataggatatattgaaagtaactccatgatggtaccaacctaaatcccatattttttaaaataaaaaataaaaaataaaaaacttatatgtataattatatagctcaataacatgttaataatttcttattatatttatcattatctagggagacacaattctccaaatttaatactcatgagaaaaaaaagtatctaacattccatttatatttaacataatatttatctaattatcataattttactacagaattaaaggttagtaactaaattactcaaattaaggaaataaaacacacagacaattctactctttttttcttcaaaggacaaatacctataaatatataactttttgtgccaataagatttgaagttgaatgtataatttatttataaaagataatgctaatcactactttgcaaacatgagtagtggtcatgcaatcccaaacacatacccatcatcatatattcatatgtcaagttatttatattctcttttgttcaattattttgtcttgattcgaactcaattacatatatattcgaagtgtaaatccaatttcagcttaaaaagacaacaagtgtttagaacactttcccaaagaagcaaaaccattttctattcctttttcctttttccttgtagatagagagagctccaataattccatgggtagaagcacagaatctgaaactccattaattattatacaagatacaagtgatgctcttaatacccagttgatcaatcactatcttcatcacttagaaacctttcttacactctttggtttctgccagaactcatttttcagcttcactttctcatgggtctccttcctcctttttggtattgcacttccactcttaataatccaagtctcttactgttccaactgtgagaactatcagatcaaaagctttgagcttcaaattctggtctctcagtctcttgtggctgccatttctcttatatgtatttctcacaattttcgaaagtatggccttcgaaaattcttgtttgtggataggtaccatggtcatgtcacccagttccgtgatgaatacatacgaaagatcaaagtaagtgtttttatttcac

SEQ ID NO: 26647 - DNA, 2814 bp, Cannabis sativa
ttatacggttataatttctaaatggtcggttataaaattttgaaaaccgaccataaccgaccgatttttacccctaaaataaaatgatagttcacaagatttaatcgtcaaaaactcaaaaaaaataaaaaagttcttaaaagaaaaagagattgagaggtcttgtcttagcttctatagatcatatatatgaatataaagaaagactagtgtaatccatgcataaaatatagttttatattccaaaaatagtgtataataaagttttggtatatgtatagtgcactcacttgcaggttttagaagtagtactagactcttttgaacatcttcttgtggtggccggcaatggtacttgtagtggtgatgccttaacaaaactattcaacaattttggtgagataattatattcaatgccataatttatttttgcctattagggtattttgatggtgtaagattgcattggcaaatctatgtatgtatatatagaaagtttatgcatttattatactttgcaatactttttgaaaattttaaccgaaattttaaaaaaatacttcaatacgatttttttttttattatttttaagttttgaactattttatttacaaaaatacttctttagtaaaaacaataaatcgttttttggttgttttacagttaatttatgggtaaatatcattttggaccctgtgttttgtaaaaattactgattggattctctgttttgttaaatgataaatggaccatgtattttctaaaatagtaaaaacaagaccttgagctcaatttttgacaatttttgaagatatttcataacacgaacagatacaaaaaatataactagttttatcatctctagattggattattattaagttttactttgacaaaaaatcagttcagagtcctatttgtaccatttaaaaaaatacagggtctattttatcatttaacaaaataaagggtctaattggtaacttttacaaaacacacgatctaaaataatatttatactttatttatagttgagttgtattatatttgtcatgagattactttttttagttgttttatagttatcgcgaggttgatttctcgttgtttattttacttttctcttagtatgtatttttgtaattttaaaattttacaagtgtatttttgtaataggttgtaaaattataaataaatgtaaaaaatagtatttttgaaaattcaccacatttctttttctttttatggaaataggatgttttatttttatgtttacttaacaaaaggataatggatatcttggaaaaaaaaaaacaaaaaattatggataacaaaacatttattaactactttttcacaagatgtaataaagttcttttaatagtgagagatatagaacttattctaacattctgaaaattgagctacctcaatttgtggcccaaaatgtttcaactttttttttgtacaatagaaataatgaatttcaacaaaaaatttacccgagataatagtatgaaaagataaaattgcgatataacttataagttctcaaaaaatttactttaatgtaaataaattcttaactttaaaaattacggtaataatttccaagttcaaaattcttgtaaattcgttgattatcatggtcatattacaaattcttgtaaataatcacattgaatttgtactgtgcgactataatataatggtcacgttacaaatttattgttgcaaaataagtataatggttgcataatttaataatgtaaatttatgatgttttgcgaccaaatatggtttctttactaataaaaacttttaaaaagttatgttgttaataaaattttaataatgactatgtacaaaacacactatttgaatttgaaacattttagaaatttttatcataaattcgcctcaattttttgtatcttttgtgaaaaaaaaatttaaataaaattttcatacaagtgatgtagttaacataaatttattattataactcaaaatattttagtcctaattttttttaacttagactccattacaatctttgaaaacattacatttaaaataaaatttctaaaaatgtagatttaaaacaagataatggggcgaagtacataatcttaaattgtatagcctctgtattttttactcaaataaaagctttatataaataatttaaaatttaaaaaaaatgatatcattagaataaaaatgtattagtaacataatatttaattttcatgttactaaaaattgaattaattaaaataataagttaattaatgcataagtgatataagggtaaatcttttgcattattaaatatctcatgtacttgtttgttcaccaaacttagtaattctccaccaaacttagtaaatgttgaccaccaaactcactgaggtttgtctgtagtacacttttaaaggattgtttcggtagatttttaatgtgttttaccatttaaaagagttttttaagctattttatttttcatgatcgcgtgtattgcagttatataggatcactcgtaagtttttcatataaaaaaattgaatagtttacagttcaaaaaataagttaaatattttattgcacaagaaactattttttcatatacatgtggtaagaaactgtttaaactttatttttgacactgtaaactatttaaaaaaatttaaagatttacaaataatcctaaatagctacaacatatgcaatccccatattaaaattgcaaatagtaaatgaattatgttgtataaaatgttttaacctttttatttactatcttatcatt

SEQ ID NO: 26648 - DNA, 1710 bp, Cannabis sativa
aacaaaggctgccaattatttagcaagagctgcttgtttacaccgaaattgtagttattgcggggggcttatccctattgatttgcaagctatttcttatagctgatttgcagttataaaataattgttttcaaaaagaaaactgtgattattttaattttattttttataaatattaaaataaaaaatgatgatatgacaacatatttataactagtgttgttatatgtgtcttaagtttataacatgtggtaacacttataaaaatattgttttatacctaaatttttagcaatattttaggaggcaatacttatataaaaatgttactttctaattttattaagttaaaaaaaaaaaaaaagtgttaccaaatatattttttctaatagtatattcaaatatatactaatatagatttattctcaaacttctctaccatcttaataataataataatcactttctttttctttaattgctatcgagtactatgagattattttctttctctatttataggacaaaattatcacgtataattaaccaagcccgttagtatacaatactattatttggcaatatatatgcacctattaaaattcagtattcttatttgatattttaagatgtatatagtaaaatatcgacgagtcgccttataattagtaaatagcttctcatattatttattaaattaattatagtgtggaatctgatattaaaatacacaacagtatgatctcctatgatattggcaatttaaaatgtctcttacggtttcaagcattatttaaagtaacatatcgttattggtatactaatcaatatcgagtctcatactatttattttaataaatagtataaaaaatcgctaattaatcccaacttccgacaacattaaacatgcaaggtacttaaaagtaatactcttaaaattaatagctttgcttggactggaccacgtgaatttgtccttgaagatattattaactattattattattatttttataattataataatttacaaataatattaattttaaaagaagagatacttgcaccacgtgaatttgccattcattattttaacattatattatattttaatttttccaactatatattgttgatgcctccatcgaccaaatctcaaataaaacttaatttatattaccctttcgatcgacaggtactcttggaatattttatggaaatacatatagagtagtctagattacagacataacttttttcaatataaatttatatattataattatttagatcacctattaatttttacaaaattttaaataatttatattacaaaaaataatatttaagtattttattacatgtatagttattttatatatatatatatagtgaacagctgtttaaatttttattttcgtatcagcgttttccatacatatataattttaatatttatatatatatatcgtgatgtattttttttctaatatattatatatggctccaccacagcaatatattattacattatcaaactagctttttcaatatcattatgatgatcatcacaataattttcaatttcatttttgggtggagtattgtctttttgcatgattagttttttataatttagtagaagacaactatttatagactataccaataatgtagaatagtgttgaaacaaatttatgatacgccaag

SEQ ID NO: 26649 - DNA, 4386 bp, Cannabis sativa
  modified_base (49)..(54): a, c, t, g, unknown or other
aaaataatagactttaaaaaagatggtaaaaataaaagaggacaatatnnnnnnggtatagagtgtaatttcctcgaaaaattacacccaatatttttcatttttatttcttttatattgttataagtatttttttttttagttttatacggcaatatattgtcattttttaaaactatttttttgttattttttggttacacgtgtcatcgtaggatttatgcaaatcttttatacaattttttgttgttataaagatctgatgtgacgtgggttgtcattttagtgacaatttttttctttttttctttttaaataatattgatgagttacggttgtgttatcttttaagggcaagatatacacttcatcagtttatgtttaatctcactctcccattttccatatttatgttcatcatcttcttcattttttttttatttttcatacagttattgtgttagtggggtggttttagttagattttttttcaaaaaaaatttgtttagttttttggttttaaatcacaagtttccctctaatggtgaagggtaatctgatacattgaaggttgaaggaatgtcgattacaacaaactatgccatcaaagaagttttggtggttggattttccctaatggtgaagggtaatctgatacacttgataggtgcaatggcttggccaaagaagttatacatcacttgattgtagggtgccaggtcggtgagttggagccctatcttttcatatgttgacttgaaaagaatgttagaggaggctctatcgtccaccatgcatctttctacaatcatgttctcattttgtgcagtaatgaccagggggtcgttttgcgggaaactgacttgagtaccatcttcttctgtgaaataaattatgggccctagtagctttggttgcttaaagcccctatctttgactgtcgggatgttgctcttaggcgcgtgacggagtgtctaagcatagtgcaccctagctttgttggtctcacctgtaatgtggggttcgccaatgacgaccgctaagtgtcctgccactggtggtggcattggatctctattttgggcaccttgtgcctaagtttggtcgttttgcacataacgatgcaggtggggattgttctcccttatgaggtagtcaatctccttctttaaattctgtcactcatttgtgtcgtggtcaaagttatgaaactaatagaactttgacatgtccctcttactcaactcccttgggaaagggttttttgtaggggactgttccctgagtggccatgaagatggcctcaggtttctctgtcatgaaggttaagcaggtatacttctcctccttattcttttgtggcgtgagagaagtgttacacttcccctttttgccactgtttctctcagagctattggtgttgtacttgtttctagtgttcttaacattggaggtttcggcagagttgttggtgtcttcctgcgcgcttggtaggtcatgagactataggatgtctcgtgactgcctgttgttgacatgccccatctgggcctgccagatagctctttgagtttgataaagccatcagttctataaaggatctccttcatgttattggttgagatcctctaaatgtcttttcaaaagtcacttaattggagtatgaccccagtatggccgtatattggccctcttccgtaaggcctttgacattcgtggcctcaaccatgaacctctggatgtaatccgtcaaaggttctctttcttgttgtttgacttcgacaaggtcttctagttgtgatggtacaagcctcgaggatgagaattgtgtgtaaaattctcgagagaactcagcccaagaattaaaccttcctagggccaatttgaagtaccattattgagctgtttctaacaaagtggttgggaatatgcgacattgcacatcaccaattatcttttggagattaagctacatcttgaaatatttgatgtgcgctaacgggtcttctcgtccaatatacatcttccataccggcatcttaaatttgggcaagggcaaggcatttatatatgtcaaaaatggcgatgcccttgaccggtctggttcaggatctgaaggtttcggactagctatgccttgaatcatgtcctttagttggtctaattatgcttgcatagaaggatttgttgctgtaggggcttgactgataggccctccttagaggggtttcagattctggtgtgacagggtctggctggccatactttgagagggtgtatggtgttgatcagaccgatgttgtactgcaggccctgaccggccactcctaggtaggggtgttggctctggtcgaccaggcttgcactagacagttgtctatggccggctagacctacatcaggcaaggtatggctgcccatgactcctccatggtcggccagacctgcatatggtagggtctagccacccatgactccttgattgattgatgtttgcggtgtgttgacgagaggtagatcgcaacagttattggagtttggtggatctagatgtctgaagtgatcaatttcacttctaaaatcgtcattttgggtgtttacactcgctctcgatccttgtcgattgaaaattaatctttgggtgtctcgttcccctaggggaaggagtgctcctctctggccgaccataaggacttttgcaggtggctggtcggctaaaggctggatgacgggggttgttgcaaagcttgagatccctggctggcccccatgatgttggttgataagatctggctattcttgtcgttagaactttgaggcaaggtctgtcctccctcggacaaaggaagatctgtcctactccctgaggaaccgggttgattagcttgtcgatagaccctccctaatctatcaactagtgttccttggagtggatctctgatgagatcctggcctctttcatcggttctctgattgaactgccttatcagattactgtcctctttgttgcaataatctaactttgcttggtgaggtcgaatgatgtactcccagtcatccatccacctcaagaattcgtgtctctgctgagggagtacattgcaatcagcaacgcatggttcttcagttaggctagcttggccgatagcttctctaagtctggctaactcgagatcttctcccaagtccaaatggggctcaacaattgtaggctcgccaactcctcgtcccgtctctccagcatagtactagagataagattcgattgttgttcctgggggttgtcgcccatgagtcctccttttagtgggaggcgccagtggagggtcctcccttcgaggcaacgaccttatatttagacccaccgggatgtttgtgttggtttggccagctgtaatggccagacttgtggtgcctgttgtggtaacaaaatttaccacatctgcggtgttcataagaattctagttgtggctggaacatgaacatcaagatctgtagcctatgtgtcttgaggaaaacccaaagatgcagacggtgcaattggagttcttctcgtgttaaccatgacatttgatcagataaatatccactctctcaataaaatcaccaaacggttgacctcaaaaagtgataaatcgacaggggagtcgtatgaatctgatgttttccacgtattacacaattataattaaaaagtaaagaacacacaaaattttatagaggtttgatcccctttcttagcagataatgacctactcccctttttgttatattaatactgagggaaaatactattcagaagtataggtggggttcaatatagctcccttcagactacaaaataggaatcaagatggcaaatctcaagtgttgagaatgctatatggtgcgtgtgagatagtgaagaagagagaaagatatcagacttagagatttaggcttagagcttggaggctagaattagacttaagtttttctaggttagagttaaggcctttatataggaaagcttaatcctaattttcaaacaaaatccttaaatatttgtatattaaattgataaataacaaaagatttaaatgcctttaaacctagatatttttcaactattttattgggctgttaagtccacgtgtaaatctgtacagaaaatcgtgccaggtcctttcctagccggccaagcacctgcagggagcaagttggctggccatgtgttgtccagaggctagtcggccatagggtcggccaccccctctgaggaagctggtctatcacttggtgtcccgtttgagagccggggtccctgtaggctgaggtactgacttggccttcttattggtgagttgtactgccacatggcgctgattttttctacgtaagtaatg

SEQ ID NO: 26650 - DNA, 1235 bp, Cannabis sativa
tcgggtacatgttagacaatttgcattaggaagtattgtttgtaaaaatctcatctgttttcatttgccttataaagctaaaccagatgagaaatttatgcagtttattatgagctaagctacttaagtttgttctgttatttctttgacagattgtgagcaatggtacatacaagagcattgagcatagagcgacggtaaattcatcaaaagagaggctatcagttgctacattctatagttccaagcttgactcggaattgggacctgctcttagcattattggccccgaaaacccagccatctttcgacgagtccccattgaaaattacttcaaggaattctttgctcgaaagctcagtggtaagtcctaccttgatttcatgaaagtgaagaacaaacaatagaatgtaactgatgaaacatgtcttgatttggcattgttttgtacgataaaacaaaggagtttacaagctcattaataaactgctgaagcagaaccactacagcaatgttgtagtgttgtagtgagtgatttaacaaaaattcatacaacgtatacatactccatatacatatatatatgtataaatgtaggaatattcatcattgtattattgtaaatttcacaattttctaaggttttctcctttacttggttaatttttattttttttgctttataagtttgtttaaggctttatagtgatgttctccaaatgatagtcgttttctcgaaatgatgtctttttcttgacatgatgtcgttttattgtgagatgtttttttttttcaaaaggcgtgaggttaaggttattggatttatgtcgttttctaacgaagatgtcgtttttagaaaatgttttctgcaatcatatcgttttctgcatatcatgtcgtgtttgctaattatatcgttttgtgcaaaatatgtcgtttcgttggcgtaggtgacctttttcactaagatgtcgttttttactaataatgtcgtcttttattaattatgtcgtttttcataaaagatgtcgtttttttggtggagatgacttttcctgactaggatgtcgttttatataaaatatgttgttttctgtaaataatgtcgtttttacgaagatcactttttcttactaatgatgtcgtttttaccaatgatgtcgttttcaaccaataatgtcgtttttaccaatgatgtcgttttaaccaataatgtcgtttttaaccaataatgt

SEQ ID NO: 26651 - DNA, 2041 bp, Cannabis sativa
ggccggggttgcctagaaaccgccacacttgtgtcattggaaaagctagaatcctcaaagtcagaaactaacgtctcaatatcatcctctcttgacaacggagaagatgacgatctttggacattacgacatctttttaacattttcctcatggatagagaatcattttgcctcttgaaggtggtacttggtggctgattttcttttgctacagacattttggcagtagtgtaagtgcagaaaggtgtcatgggttgagtatgagagagcgaggagagattactgttaatgggaattgatgttagtacaggtggatatgtagtaaaagtgctggcagtgagatcgggtatgtaaatgtgtgtaaggcctgagatagagtctttttgggaaggagattggtcagagttattatgggaactcgatgtggaatccattggtagagctctgttggaagcagaatttggagtgttgactggtttgctttgaaaatgactgaagtgagtgttagttggttgaaatgtggagttgctggtatgtgtaagggtgctggttttggagtttgctggcatgggaatcagatggcagggaatcaaagttgctagtaggggtgaaagtggttggaggcatggatagttggtttaaagggctgctggtgttggtgtattgatgttggtttttgaagttgctggtgttagaagaaaaaggggggaagttggcatggctagtgtgttggtgactagtttgtgcattagttggtgtagatgtgttgtgtaaatcgggttggccataattttaggagtgaagttgctggtgtcgagttgggtagtatctgtactggtttgaggacttgtatggtagttgctggtgccaaagttggtgtaaccgagattgttttggccattagagataatggttgtcaaagcagtggatgtaagcaaggagggcatgataccgtgggtgttagttgtgacaatgagattggttgatgcaaggttgctactatggctatgggcctactgattagatgtttccctcgcataaaggacccttggttgaggctgattgcggttgtttaacactggaagtgtggaagtaaaagttgtgcgagctaatctagtgagaagaggccaagcattaccctttgcaaagtcagataacgatcatagccattagttggaagtttagcacctttcatccatggcccatattgaaagtcatccttattaccactatccatacgctccataaaggcaacacatcgttcaaaggggtggccagggcgaccacattcaaagcgaaatttgggaagcctttcatagcggaagtcaacccaaaattcatctttgattctaggcaaccggatcatttggcctcacaacaaaggtttgtttgtacaaagtttaacctgtacacgtaggaaagggccccaaccttcgttagtggaatcatcaaatacttctataaactctccaataatatttccaagtgcttcagccaacgcttttgatttgcttgagaaaggaagtcgataaatttgtacccaaaatggagtaaaaatcaaattttcctttgtgacactttgcagaacatcggcgccataaatataatgagatggttttgaaaatgccatggttctttgttaagaactcgacgtttatctccttcacaaccaaacttgatatgaaacaaaccatcttcacctttatattcagtaatcaaaacgggaaaacaaccttgccaatatccggacatttgatctttgaagacttgtttgtatacagtctcgtgagtgagaactctagccagaagggtgggtgagttgctttcgattggggtgggacagtacccagggatggtgaagatggagcattcttcatctgtgagtgagagggtgttattcatatcctttaacaatggatccatgggaatgaaaaggaaaacaggcgagggttgaaggggacgccgacggtagagatgatggaggagaaggaaggagggaacggttatagctaacagatttgaaaaaagacaataggattta

SEQ ID NO: 26652 - DNA, 2656 bp, Cannabis sativa
atagattgtgaaattaattattttataattaattttggtacaattcaagttaagaatatttttcttagtattaaactagagattaataattgaaacgatatgctagtggcgacttgtcgtccctaatacattttagggacgattataaaggtttttaggggcaacttttgtcgcccctaatactatgttttgttgtagtgagatcaaatacaaaggagagggagggccatacatgaagataagagtgtggtttagttagggtaccaaataagtattattgaaaatacaggacatcaggttttctgtgcgtgtttctaaagggatggtcttcaaccttctcctttgctgtcgtggagtgtgtgggtgctttggagtggtgtgctagattgtgagctatctcctgtttcttccgagttttgtgttgagttagcttgtgtgtattttgtgtgtctttatctttgacgtgttgtgccttggtgtttttattgtttgactcttgtttgctttcctctgttgtggggtaaagttggtgatttggtgttttgtgttgtgttccgtttgtctcgtagtttctgtggggttggtgggttggtatagagtcttgtattctcttccttttgtctgctttctgtcggatatttatggcgtccattattgctaccaactcccatttaaaaggcaagtgcttttcttgcactgaaacatttgtcaacctatctccgagtgcttcatctctaagtgctcttgctacttgctgtttatatgggaaagtgattgctcctatggttgtggaggaaccatctgttgtggattttgtggctaaagtatggaagaaacaagtctctgttttggccatgggggatggctcgaagacctctaacttatttaggtttggttttgtctctgcggatgatagaaactgggctcttcatcatggtccctggtgcatcagagggtatacgttagttctccaagcttgggctccgactactgatgggccggttgagtttcatcttttacgtgtggggattcaacttcataacctcccccatgaatatttttctatctctaatggtaacctgctgtgaggtttggttggaaaggttgttaatgttgaattggaggaagaaaaacctgcattgtgggacaatttcttgaaagtacaggtcgacattgacatcaataaccccttagtttcgggttttttctttgacatggctgctggggttaagaaatggatacaagtgaaatatgataaaataggaattttctgctatttttgtggtcggctgggtcatcagcggagggggtgcagcttatcatcgccggtgatggtttcgaacactgatggcactccttttcctatgtttggtccctggctctccacaacatttgtgtatcgtgacgtgttcttagggccgaaacactttggttcacgtagtttcctggctgtgacttcagggaagtcgagtgggaatactagttcaacgccggagaccatggcgggttgtggggaagttcctaagcgtcctggctcttaccaggttggacggccgagacatcagtcgatggtgacttctcgtggagttgctatcctcggggaggcaaatcgtaaggcgtggcttcccaagtcacgtcctactcgatatgtaaaaaccattacctcttttggtaggggaagcaatacggaggacctggatgtgggagttgagcctgcaaatctacccattttgattataatggaaaaggaccggtctttggaaggtcttagtgatttgaataaagagaccgttggggatgatggattatgtattgggccgagctctaatgggccaaatttggagacaaatggtgggcttgctacttctcactctactgatgtggctagaaactcggttggagttaaggatttgggaattgggctgggctctattgggccgtgtgtgtcaatttatgaacaagtcaacgtcaacttttgctctcctcctattactactgggccggcttttactgatgtttctttgcaacccaatgggcccgagatggtggacactcttggaattcataactctacaagcaacttggtggggccgtctcatttgggtaatcgtttctttgctaatgggccaatcttttcctctcctaatgatgttgggctcgtggggcttagcacatatatgcctagagtatctaatggatccgaggagctttctaatgaagacaaagccttggcccaattttttaaagctcaagaaagcctattgcatgaccttaaacattttgggaacctcaatttatatgaaatacggaaaattggaggagacattggggtcccggattcctctgaagttaatgagagaacgacaccttttaagaaacaaaaatttgaagcgtctgcctctctttgctctaggccccacaaagttccgcagaagtatcctgaagtcgttcgtgattttccctgggatacaaggcacaaagcaaatgactctgatttggtgattgatgatccttctgaggacagttctagttccccgagttgctctggtattttgaaaaacccgcttgttggttcttttgtgatcgatgacactgtttctagtgggtcttctgattcccataaccctgtggaggagaatgtcgaatctcctccaca

SEQ ID NO: 26653 - DNA, 3703 bp, Cannabis sativa
tttataagttatcttaaatagttataacgtacatgaatatgaaaaaaaaaaaatagactaaaaaattttctagatgccgaaataaatcatgagtgtattaatctatcccttttaaaagggtgcattgtaaaatcaccttataattatttaagtttaatatttaacgaaaataatactaagtcatatttttaaaattttaatagtacatatcatatcaagtcatcatctcctattattattttattactatattttataattacaagtaaaatttaaatatttatacaacaaattattctaattaatattttaaaataaaagacagtggtgtgctataaaaccatattccattaatgttaaaaattcaaattaaaataatgataaaagagcaacaaacacgtgcttgggactacaaaaaaaaatctaatataagaaactacccaattgtttttttctcttcgagcactcttttggaccaaaaattgaatattcaatattctttctttttaggccccaagcacaaaaaacagaaccagatctatttttgaaagatacagtacgtaataagttttaagaaagttttacaataaaaccctcattcatccattcttatctctattttaatatttaaaatttctttttaatttttttaatcactgtatacgttataattattgacattctgtaaaattgttaaaaattcaaaacaactttacatgcagaaaataatttattacacgtattttaaataaattataatatagactaaaaaaatataattttattttattttatattataaattattcttaatatataaaaatttaacccaacatcttacacaaatgtaatttacacttttataaattaccaataagcaatttttttaacatgggtttgggtatatcgggatagatgaacagtcaacgcctcccttcggatcctcctctataagcgtttcgatttatacctctctttttctataaatatgtctttttttggatctgaaattttatgtttttccacttttttctttttttcttttaattctctctctagctttggagctctctgaagatcacgagttttttccccagctgcattggtaatcgaggtaatttgaattcacgtgttatttcatgtttgtaatttgtggtggtctctttcttatcttgtttggttggtgagaaaatgcactagaaaagtagtgtcatggcaatctgagttttaacatttcttcatttgttattccttcttgggaaggtaaatacttaaaaatgtaatttgggttgtttttgtgttttgatgttaccaacaccatatttaaaaaagtcaaaagcttttatttgggtagctccgaaagtcaactattatgatgttctaataaggttgttatgggttgtgattagtataattgataattaatcaattttgtcaaataaaatgtcaaaatctcttttaaactttgtaggtgaagaatctgaatctgatggcagattctgataccaacaccaacttcttgaaggagtttaagattccaaattacatactattacccaatgaaccaaaggagcatatttctgctgaagatgaacccaagtgtccggtcatcgtctttatcaactccaaaagtggaggccaacttggtggtgatcttcttgtgacctatagttgtcttcttaacaaaaaccaggtatattcatatatacaaatatctatatgccatttatgtatgattgtgcttgtgtgtgtgagagagagaggctgatttggaagatgctaattttcttcaggtttttgatttgggggaagaaggtccggataagattttgcgccgaatttatgttaatctcgcacagttgcagagggaaggagataagtttgctacacatatccaggagaatttgagattaattgtgagtttttgttaaaatttgtagtcttacctttcataacgatgatgatgatgatgatgaaataaacttatacaggatatgactcttgtaaaatttgtaattggatagttgacatgtgttttgtcctcttcaggttgcaggtggtgatggaactgcagggtggcttcttggagttgtttctgatctcaaattatctcacccaccagcaattgcaacagtgcccttaggaacaggaaacaatcttccatttgcatttggctgggtaggaatgacatgaacatttcaaaacttccacttatttattgtacctgtcaaggctttgtctacggatacaattatatatatacatatatatatatattattgttttggcatatcctttcatcttgttgactcataaaccacttcttgataatatgttgtttgatttccctgaaaatgagttgatatttacatttactgaattgttttttctatgctactgagaaaagaaactattttcatgtaccgtgttacctaatcagtagccatattaattggttcgacaggggaagaaaaatcctgggacagatgaaaatgctgttaagtcatttttggctcaagtaatggaagccaaggaaatgaaaatcgacaggtcagtgctaacactaataaatttttcttttatcttctatcatcctcagatgtatggtactaaatgttttctccaatttgactgtaatagctggcatattatgatgaggatgcgggctccaaaagaaggttcatgtgaccctattgctcctcttgagctaccacattctctgcatgcattccatcgcgtctctgatacagatgagctaaacaaggtgaatatgccaaacgtagaatatgtttattgcctgtattgctttatatgtataaaaatatttatagaatcctactacagcctgcttgctcatacaaaaaagaaattcgcaattatacttgaaccgtcgtaaggatatcatatgtttgacttgtattgtttgaattaccgaagagctctagttgtctttctaatctgtttccaagtaatagtataatttggaaaaattataactaatgatctggctagtttgaatttttctgactgtcctttagctggatacttcagtttcttatgcatgaaatcactgaactacttttcaggagggttgtcacacatttcgtggcggattttggaactacttcagcatgggtatgaatgttgacttgaatgttacttgattttcattctttgaaggaacatgactttaagaaacattttaattttgtctatggtttatttttgtaatctcagatgaatcatatcaaatggtaattccattgttttatttggtctaaattattctataaaccgcgggtttaaaaatgctaattttgtagttgatcacgattttcttatgcaatacatttttaatgaaaagtatttatgatctgttctctataggaatggatgctcaagtatcatatgcatttcactctgagcggaagttgcatcctgagaagtttaagaatcaattaattaatcaggtacttctggcacactgatgtcaatgcaatggttgaataatatgcacttataatctataaaatactccatcttaaacatattagctttgtcatagaaatgtgtaatatggtcttagccactgcttttctttctttctggtgttgtagagaaagaattcggaacttatatgtcccttttaagcactactcacttttacacatgtaattgatgcatgacaaacaatttgctaata

SEQ ID NO: 26654 - DNA, 2586 bp, Cannabis sativa
ctctctctctctctctcttcgcatcctctctctctctctctcgcccactctctctactcgcaccctctctccctttcacccaatctctctacttgcaccgctattcctctctcacctaactctctctcttgccaataatcaagttcccccaaattgcttaacacctcacttgcgggcatgaggccaatctccgaagtgtttggacatatctcaaaaatcataagtgctagtttttggagtcgacatcggattcatcgccgactaatctcaaaatttagaggagctaaaaaactctttaagtgtgtccttgctaatcacccgagtagtagttggctaatctcaagagttatccttgctaatttttaggattaacacttgcaccctagtctataacaatacttttatgtgttcttgtacactaagtttgttgagatttactcccatctttaagttccgcggtgctcctttaaccgattatgccttgaggtcttttttccatgatcctttatgggagaacattggctctatttctttggatggtgcgtgtttgtcatgtggagggagagcctcttgagctttctcgacttcttgtatgagttataattttttgaggattctttttgccacttgggctttctcaacttattttttttggtgcaacctcattatgtagggagtatagactctttgagtagtctcgatctcttattggttacttattagatataagggagcttgtggcctttaggcagtgctcaacctcttacactgtattcgtggaacttaaagtgtgttttgaatgatataaaatttgtatgccttttagagaggcgttcgcctcaaagtcatatctgattcctcttttctcttcttttttttacactgcttcgttcactttgaaaatttcaattgacaggtatagtgagaaagtaaaacagacatgtggagagtgatgattgccacgtgtaaagtgaaaacttaacatttcattgataaggaaaatatgtgattgctcgaatacacgtgctatgttcggagaccagccttggtatcctctttaatttagtacaatgtacaaaaggcaaacttgcctttgctaggaacacttttccatataatggaacttcactttgaggaacatcttagatatttaattttacaagttgtagagcagaggctttacttgaatgtatcagcctacgggcattgggggtatcgtctaatagcccccgtagggatctaacgaccttcccaaagaacatatgcttgtatctatttttaagactctattaccctcctctacacggatgtacttctttgcactctcatagaagtcatctatgccattcaattctcttttcaacatattcccccatagtcaacttccagggcgtactccagtagctatggcaaacttgagttaattttcagacatttatactattttggtgacttcagcattgcaacactggatgtagctttacaagctttcttgttcccctttcatcacattggtcatacttgttatgggcataacataatcacacgcagcctgatgcaattgaaggaattattctgaaaatttctaccagaatgtgattgttcatggttctagccttttgaatcacttatatgcgactcccttaagtgtgaccacaaagcattgacacctttccttgcataatacctttttcatcttcattagctcattaaaagtacctagatggtacattagattcgttgtacaatcatatggcgtcatgcgcgacttcttaaaatcgggtgaaagtggttcaccttgaatctttcttgagaaaggggattcatcatcgaacccaccatcgtataagtcttcctttaatgtgataactatctttcgacataggtcttgcatctttgcttccaactccttcattttttttgttcatcctttctgaagacttattgagtgtgactcgagtctgccttatagtgtgcatagggcctgtgagtagtacttttcttgtcccattgtcgtgtgacttctcactatgattgaagggtaacgtctttcatttgctttgatcttactacgattggttggttcaagttgtcttaaacaacttatagggtccttgtctcgttatgggccctttcctctctcatcttttggggtgcaatctattgatgatgtggagtcctttacaccaacatgagcgtttgggaccccacgtccttgctggtggcctttgtactgaaagtgaaaggcttgggttttgcctttgagtatgctcttcaataccttttgcatgcttgacatcgtcgtttctagcctttggttcttccagtagagataatttatctcatcttcatagtggaaggtttgagagtttgatctcacaaagtatgctagcttctcatttttggattcacattttgaagtggcggggtcttgtgacacaaatagtggtggatgtgcgccagagatggtcctccaagtggttgaatgattctgctgatgcggtcaaccaccaacattgtcattaattcatgttgtgttgggcgctctccttgagcaatagtctggttgttcaccctttggtcttc

SEQ ID NO: 26655 - DNA, 5481 bp, Cannabis sativa
  modified_base (5064)..(5065): a, c, t, g, unknown or other
  modified_base (5150)..(5157): a, c, t, g, unknown or other
tagggcacaaaacccaacagacccctctgcccaaacaattaaaaggtgatgacatagcgcccaaggagaagagcccgattgagtcacttagcgacgtctcttaggaggtggtgttagaggtggagctaccaaccaagaaagccttcaagtctaagggtgccaagggaggtagcatagatgggtctggtttgcccaggccctcaaatactcctattgtgctgaaccctgtgaccaaaaaggacaaggagatgcttcaacactacttcctgaggtgaatgatcagctggttggagctaatgagatgtccgtggagcttctgatgggctggctcctgacggaggcaacctgagtaagtatttttcccttggtttttatctcattcttttatccgtgcaagttttaaccttttcctgtgcagcttaacatgaatatggcctacacctactcccgagccaagtccaatgcctttaaaacaataaccaccaccaataatctgtagaagaaggtgggtgcaaccaaaaaggaggttgaggacatgagggcaaagttgggcgaggtgaacaaacaacttctggctaccaataaccgagttcaagacctgaagaaggagattcaggagatgccatctaccacctaatttgaggtagatgtcgaggctctatccaaggagatcaatggtctgaaggacgatagggagggtctccgaactcttcttgccactttaacataagataagtcaaatttggaagaggatgtcaaatctaggcagacaagggaggaagcacttcaaaaggaggtcgaaagtttggagtcggtcgctctggaggttttctacgaattctagaaggccaaccccgaggggaactttgattaccttggtgaaaccaaagaggcgtatcttagttattatgctggccagaaagacaaagaaaaccttaaggcggctaactcctcagcttcgactgaccaaaacaatgagaccctagcctccaatgaccaagctgacccgtacaaagaacccaggactcctgccgtgtgaacttttttttgttttttattttttttatttcttcgacccatgggccttttttctatacaatatggctgaccaagcggcctttaaacttgcttatatttcattttgttttaagacaacgagatggacaggcagcctttaatcccagacttatatcgtgctttattatcttttaatgagtattttcccttattttggaaatcgagcttgttatttaactatgtgttgtacgggtatagttgccccccaactgactgagtagatttatgactcttgatcatttgcaaaccctttgtattttaacagcaaattcataacttgttataaaaattatttacacaattagaatgataattaatatctttattcatttattggtcggaataaatttgttactgtagtaacttacatttattgaattatgaaagctattacatgatctaactgatctttaactaattaaatcataaaacaattgcatttttgaactgtactttaaagatggtcatccgacctgagtacttttgtctgaacctttaagcgaaatccgcctagaaggccatttacttaagagtaaatgttctagcattgtgtacttaagatggtcatcagaccttgtacacttactagtagtattttctcaaatgttccccattcgataccttggtactagaacgagctccatatttttgtcataccgtcccatcttatatgcttcagaatctgtgacttcaaccacctgatgtggtccttcccagttaggtccgagcatgccagttgtgccatcttttgtgtttaggaatactcttctaaagaccatatctcccacaaagagttgtctttccctcacttgcttgttgaagtaccgagctaccttttgctgatgagccactagctttaggtttgctaaggtttgtttttcttcaatctcatcaagtgattctgccaggagggcatggttagtttgttgatcgtaggttaatctcttgtgggatagaggtgataattccacgggcagcatggcttcagaaccatagaccataggaaatggtgttttccctgttactgttttctctgttgtttggtatgaccacaatacttctagtaattcctccgaccagtttcctttagcttcttcaagtcattttttcatggtgtctttgagtgtcttgttgacttcctcgacctgaccatttgattaagggtgtgctacttcggagaaacttgttatgattccatgtgtcacacagaaatttgtaaacatttggctatcgaactgtttgccattgtcttaaaaaatcttgtgtgaaagtctgatctgacatattatgtttttcaccacaaagtctaatacttttttagatgtgatcgttgctaaaagctcggcctctgtccactttgtaaaataattcactgcgaccactacttattgcactctgccctagcctttgggaaattgtccgatcagatctattccccatatggaaaaaggctaaggactttgcatctatattagctcgttggggggtgcatgggggatctttgaaaatttctagcatttgtcacatttctttacataggcctttgaatcgtccatcattgtcagccagaaatatccttaccttagtattttctttgatggactttgtcctgctgcatggttgccacagaatctatcatgtacctcagacaagagttgtgtagcttcttcttttgttacacatctaagtaatggcatgaagaaacctcttctatacatcacaccttaaactatgatatatcgtgcagcttttctcatcatcttctgagcttcatccctatcatttggaagttctctagtgttgaggtaagctgctatgggtgtcatcaagtttggtgtcgtgtctatcattttgatttcttctgcacaagtaatgctgggctcttctaaaaattaaatcgggactaggttggccttatctgttatagtgctgctcacgagccatgctagggcatcatcagttgcatttctactcttggaatctgactgaggatgtaacccttgaattgtccaagcagattctgtatttcgcttagataggccatcattttctctcctcgtgccatgtattctcttgaaacatgatttactaccagttgtgaagcactacagatctcaatgtactcggtgtatacttcccgagcaagctttaatccaactctgagtgcttcatattctgtttcgttgttggaggccttgaacccaaatttaattactccgtgcaggtgttgcccccaggtatgatgagggtgattcctgtaccagaaagctggtctgtggctgatccgtccacatgcaatttccaggtaggtctgtcctcattcttttctggtaggggctcttttattggctccaggttgtcccttatgttgctttcttatttgcctgtgcactcaactacaaagtatgccaaggcctgtcctttaattgatgtacggggttgaaagattatttagtactcacccaactctattgcccatttaagtaaccgtccagaggcatcaggcttttgcaatacttggcgtaatggttggtcggtgtatacccgaacatggtgagcttagaaatagagccttaacttccttgttgctaatatcagacaataagtgagattttctattaaaggatattgtctttcaacttcaacgagtcttttattgatatagtagactagatgttcgatgttgttttctttacttatcagcacgatgcttacagcatattcggtgacaaccaagtatattcctaattcttctttgtctagggttttgagagtacaagaggtttcgcaagttgtctttttaattcttggaaagcgttctcgcattcgcctatctattcaaactttttgttacctcaaaggatgttgaagaaaggaacgcatttgtctattgattttgaaacgaacttgctgagtgcggctatccgaccagtcaagctttggacttcctttgtctttgttggcaatttcatatttgggatggcttgtattttctctggattagcctctattccctgagcattgacaataaaaccaagaaacttacccaagctgaccccaaaggaacactttaagggattgagtttcatgctttattttttgaggattttgaagcattcatccagatcctctacgtgctcccaaaattcctggatttgacgagcatatcatccacatatacctccatattttgtctgatttggtctttaaacatcttgtttactagtctctggtacatagctccagcattcttcagaccgaacgacattactttgtaacagttaaaacccatatctgttcaaaaacttgtatgttctaggtctagtagatgcattctgatttgattatacctcaaatagacatccataaagctcaggatttcatgtctggctgttgcatccacaagctgatcaattcttggaagtggaaaacagtccttgggacacgccttgttgatgccagtaaaatcgatacatacttgccattttttgttcggcttgggtactagtacggggttagccacccaaaccgggtagaaagcttcaatgatgaacttgttttcgcgcagtctctctacctcttcttttagtacttgcgcccattctttgtgtagtagtcttctcttttgctggacgggatgaaagtttgggccaatgtttagggcgtgagacattacaatgggatcaatgccgaccatatccttatgtgaccaggcaaaaatgtccaggtttcctctcaaaaattttattaaagctaattttacttcaagaaacaaacccttaccaattttgagtttcctggtcgggatatttgggtcgatttccacttcttccagttcttctactggccctacattcgcgtttgttttcccaacttggggatccatatcttctttcccgccttgggtgacttcttattgggcaatgctccttcgcttgcccgaactctggccggaggtattcgttaggaatattttaccaggatctnnatttactaacaagtatgttgatcaacatcctaaatatgaatatctataaaacaatgaaattaagcacataagggtttaagaaaannnnnnnntgattgcagcggaataataatgactcctttcgctcatatctctaacccttgttcctttctgtcgcatagtattatcaagatctgagcctggatctctttctctccttcgggttagttaccaccgtcttactcactatgattgagtatttgacttgctatgtgtgggcatgacagtctttcactaagggatcgaatatgatgaagaataatgaaggagttttgaaatcacaatagaaggtgtctctcatctactagttgtctaacagacaaaacaagatttttggtaggttgaaaatcaagtggatgagtgagaacatcatgttc

SEQ ID NO: 26656 - DNA, 2274 bp, Cannabis sativa
aaattgtagagagaataatatgaaaataaacaagtgaggaccatttgaccaaacacagtgggaagagaatgaaagagctctctttctcttatcacttaatgcaaaaccaaaaactgttgtagtatagtttaatatttaatatatatagattattttattctaacgaatttcaattaaacatataatttgacaaatattttttaaaattccaaaataattaatcattgttattattttacaaaatatattatattaactataatctgtcaaaaaattattattttaataataatcgaaaagagtgccatattaagaaaattcttgactaaaattaagtggattggttaattttaatagatttataaaatataaatactaaatataatatttagttaaaataacataggattctcatctctttataataaacttaatatattttttaaatttattatagactgtttaaatggaatttattataaagattctctataaattaaatatatacaaaaagacaagaacaataaataaatagaaatagaaataactagtatgggcatgttagggaaggcctttggtttttaaataaaaatattttaaactaatcattcttatcctttctagttactttcggagtactattatatatgcatttattcagttaaaaatgaacactcaagatttataacttgaaaaaaaaaaaaaaaaatgaagttcacaacttaataataatttagagtcacaatttgcgtttattgtatatgggtgaagccacagaattgtcctacttaaaatttagcttaattataagtaatttaaaacttatggctctaaatcaattttttttttttagtatttatattctttgatcaaatattattaaataatattgtttggtgtagtgttaattttttttttttaagtttaaggaggtcacaatctattttttgtatgaatgttggattaaaccttataattaatgtttggtaaaaaaaaaaaaacttataattaatgcaaaatgtggccacactaaaatttatgtttatataattgtgtattattttatattttattatagccttattttataatatttattaaatattgaagtctatgaaaatgagtattgttattaagctatatgatgtttagcaccattataaggtgacactctataaataattagtgattttttataataattattaaaagtaaaataagtgagattcaatattaaatttcacaataagataccttataagtcataagggtgctaggtgttaatgaacttaagccagttaatctagcagttaatgtttgttagctcaatatacttagttagatttcaattgtacaattagttgttatgttagttacagttcttgattttagttttattgaacttgtgtatataaattctgtaactttcttctttaatcaatgagaatcattgatttttttttttttggtctaagagtttttacatggcatctgagcttgattgttcaaggtatggagaacttgtccatacctgttattggatgtctgttgaatccttcttcgtcttcttaaaatcccattcccaaaaaaaaaccttttttctttctagcattctctcttggtttgttcggttgaaagaaattacctcccatggaagcaacaagttcttcccgccataaaaagaaattgttttcagcgacttcttaatccaaatctcatgtctctgcatttgtcactgatcaagattgtcgggataatcaaatcaatctagagtttgaagattgggagcaacaagataatgttcttctttcctggcttctctctttaatgtccaaaagagttctcactcgtatggttggttgcgatacaacttctcacatatggattactcttagagaccattacaccgcattgaatcacatttgccagtacaaaactttgctatgaaacacaatgatgaaagactctctcagtgactgatctcctcaagatcaagagcctcattgacactcttgctttgattgaccataaaacatttgctcaagatcatattgaggttattttcaatacttacaccagtgactacaatgtcttcattatctctattaacacgcgcacagatgcttatattgttccagaaattgaagccttattaatggctcaagaagtgtaccttgataaagcagcaaaagaggtggacatcaccaagattgaggctaataaaatccaagctgagcttcaacttagcaggaaaataaattaattcaatcttat

SEQ ID NO: 26657 - DNA, 1983 bp, Cannabis sativa
atcatgaactaatttacaactggtgaaattcttgaatctcttaacaaaactttactaatgctcatacctaatgtatcctcttcctttacgattgttgattacggacctatagcatgtcgtaatacattgtacaagtgcatttctaaactaatttttaagagactggctgaggttctcccctcggtgatacatagaaatcaaggtgcatttctcaagaatagatcattggctcaaaatatttggatactttaagacttattaaaaggttatcagaggaagaacatttctcttaggtgtctcttaaatgtggttttgagcaaggcatatgatacaattgactagaaatttttagaaaaattattaaaggccttcaaattcccatcttgattcatttagtggatcatgacttgtataagagagacttcttattcactggttatgaatggaagaatacggaaaagttttgaaggtgccaaaggattgtggcagggtgatcccatgtcacccttattatttgtgttagtaatggagtacctaacttagttactaactccccaatccaagtctaaggaattcatgtttcatcctttatgcaaggagcttaaactggtgaaactttattttgcagatgatcttttaattttttgtgaagaaaaggtggaattagctcaatgtatttctaagacattcaaggttttctataattgaccgggcttgaaggaaaatatagctaaatcgaatatatatttggctggagtggatgatagtgagaaaaggaatcatagagttaatacagtttggagaagaggcttttcctttaaagtatttaggtgtcaccatgagactaactaaatggaagtttgctgactgtgagattataactaataaatcaggcataaattagttactttggctagcaaacatctcacttatgcaagtagaatccaacttataaactctgttttggttggcatcagatgctattggatgagcatttttatgctcccttagagtgtgatcgaaggggtggatatgctttgcagaaacttcctttggggagaatgaggtaacactatcaggtgccactgatcttcatgggatttggtttgtaagctaaaattttttgggggtttagggttttagaatggaacaaaatggaacaaaattgcgatggctaagtattcgtgggcactaactatgaaataggaaaatcattgaattaaatggatcaatatcatatacttaaagaatattgatgtatggactcatgagcttaagctagatgctagctggtattggaggaagctcatgaaactaaaaacgtgtttcactaaggaagatatcgtcaaggcagggaactctggaaattcaaaataagctctttgtatgagtgttttctggcagattctctaagaatcacatttgaccaagttgtgtagtgtcgcgtagctgcttccaaacatagacttattctttggcaagcaatccaatcacatcttcttactatagacctatttgctagtagaaatattattattgacaatgagaactgccttgtttgtgagtacacaagaaagtcatggtcacttattctttgagtgtgctatatttatggtgattacaagagtagagtagtggttgggatcaaattcttggccgagagactctgaaagttgggttcaatgggcggaacaacaacagaatagatgcttagcagtaaattgaaaagtgcagctttggttggagtggtttatatggctgaataggaacttatgtatatttgaaagaaaatgtttattaatttaatatccttggttagtaatattttttatttaataattttaattaaaaaaaaataagtagaacttgatatcgctacaatttattttcacacattaacaatgtgagattaactctaataataggtaagtaagaaattaatttaacgtagtattgccctcaaaatttatgtatatatatata

SEQ ID NO: 26658 - DNA, 2216 bp, Cannabis sativa
attttatattttatttataattgtgataagactgtctttctagttgtttttagttattttataattatcgtgaagttaatttcttattttattttaattgagtaaaatgtattttttataattttacaattaaaaaaatgtatttttataaataaaaattttagactataaaattataaataaacataaaaaaagtatttttaaaattctaaaatatttataaatgtaaaaaaaaaatataatctatgacgatttacgtattatagttttttttttcttgaaaatacatattatagttagattaggtatatattgacataattttaatgtttatagccaattacacatttaagagtattcacattaggtgaattaaatttgaactattatagttcattctctaaaatataaagaaaaataagtaaaaagcttaccagagtgctttaaatgatttatgaatgtattttttgaaggatgaataatgaatgctataggtttggacctacatttttaaatgtcatatttggactcaaagtcttcaattagaatttagaatcctaaattgtcaatataatgatgccatggtatttataggaatatttctaaattgtcatcttttgcacaattttttgggcgaaaataataataatgacaattatactctaatttagtttataagaataaaatattgctgcaaagaaacaaaaagaagtatagaatatgatgatatacactaacgcaacatatatgacgaatttttaatgctgtttcttacgttaattaattataattataacccaatttaattattagtataattaattgttcctttcttcaataaaaaaaaacctctcacgagtccacttcgtgccaagtgatctctctctggatttacaaacaccgaatttgccgcgaaatatatcccatacaccgcaactccaccgtaaagaacagtaccaacttctaataaaacgacacctgtacataagattattcactcaaatctcggcatttatgtctaataaaataccagtcccccaccgccactggagaccaactgtacccacgtggcgtaatattattggaggctttactgtacattgattcactcatcagcacctgattattctttttgtttctactgttcactgtgattaatgtctccctaaaatggccactgaactcgaaaagcagtaaaaaggaggaagaagaagaagaagaagaaaataacagagagagagagaaagagagagaaggtgacgtgtggggtcttcttggggcacgttagctttacctctgagaattgtttaatggtttttacaaagcggccaagcaacaatttacttgagatattattgtacacaaacacaaacaaaataatagatagatagataaaacagagcgttaaagaaatccaaaccatttaagcaaaatgtttgcataaagcaacaacttttactggtttttctatgaatcccaactggggtttgggtatataagcaaattttttcattaacaagacaaaaaagatcgtatttttatttctttttttgggttttgagttcagtaaagaaacaatgaggaagaaggggttgttaatggtgatgattcttttggtgctcggagttttggctacgacgtcgttttcagccaatgtaacgtacgaccatagagctttggttattgatggtaaacgcagagtcttgatttctggctccattcactatcctcgcagcactcccgaggtctctctctctcttcatttttctttatatgtgaagctttatgtgttttgactattttttgtctggttttcagatgtggccagaccttattcagaaatctaaagatggaggtttagatgtaattgagacttacgttttctggaacatccatgaaccaactcgaggccaggtacttattctgtttggctgctgggaaaatgcaggaaaaagaagaagaaaaaacgaaccttttactctcttctgtagtaatttcctctgttacagtaaacttaaagttgaaatctttttgggattttgttctgaccctttttgggaaaattacagtttgatttcgagggaagaaaagatttggttcgatttgtgaaagctgtagctgaagctggtttatatgttcatctacgcattggtccttatgtctgtgccgagtggaattacgggtataaatccaatttatttactcaaataaattag

SEQ ID NO: 26659 - DNA, 2960 bp, Cannabis sativa
gaaataattgtagcttgagaatatgaagccatggcttattttctattgtgttggattgagaacttgagagagtgtgatatatatatatatatataggtactatagagctcgtgatgtcatgatgtaatatttgataaccattttgatgattggatatccacgatgcttttccaaaaatataaataaataaagaaaaaaaattaaatatatgtaaaaaaaggggaaaaaaacagggagaaaaaagtgtgtgagagtggtttggtggggtgatataccactcggcactaactcggtggttagtgttaacaaattttcattattgaatttaccagccatttaattacaaggacaaaactgtaaaagtcaataaggatgacacgtggaagttattaattggttgaggaaagggttggtggggactgctggtttcattaagttagctgatctagttgactttgtacaaaaatcgtagtaccgtatttagagtctctgttgcaaaattctacaaattggttacttactgttacttgtaagtatggtggtatttttgtatatttatacgaatacttcatatttgggctgtcagctattgagatttatggtcttgaaatcaaatcaaatcagtacaacttgcaaatgagtcacttgagaagtcaaatcatcaacccttcaaaatcccaaatgattatgttattttttttttttgaagaaaaaatgattatgtgttattactgtaatttaaaattataatatactctttctaaaaacaaaaattataatatttgatctgtaaaaacattatgtattaaaaattgtgttattttttttatcataaacattatgtatatgcatatcattaatacgatttgtttaagtattagcatcaccacatgggcaaatattacacccccatttcaaatttttaatagtttatgtataaatatttattatggttaaaaaacatttattcaagcgatcgattatttagctgtcaataatatgtaaaatattctgagtgaagtatatctgtataattgcagttaaaaaggaaaaaggagtatatctgttagtcttaggctaaaatatgtttttattttctgtgttgaattatctaattaacaaatattagcattaacaataaaataattgagaagtatgtaacactaaaagaatttatatatttcacttctaaatctaatcaaaggattatatatatatatatatatatgctatttgtctcactgagttgaagagagatattatgagaatgagaagattatacctcttatctggataatattaataacctgctaattatatttctttcattcttatcttttaatcttattttgcaacactgtgacactgtcccagtaaataaatctacatataaaatataaatttagaattaaattaatataatataagacacaaaattcagggtagatttgatatgggaatgcttgtgttatgtttggcttggcttagaagggaggttatcattcagggggaacaagcttcttacactatcgatctattggtggacggtgaaatggaggaataaatgattgagttactttaaacttttatcagcaaacaaataacacattaaataataataataataataaagctaccattaaagataaaaatgccatatattcaagaaacaagtacaataacaacaagatttacctatttttgggtccataaataaacatgggaatctcttgatcaatttctccctctctagctctctagatcttgatcttggtaatctcatcagacaatttaataaaataacgaaaattaaaattttgaggaaagtcttgaaacttacttcaagtactcgtgtttcttaacttataattatggactatttattcatttataataaatataattagcaattttgaaaatatatgcaaataacgtacattatccaaatggtcaaatcagtgtgcactattttttttttagatagaatgagttttatatattaaccaaattaactattacaagagtgagtactcaaaaatttaagacaagcatctgtccaaacactaactccaacagaactagtaacagatttcgccaataaataggctaccccattcgcatcacgcaaaatagtataacacgtaccacaccactgacagcagctaacaatgagataacatcatcaatactgggtctatagagaatattgcaaagcgaattattaacccaattacacacaatactcgaatctacttccaccttggacaaactaaaaccaagattaaccgcccactgcaagccaaaaactccgccacctccaccacacactcacccttgccacccaacgcccaagttgcccacacaaccccttccccatcccttaccacaccaccatacccagcaaacccacgcccagcagtaacaactgcattcatacagagggagaagcttcccatcccatgcggcctccaaagacagcgaacaccccgctaaccacacgccacgggggttgcctcaaaggctcgcacaccctgaaactcctctaaggtagccaaagcaaggtcaaccacaacatccaaccgagagaccttcttcccaaacaacaccgagttacgatcaaaccacacccaccaacacaccatagccaccctctcgaatgaggtcttcggtagctcgtcaaacaacaccagcaaaaggtccgggaaagtcccaaaacgacatcgaacaagcacctcccaaaccaacaattaaaaatcgtgattaattaaaacttcattaaaatacatataaatgccaaaataaataacatatatataatggggatcccgagtattaaaattttacaactattacaaagtgcgtaatacaaaagttgtcgcctagcgactatacaaaatataaccagatgtctcaaagatcgtacgctccaagcctaattgccctgacatatacaatcttca

SEQ ID NO: 26660 - DNA, 2428 bp, Cannabis sativa
  modified_base (581)..(581): a, c, t, g, unknown or other
agataccgagaacactttttttcttcttttttttttaatactgaaaataacggaatcaggtactatttgttgcatttaatgagattatatattattcttcacttccaatcctgcaatgcgattgaatgcgaaagaggagaatctaattaaatgagaaacaataaaactatttttcattattctctctgtgattgaaaatgttggatgaatccatggaaaatattttctttattctctctgcgattgaaaatgttggatgaatccagggaaaatgtcttggacaagggattttgtcaatgcattgcatgattattttgattctaaaaatgtttcatcttgcttctgataacgttttttgtgtggtatatattaggtgcacagctggttctataatgcaaaacacgaatcaccgcctccataaatatgctagcaggagcttctctctgttaaggtaattaaaggttttgaaaagcataaaggtaaaaaatagatcgaaaatcatattttattttcctacattagcagaagagaataatctacattaaactacttatatgttactataatatatatatatatanatatatatataaatatttatgtatatgtgtttttggtctttgatattagttgatatatacatatataaatatatatatataaaaagagagaaacaaagatatacatgtacaaatatatagggtggatcagattgtcgctgacaactctcaaggccttgatccagaaatgcgagttgttggagattttaagtctaaagaaatgttggaactgcgcgcgaggctattgaaatcagtgacaaacttgaagttgaggctatttaattttggtgttgaatctgaatattctaaacttggtgagattcttcaaaatttatttagtgatctttatgaagcaaagactttgatggtttgcagttacacacttcaggtacatatatttgaaatattcctttgttattaaataatctaattttaactatacatattctaaaagtattcttaaagtggtatatcattattttcattacaggttattctttccatgaatgagctccttagtttgaggaattgtttggatatcaaacacttgatcgtaattaaagactgctatgcatgataatgaacttttcggcgtcatttttgtgcttaagagttttcatcatctaaaaactcttacaattaatatcaaacttgacaaaaattctaacgaagtgtactttgcttaacttttaattttcatttaaataatctcattaatattacttttcgtaattatatatatattcttaattatagtctaattatttcagggttatgaacctcctttcaataagagttggaccaatgtgtaaaaatttacacatgtgttaaggaaattttaaaagtggttaaggtaaatggcttcatgggatcagatcataatacatttattctactgagatattttatgaattttggtgctgtaatggcttcatggcgaaggatgcatacatttttgccaaaacattaaaaagggatccgattatttttaatatttcatatcagtctttttttttaaaaaaaaaataaataaataaatagcttaggtttttactatgtttttttttttttaattatgatatttatttatattgaaccttttaagatagtttgttattagttagttatttattgacaaaatttaaaaaagaaataattaggaaaatatttctttttttttttaagataaaaacaaatcagctgggtaagtaatttttttgtttttattttatttttataagaacttttaagtcaattaaaacttttttgaaaaacatcttattagtgttgatgtttttttttatttatttattttttattttttcaaaatcattgtttgcttaaactaatataaaacttcttttctcatacaatttcttattagatttaatatatttgatttttaaaaaaataattttaatattcaattttataaatatatttttaaagtatatacataaaataattaattcttcattagaaatatgtaaatataaataacaacatatacaacatgatgttaataattttacatatatttacacatgcaaataatttttttatgaaaaaaatgtttaagtaacatatatttacacatgcattttgcatgtgacttacgcctagtatatatatatatacagtgacggacttagtagtattaatgtggggtataacccctactaataaaaatattgtcttttaaaaaattaaatatttttcttttaatttaataattatagactaaaataaaaaaagcctctataaaattaaataaatttagcaataataattataatataagtataaatattttttaataataaataagcctttacaaagaaaaaattttgagttcgtcactatatata

SEQ ID NO: 26661 - DNA, 4661 bp, Cannabis sativa
  modified_base (43)..(50): a, c, t, g, unknown or other
aatgctctatatgttccaacatatagacgcatcattagttatnnnnnnnnataatcctaatatgatcaatgatgtattgccactctaggactttccatctgtgaaggaattctagcatcctttataggattccagtatccatcatagagatgtcacgtagcaaagagtgccactttaggactttccatctgtgaaggaattcaagcatccttcatatgatttaagtatctatcctagagatttcacgtagcaaagagtgccactctaggacatcctacgcgtcttagacttgaaaggattgaactttggaaaaaatgaggaaatcatattatatatgaagaacttataaaataacgcatttgaaaaataaagattagtgctaattgttaatattataaaagttgtctaacctcagattgttgtgagattactccttcgaattgttcaaatgctcatatcttactccccaatccaagtatgggcatggtactatgtcgatgcttggatttttgtcatatctgaacattgcattttttgtcaaacacttatatattattccaagcaacaccctgcaatgttagagacgcgatcgacgacaaagccgtcgaccctctgatgcttaagtcagtattaagatcttattgtgaaattcaattgattaaaacttttttacctggcggtcaattaccaaggtctcatgatgtttgtagttggatcctcaaatgtcaaggggcgcggttgacggctttgccgtcgaccctccagttcttaagtcagtaaggtgaaaataatatgatagaaattaaagcttaaatttaaaataatttgaaagtttgtaggctgttgcttatatcacgtccatctgatgcttgcagtttgtaggcatcttatccgactatccttgagatcttgtaaggtccttcccatgttggacctaattttccagctcctgcttctctcgtattttggaaaactttccttagaacccaatctcccacgttgtactgacgaactctaatattcttgtaaaatgttgcgctactatatgttgagacgctgcgacccttatcaatgcttgttctctatgttcatctaatgtctcaagcttgtgagccatattctgctagttttcagcatctattgtgtgttcaaatcttgtggttgggagccctgcctccgcgagaatgagtgcttctgttccataagttaaggagaaaggtgttttcctagtggaagtctttgtcgtcgtcctataagcccataaaaccactgggagtttgtttgcccatcttcctttggccttgtctagtcttttctttaaagatgccaccactgtctcgtttgttgattctgcttgtccatttgattgcggaaatctaggtgttgagaatgagagttgtattccccattcattacaaaagtttttaaagtctaggcttgtgaattgtgagccgttgtgagtcactatttcttttggcacaccgaatctgcatatgacgttcttccaaataaagcttttgacttctcgatccctgacttgtgcgtatgcttctgcttctacccatttggtgatgtagtcggttaccgccaacatgaaaactttttgtcctggatctgtaggcatcttctcgacaatgtccattccccatttcatgaaagggcaagtagttaacgttgaatggagcttttcagatgacatgtgtgatacttgagcgaaccactggaattttcgcatcttttgacgaaatcatatgaatctatcctcattgtcggccagtagtatccgattataagagtcttgttgcataggcttcttggtcaagagtggtttccacattcaccttcttgtaattctgttagtatgtactttgcttcagatggacttagacatcagcggtggggcctcgagaatgatctcttgtataatcgatcattatacaaggtgaacctagaggctttggttctcaacttcctagattcatacttgtctgtaggtagggtgccatggaggaggtattctttgattggtgtcatccaacactaattttcgaccatgttcattgattgttcttgttgcttctatacaactggccattgcatgtatattactgggattgttatcccattcttggtttgaattgtcgagccctagtttgcgagtgcatcagcatggttattttctaatctaggaacttgtctaattgaaaattcgatgaaacattttaccttttctttgactatatctaagtacgccatcatcttggaatcttttgcttggtatgatccattgaacttgttgactaccagttaggagtctgagttgactttaatattcttaacgttgagctccttggctaggtcgagttcggctattaaagcctcgtactctgcttcgttatttgtagctttaaagccgcatttgatggatcgttgaataatgtctccagttggggttgtgagtactattctgagtccacatcctttgctattactcgatctgtcaactgacaacttccattttgaattcagttgttgttctagacaaaggaattccttctctgtttgtacttgtatatcactagagaagtctgtaataaagtcagcgaacacctttgatttcatagcggtccttggttggaatgtgatgtcatattcactaagttctacagcccacttcgttaatcttctggacagctccgacttatgtattgtggagcggagtggatactgggtgagtaccaaaattgggtggcttggaagtacggtctgtgctttcttcctactgtaacaagtcccaaggcaagcttctctagttggctgtacctattttctgcatccaaaagagtgttagacacataatagactggttgtttttaccattttcttctcttatgagaacagcactaacggctgcagcagatactgcaaggtagatgtaaagcgtctgtccttctttaggctttgccattagcggtggtgatgaaagatacgccttgagaaccggcttagtgcgactatccttccatttaggcgttttatgtctttgatgttcttcggtggttgaatattctgaatcgatcttatttgttcacggtttgcttctattcctcgcttagttaccatgtagcctaagaattttcctgaagatacagcaaaggaacattttgcagggtttaatttcatattatatttttcaagtacctccaaagcttgttgcagatgatcaagctggtcttgggcaaccaaggatttgactagaatatcatctatgtagacctccattgtattacccaacatatctacgaaaatctggttgactatcctttggtacgtcgctcctgcattcttgagcgcaaagggcatgagtttgtaacaaaaggttcctcgttcggtgatgaatgttgtcttctcctggtcatctgggtgcatgagtatctggttgtatcctgagaaggcgtccatgaaactaagtaactcgtgtcgagctgtcgcatccaccatcatgcttatgtgtggtaatgggaatgaatccttgggccacgccttatttagatcagtgaagtcgatacagacacgtcacttaccatttttcttttttaccataacaatgttagccaaccagtcggggtagtctacttctctcactgatcctatgtctatcatcttttggatctcttcgttaattactcaatggcattacggacaaaactttctccttttttacttgaaaggaggatgattagggtctacctgcaacttatgaacaataatgttaggatcaatacctttcatgtcctcataagaccatgcgaagatgtggtggtacttctttaggaaatcgatgagccgaacatagaactcaggtgttagctttgatactatctggacagtatgttccggaaagtctttactaatacacatatcatcgagatcttccatttcaggcgctgtaggtgcccttgacgatgtgggtgttgtaattgctatgttgaggcttgtttatctttcaatgttgtttgataacaatctcgcaccatcttttgggctcccctgatctccttcactccccacttagttggaaaatgaattacctgatggtatgttgatggtacagctttcatagcatggatccaaggacgacctaggatggcgttgttgactgagggtgagtcgattaccaagaatctagtctaaaggatgactcctttcgcatatacgtgcaatgttacctcaccgatagaatgcttctgttcaccatggaaccccacaaacacagttgacttacggatgatggtggattcatcaatctccattaccctgatagcatgcaaaaacaatatgttagcataacttccattgtctattaatatacatttagttaaacaatttgaaataagcaaagaaatagctaaagcattgtgatgggaattgagcaaatctgaggcttcatcctcctcaaagcttatggtttgtccagtgtaactcactgctggatttcgtggccttctgtccgttcctaccacttctctcgcatgccccttagctgttgagtacatcatcctgctaactttggaccctccatatattacactacaagttctagtgtgttgtggaggttctggtggtgtaataggtctagtgtcccctccagctatgatact

SEQ ID NO: 26662 - DNA, 5449 bp, Cannabis sativa
  modified_base (5420)..(5423): a, c, t, g, unknown or other
ccacaccagcttttagtaggtgccatcatactgccctcctttcacattgaggctcaagaagagggcacaagaaattcttcacctgccagaatttgcacgaaacatcaccatcctggccaccgagacaaattttgtcaagtataaactcttcccgactgattttgtgccaaaggcttagaagaaggcagaaaaaggcagagttcgactaggtggtggtactccaccaggaggatccgagaaagaagaagaggaaggctcctccaagtgaccagaacgtgctatcaggatttgggagcctgagagatctgtccgaacgttcgcctaggtggagggaaaagtaaaggtcattctgaaagagcaagaacaagaaaactcctcagacgatgaacccacatctctgcttgttcgcgagaatgctcctgcttacgtgcaggatattttaactttatttttcatcccctatgtattacatagtatttgcctttaactttcttgtcttatttatatgcatccatgtcttaaaaggtgttccaggccttgaagaaaagatctggtgatagttcaggctagacccctccacccaaacaacccaggggcaacgaggttccatccactgagaagtgtctagccgagacagttatcaacctctgggaagaggtggtgcctaatttggacccttcacctagaaggtatcaaaatccaaaagtgctaatggggggagctcagatggttttggtttgaccaaggcctcctctactgtcgtggtgctgatttctgaggccaagaaaggcaaggagatgctctagtactatcttgattggtcactccccaaagtgagcaatcacctgtttggggcagacaatgagctgtccttggagtttctaatgggctgggtcctaaaggaagaagcttgcgtaagtattttgttctttatttttatcctatctttttaccaatgcaggctttaactttttcctgtgcagctcaatttgaagatagcctagactactcccgagccaagtctatgaccttgaagaatatcaccaccacaaacaatttgcagaaggaggtggatgcaaccaacaagaaggtctttgacatacgaaatgagctaggagaggtgaacaagaagcttcttgatgccaacaacttggttgaggggcagactaaagagatccaagcaatgccatctaccgcccaactcgagacagacaatgaggccttaaccaaggaggtcaacgaccttaaagacgagaggaagggtctccacactcttctttcaaagttaacaaaggataagatggacttggaagaggatgttaactctaggaaaatgagagaagaagagctcatgaaagagatcgaaagcttggaaattattgccctagaagtcttttatgaattttgaaaggcgaatccaataggaaattttgattacctcagagataccaaagaggcatatcttatttactgtgtaggtcaggcagctaaagaaagccttgaggcagccaatcccacagccccgacagactaaagcactgagacctcagccctttccgtcgagaatatcgagcctctggcctcttctggccaagctaatccatacaaggagcccatgacctctgtagtatgaaacattttttctttttcttttttttttatatctgtgcagcccatgggcctttattaaagacaaaatgaccagccaagcgttctttaaacttggtaatatttcattttattttgagacaactagctgaccgtgcaacctttaatctcgggtttataccccttattttggtgattgttcgtgcaaactattatgcttttttttgatcttgttactgcaatgctttgtatgggtatagttgccccccaagtgaccgagcagacttatgactctgggtcacttgtattttaggtttttgtctattctacttttgggtcgagcaaacccttgtacgcatttaatggtaaattcttaacttgctaatataattgacacaattagaatgaaaataaacatctttattcattcattggtaaaaacaattttgttaccgtagtaacttacatttatgaaatctattacatgatctaactgatctttaactaaatttaaacataaaacaatagcacttttaaaagttgtactttaaaattggtcgttatacctgagtacttagttattcttttaaaacctttgagtggggtctgcctagaaggccatctacttaaaagtaaatgttctagcattgtgtacttaaaatgatcatctgaccttgtacgtttactggaagtatttccttaaatattccctattccaataccttagtactagaacgagccccatatttttgtcttactgcccaagcttatatgcctccgtatttaaaacttcaaccacctgttatggtccttccgagttaggtccgaggacaccaaccatgctgtcttttgtattcaggaatactcttctgaggaccatatcacccacaaagaatttccttgccctcacttgcttgttgaagtattgagccaccttttgttggtgtgccactaactttaggtttgcataggctcatttttcttcaattacgtcatgtgattctgccaggagatcatgatcggcttcttgacaataggtcaatcttctgtgggatggaggttctaactctacgggcagcatagcttcataaccataggccatagctaattgtgtttgcctagttattgttttttctgttgttcggtatgaccacaacacctctagtagttcctccggccagttccctttggcttcttcaagtcattttttcatgatgcctttgagtgtcttattaactactttgacctgaccatatgctgagggtgtatcacattggagaaactctttatgattccatgagtcatacagaaatatgtaaacaacttattgtaaacattttcgcattatctgaaacgattttgttcaggagtccgaacaaacatattatattcttcaccacaaagtccaataattttttagatgtaattgtttccaaaagttcggcttccgtccactttgtgaaataatcaactacgaccaccgcgtactgtactctgcccttacccttgggaaattatccgatcaggtctattctccaaatagcaaaaggcgaaggactttgcatgagttagttttttgggcactgcacgcggtattttcaaaaatgtcttgtatatgaacatttctttacataagcctttgaatcttccatcatggtcgcccaaaaatatccttgccttagtattttatttgataggctttgacctaatgcgttgtgaccacagaatccatcatgtactttggagaggagccgtacagcttcttcttttgttacacatctaagtaatggcatggagaaccctcttctatacattacaccttctcttatgatgtaccgtacaactttcctcatcatcttccaagcttcgtttctatcatttggaagttctccagtgttgaagtaggttggtatgggtgtcatctagttcggtgttgtgtctatcacttcgatttcttcctcctaatggatgctaggttattttaagaattgaatgggggctagattggccttatctgttattgtgctactcgcaagcttggctaaggcagcagtagttgtgttttcttctcttcgaattttcctaagggtgtaacccttgaattttgcgagtagatcttgtatcttgcttagataacccatcattttctttccctaggcctcatactctcctaaaacatgattcactactaattgcaaatcactactgacttcaatgtattcagtatgtagctccaaattggacttctccatgtagatgttgcccccaggtgtgataagggcaattcctgcaccagaaagttggtctgtagctaacccatctacatgcaatttctaggtaggtctctctttgttgttttgggtaagggcttttatactggttttgggttttcccttatgctactttcttcttttcccgtgcactcaaccataaagtcggctaaggcctgtcccttactactgtttggggttggaagattatttcgtactgacccaactctattgcccatttaagtaaccgtccagaggcatcaggtttttgcaatatttggcgcaacggttggtcggggtacacccaaacaggatgagtctggaaataaggccttgacttgcttgttgctaagattaaggagtaagtgagcttctttatcaaaggataccgtccctcaacttcaacgagtcttttgctaatatagtagactggatgttggacattgttctcttctcttattagcacgacacttataacatattctgtaatagccaagtatattcctaactcttcttcatccaggggttttgagagtactggaggctttgcaagttgtctttttataccccgatccataaagctcaggatttcgtgcccggctgttgcatctaagagctgatcaattcttggaagtggaaaacagtccttggggcatgccttgttgaggtctgtgaaatcaatacatacttgacattttttattatgcttgggtaccagtacggggttagccacccaagccgggtagaaagctttaatgatgaactttttttcacgtagtctttctacttcttctttcaatgcttgggcctactctttgtccaatagtcttcttttttgttgaacgcggtgaatgtttttgtccatgtttagggtgtgagacattatagaaggatcgataccgacgatatcctcatgcgaccaggcaaaaatgcctatgtttgttcttagaaattttattaatgctaattttatttcgagcaacaaacctttgcctatttttggtttcttggtcaggatatttaggccgatttctacctcttccaattcttctattggccccacatttgtgtttggttccccaagttggggatccatgtcttcgtcccagccttgggtgactccatattgggcaatactttttcccttgcgtgaactctagctggagctattttcctttttaaccttagtaagggcaaggttatagcattcccatgctattctttgattccctctaaggtaccctaccccattctttgttgggaacttgacgcacaaatgaaaaactgatgtgatagcttttaagtcatatagggttggtcggcctaacatgacattgaaagctgatgggacatcaattatcaagaatcatgccatcacagttatgctcctcggagcttgtccaacagtgaggggtagatagatttaccctaaaggtgcaacacttttgctagagaaaccatatacgagctgggtgcaagggattagatctttaagttggagccccttcttcccatatgttgtctttgttgggttttatgccnnnnataaaactctttacaatctgattagt

SEQ ID NO: 26663 - DNA, 2096 bp, Cannabis sativa
ttcataataataaaggcaaagcctcaaggcagttcctcccaaggattagatccaagtgttaattcacttgtgattgaaccttgtaaaccttgtgttcttactggttttacagctgcattattattttcttgtttgtggtttttatcgattaactttctggtttgtgttagttatttttctggtttaatttgatcttgttttatgttcttgaatggtgattgaatcaccacaataaataatttaacaacaacgacaaataaaagaaataaataagtaaatcaattaactatactataaatatgcattgtgcatgtatattattacttccgtaaaatcataattaatacagctcagatattaaaatattacagtacgtgtaacctgacccggccctgctatacatccttctacgtgtatgtatatatatttatggattaataagagttttattcatttatataagcttctactttccactagaaattcaaactacagtggctatacgtactcgagctaatgaacttccttgcacatacatatataaaggtaacattaattcgtgatctaaaaagacataaattatatatggtatgactttttttaacggtttatgatatgatttggaaataagtaacttttaaacttccagtacccgaaaataaatttggagagagagactagcaatctatatatatatatatataatagattatgcatgatggaatctggagagttgtgaatcaattaaggacaagtgatataataatcatcactattagaaacatagaggtgggagtgatgagagtgagagtgagagtgagcaagagggctgagcttgttatggcagggagaaggcccagaaggaggaatgggcccttttggcagcatgctctctataaaattattattcttcttttgctctctcatcatcatcttcttctccttcattattggtctgctacaattcacaattgaactcatcataatcactaatacaacaaccacacttaatttctttgcatgatagtttgcagacatgattattgctgatccaaattaactatattttgatgatatgagagtgttatacatatatttatgtacatatatatatagagagcggcttgaatatatatcaactggcgtatgtatcgggtcatatatatatgtatgtatatatttagttaaagtagcttgaatgcagaaaagctataggaactattactatttacaaaacacgtaaacctattttgcactatagggcaatagggattattattattataatggattttggtttaaaatgttaaaagttggatgagtttcaacggcaagcaacataaggtgttccatagtaagacactttcaaaagtgggattataatgattttattaataccttttcttctgaatgttagtgagaaaactatgtcgatatgttgaaccttatgcaatatatagcagccaatttggacaaaaatcaattcagtatttataaatgttttcttaacttaagctgtatgttatttttctctaccactaactctcacgtccttatcaataccttccattcttacccttttatttctacaagtaagtacatcccattatatatggattgcatatattattgatagtgatatctatatatgtgtgtacagatacaatttacaaatgggaaatggactacgagcattgaagatcccataaaatatatataatatatacatatataatttaaaaaaaaacaattaaaatacttcaaaggattacgttatgaatgatgatcatagaacctcggtctctatgaatttttttactggtttgaagcagagaccaaaacaaaaaccaatgtgttctcatacgcgcatagcaaatgactggaacaaaaaaatcgtatatgtaataactacaatattatatttaactacgtctacatctacaagaagggatagtcatctccattatgagatgagatctgttgcttctcctcaagtagtcttacataacactatatgattttttttgtttaacattgagtataatttttaacgaaagttattgttccctaaaaagaaataataagataaataaata

SEQ ID NO: 26664 - DNA, 3931 bp, Cannabis sativa
acaaagaagccaagtcaagcagttcataaatctttgtttgtgccaagcgttgtaccccgtcataattcagatgggaaagattcggccaactctacgagtgaatctattaccttttcgaggactaaacgtggtatgttacttagaccggctcatgtaagaagaccatcaaacagcagaaatgatgtggaaaagttgtcggtgtcatctactatcgaatcatcgcctgttagcaaattaatgaataaattagatggagcagcggactcgaactgtgaaacaaaaactgttatagaagatagagtggaaaaacattctgctgctattgattgtgtaaccgaaaagcttgacaaagttctatctcctccgaggacacctgctagtcaagaaaaagaaacaactcaaacaagtaagttctagttcttgttcttgtataaccactattcgcgttgtttctaccgctgattttagctgatcacgttagcctctttgatgtctcaggtaataaagccttgaattccagcaaagataagcctgtaaaatatgtcaatggaggtttgtcacttgttacctactctatccctttttctctagataccaatcagtatctgtgtactaaatataagtgctgttcccatttgacagttgcagttgttccgggaagaactcgatcccttgttgaaaggtttgaaaaaagagagaaagttaatggtaatgaagatcaagctgggggtgtagctatctgtgcagttcctgaaattgataaaacacctcctcctatgaaggtaaataattactcctctggaagaaaatctcgactataatatgtttttaagtctattcaatttcaatcaaattatatattggatgttagatcttaccatccgatcctaattaatttcagtaatccaattgatccaatcgatccaaattatatattggatcggttctatccattggatgtattttatgtatatttattggtttaatttgagtttatccaatattttagacctagtatttattggataggatcgattccatcaagtattttagatttcgtatctattggattgaattggatctatccaatctaaaaatagtaaaattttaatgttaatttttatgtatatatatatatatatattttttttatgtataacaatataatatctaattacttattcaaactaaatgaaaatattaattagttcgattagatttttggtggctccatccaacatttgatctgatccaattggatattaaaaaataacatccaatccgatccgtttacaattggatatacaatatttggcggtcggttgtaattggattggatcgatttatgcacatctttaaattgactttgatttttttttttttttgaaactcagaaatacttccatatatgtctagctatgactgctattgtttgatactttatacagttacgaaattatccagattttctgtgttgcatcaatggttttttatcctacaagtttttaagtgccgggaaatttattatttttcggttactagcagaaagaagaacctcgaattcctaccagaaatgaagaacctcatattcttacctggaatgaagagcctcaaattcctaccagggttgttgaaaaacctcaaactcctcccaccaagaatgaagaacctcaaattcataccaggatcgaaaaacctcgaactcctcccaccaagaatgaagaacctcaaattcctacaaggattgaaaaacctcgaactcctcccaccaagaatgaagagcctcaatttcctaccaggattgaaagacctcaaattcccaccagaaatttaagacctcaaattcccatcagaaatggaaaacctcaaattcccaccaccaggaatgaaaagcctccaattcccaccaggaatgaagaacttcaagttcaaattccgaccattaggaatgaaaaacctccaattccaaccgggattgaagaacctcaaattcccattaggagttttgcctctgcagatgttagggatggtactgaagaccttatgcaaactcatgatgtattcttgagcacccttcgttctcgcttgacaaaattacaggtatactgaaagccgatacaatttctattcacattgacatttgaatacttttacttttggcaaaaagaaagaaaaggaattaggcctgatgaccgaaaaatacaggtggtgcggcatttttgggaacgaaaagatattaaaggtgctattaatgccatgaggaagttaccggatcattctgtgagtatcttggaagagttcatttgtctttgcttattctgttcgatgtgattaatcaaccgacattgactttatactaatcatttacgagttgtttgattaatgagaatttgatgcaggtacaagcagatgtaatcaatgttctcatagacaaaatggatatcgttacgctagatgtgttctcttgcttgcttccggtgcttatcggtttacttgatagcaaaacagaaaggtactaatttggtgaatagatctttatgtcattccaattagaacaatctttaaaattcatgaaactcgacaggcacactacactgtcaatggagatactaattaagcttgtagcagtgttcggtccagtgataacctcagccatttcaacacctagagcagtcggtgttgatcttcatgcagagcaaaggtgcaatcttttttttactacattttggctttcggtttctttctcagcttaggcgaatgaacgaacgaacgagaagtataacttgaaattttttctcggtttagggtggaatgctgcaagcaatgttctaaccatctgcaacaagtcttgaagattcttccatcacttgtgaggttaggataacattgagactttgattatataatattggataaatactattttgaacttaataatgttctaattttttgtcgaaataaaattttataataactcaatctaatagttctaaaataagactggttacattttctacatttattcgtgttagaaattattttaagttggttatattaaaaaagaaattgttgaaaattgagctcgggtactaatttgtacaattttaaaaaatacaaggtttaaattatcatttcaaaaaaatagaaaatccgatttgtaacttttacaaaatacaagatttaaaataatattaaccctataatatttagaacaatcataaatctataatatatttaaaaagaaatattcttttcacaaaattcttcatgtacccaaaaagaaaatactttgatattgttatattaaatactatcatttcttgtcttcttatcatttttaggaagggtggtttggtgggcagaagtgctcaggaattgaatctagttcttcaagcataaccgagctgcaacagtgtctatccgaagcaaaataggtagggttggtttggccctggcatccgatgatgatgatgaccgggtgctatgaacaacgagcgggtagcgggttcagctcgagttatgttttctcaaatttcacaattttggtcctaattcctcccatatctcttattgtcgtcttcttcttcgggtattgctattacgatgatgatttttatctgagagatacaactcgggagttactgcgcgtggctaggcttaaaaaccgaatgtactagggtagggcgccatggcgaagaagaaaagtgcccggttggttggttggttcgcgcagtgcggtgcggtgagatctcctaattttgattctttgattttggagattgttaatttgtatgtaatgttcatcaatcaagtacatatttttgtaatactgtattgctcttttttaatggtatataatataatataaatatatatatgaaagaaaaattatattttcttcgaactcttgtgtgatttatttatatttttt

SEQ ID NO: 26665 - DNA, 1865 bp, Cannabis sativa
gaaccataagagggtcttcctatccctgctagaccaaggtgaagacacaaccacacacacaaaaggaaaaatacccttttcaaaccaaacactgtgtacccctcaggaggatccgtagcctcatatattccctactatatttttcaggaaaaaaagtaaaaaataaataaatatcttgcccacaaaaaaacacaagcttttttgtttgattaatcagaataaagcaatctactttaataatataacaaacagtagtctttaaataaaatcaaggctcgtttcaaaaataataaaagaataaaaaactcccagcacccgaactgttcgtagttagtaatgtatattcagagccagagaaagaaaaagccactcttttttagtttgtttatcttcttgctttattccaactcaccgacgtggcaagatcttgtcctccgatacattaaaaatgtgtaatatttaatactttgtttgtggtccacagctttaaatttccaaaaatatttgtgtatgtttttcttttatctttttatataatttttgggtttatttggtgacttattaaaaaattattttgtggggtatgcaaagaggaaccttcttttgccgaagtagaactgaaaaaataaaatcaaataaaaattagatctttttgtattgttcatattatattgttgttgtctctttctggtattggatatgtaaaaatgttgaaataataaaatattattattctcctaacaaaaataaattattattttcatacgaatacatgcatgggaaaaagtagaaaagaataaataaaataatgttaaagtacttttgttgtttcgaatggaatgttaagtaccttgttatggtgtaaataatggtctaataatcattaatgatgattagcgtagcaccaattaaaaaaaaaaacattttataatgtgtttgacttccatcattattttaatggcaatgagattgctagcatctacataagaatttagctcaattgcacttaacactaattgatgtaacataataatgtaatgagtgtaattaacatttgatctaatataatttaattataaaatttattcattaattatcagctaagaatgaatgaaataatctcaaaatagatgaatcaacagaagtttaatacaatctaaaatagaaactaatggaatgaaatagtcacattcagatttgagtttttgagatctaattaccaagagagcactgatgatttctttgaaatcccttcaaaagataaattcggaatccctgtagatgaacccacaacaagtccacttgttgattcagtacaagacaatctccattaacatgcttctcaagatttttctttaaacccgtcttcaatatttcttcaccaagaaaacaagaacgtaactagaaaaactgtgagcactaacgagactttctattactaaaagagattagtaaacattgttcataaccaatatatatacatactgctctaaaaaataaaaaggacttaaccaaaatgaccaaaatacccgaacaatattaacatataagagcactcacaacaagtgaggtataatagttaaaaggtaaaataaaatagctaagagtttaaaattaagctccatcaaatgctttaaactcttagctattatacatatttcctaactctaagaaactcttctctacatatactcaatgaatagtggagaggtaaacatattttatattttttttttctcttttttgtttctttaattaattttttattcttatttttactcaattgtgtattttttttttatttttattaataaaatatatgtgaagatataatatttaaatgatatagagaaaaatataaagaa

SEQ ID NO: 26666 - DNA, 3509 bp, Cannabis sativa
gttcaccttggagacctgctgcggatatgggtacggtctggcgggaaagttataatctctaacatagattttcaagggtttccaaaagtgcactggacaccgcaagagccgcggtgctttacggtaccggaatccctatctccggttaaaccgattccagggacttggtaccttacaaagaaaagacaactcttcccaggacttttggaaacatctccatgttagtttgcgttaccgcatttacttccgaagaagcaatctcccacgccaggttcgggaatattaacccgattccctttcgcgaaacaccacagtcaacttgataattgtatctgggactttggttagggatttctccccatcgcttaggaccgactgacccatgttcaactactgttcacatggaacccttctccacattggtcctcaagggtctcacttgagtatttgctactaccaccaagatctgtaatagtgaaagctccaggctgacttacgtcagacaccttcgacgctatcactacattcttcctactcgttaaagcttatatcatgataaataatatatatgattgccttaacggttaggtataggttcaacgcttgagcgccatccattttcagggctagttgcttcggcaggtgagttgttacacactccttagcggattccaacttccatggccaccgtcctgctgtctttagcaaccaacacctttcatgggatctcattagcgtcagcatcgggcaccttaacctaacgtttggttcatcccacagcgccagttctgcttaccaaaaatggcccactgggcaccatcatacaaagtatgttcagctttaaaagtttaacaagttgaacttcgcacccattaggagtttgagaataggttgaggccatttcggccccaagacctctaatcattcgctctaccggatgctactggtacttccattggtgccagctatcctgagggaaacttcggaagaaaccagctactagacggttcgattagtctttcgcccctaaacccggatctgacgatcgatttgcacgtcagaatcgctacagacctccaccagagtttcctctggcttcatcttgtccgggcttagttcaccatctttcgggtactaacatatatactagtgctccgcgaaaatctcggtaaagtggatatatcacgggctgatattgcggtatactcttacaagcatacatcatatcaatttctttcaattcgcctttcaagcctaaacaagactgatcagcttgcatacatgttagactccttggtccgtgtttcaagacgggtcggatagagtaccgatctactgaccacagaatcactaggttaacgtaagcttgccacttttaccaacaaaccaccaaaagccagccaatccatgagttgtttcaacaccaggtgaagaaacagacatcatcaacgaaagactagtcggattcgtcagagcagatgacaagcattgttgaccctgcataagcagagattcatctccaatgtgactgtggtaacagttgccaacactagctcacaggctaagtctaataacgcaaggaatattagtagctgtgaaaactaaatgctgattaggtgtgtgtttagtacaccttgctgttatcacttgaacaagagttttgcactctccttcacattggtcgtggtttgagcacgagagttgagaaaatgcactcctcatgcacatattgcactcctcctatcaataccaagatccaagggcaggctaaaagttaccccttaacctactgatcttggaacgctgtaaagcattcttagcactgaatagaaaaaggcaacaatacacaagagaagctgagttctcctctcagctacacttcgtggttctatccgtttctctacaagcggtttcacgtccttttgaactctctcttcaaagtactttgcaactttccctcacggtacttgtttgctatcgatattaccatcgtatttagtcttaggaggagtttacctcctaatttggattgcactctcaagcaatctgactctatccgcgactaaagccagtaatcgatattccattaaccaagatctgccaccggcctagaaccgtctctgggaagagggcccttgtcagagggacttgcagatttagttgaaataatcgtgactctagccattacgcagcaccgctttccacctttcaatggaaaacctttgcgccggactcatcccttttcactcgccgttactcagggaatctcatttgatttcttttcctccgctgaattatatgcttaaattcggcgggtaacctcacctgatctgagatcaaaaatattgattaagttgattaatgtttatttgtgttgtttgcaagcaagcaacgtaaatctactttaatgtttgcacaaattttgcctttgcattacttcttaggtctgctttaacagaatgaaatagctactatttgtacgatttatacaagtgcaagaagattcatcagttaacaggttagttgatcaccatagttatctgcaatacgactttagcgtcgtcagataggcgactaaccttagaatctcatgctagtatctattcatatatactgcttgcagagatgaaatatgcattgtacacaaaatttatcatgtgaaacaagtagatttgagattctccttactaaattgcaacgaattgcaattaagaaaaggaataaaacatcaagattcatgcatataaatatacaatcctctcaaaacaatgcatatatggtagtatgcaagtgttttgttgattattttacatctcaactctcagacagatgtgacctcggaaaagacccgaaagccgcaatgtgcgttggaagctcaagtgctcggcgtgtcctgcaattcgcaccgattatcgtagctagctacgttcttcatcgattggtaattcgagtgatccaccgcttgaagatgtatctttgccaccgtgggacttttaataagtatcctaaatctgcattgagagggtttgaaaacaattgtatgcagtttataaaaaccatagttgtctttacttagttaggcgaagaagtgtaaaacttccttctttaaaccttgccgtcagcataagctgaagacttgaacaggtaccaagtatgtagcaagacaggcttttcattataaactacaattgttttgcaaaaagaaattatggctatcgttagataaccctcactctttgttgcattggataatgaaagatggatgtatgaatgaacgaatgtaatgcaaattagaatcatgttgcaatggctaaatgtttgcaataaacattcacaattgcgactctaatgcaaatacaattcaattgcattcaccatattagcatctacaatatcactatgcagagtgtttgattgtttgaaggttgtatttctcttataataagagggtaatacgttaatgatccttccgcaggttcacctacggaaaccttgttacgacttctcct

SEQ ID NO: 26667 - DNA, 3345 bp, Cannabis sativa
cttgagggttatagacaagcaaaagatattgtattttcacttctttcagtaataaaagtgctacataattatgagtcctgatctgttttctctgtttcaaatgtttcattgttttcttcttgtgctgacatctctctagtttggggtagccttttgaaaaaggctacttatgtttacttggattattatggtttttgaaactcttgtcattcaagagaattgattggtcactggtttggacctacatcaataacaagaaatgtggggtcattcattgttcttgtcatcactaccaacctttattagtgtcggcaggcttatcactatttctaatgtttttattcaattaaactctgtttttgtttagtaagactgaaggtagtggattaagttccactacaaagttttgatattgacatttttggagtctggggtttagggggtaagaacctaataacaatacaaagtgaaaaagggatgataaaaaaaaatggccttgctttcatttctggctaatgttcattatcaaaaatttagataaaaccataaaagttcaaaaaagttaggtacttccatggactttgttacctttcttaaatgttgattatttttttaatgagttccaaccaggaaataattagggaaagtttctttgttttaatgttgttttattctattaagacatagtatttaaataggggatatattgccatgacatgagaatagtttataataatgataacgacaatcccattaaatagacattttcatgcttatttgtttcaattagtgacaaagcaaggcatggttagatagtgtgctaatttgatatttctcaatcacaaatacttaaagtactattattgcacctaatacagccatgagtttgacattagtatttgacaagacatggtaacgaccttttataaggcataaaattagtgcattcataatctgcaacatctatttttttttttctggtgaagattagctttcaatggttgatgtcttaagttttttttttttaaaaaaaaaaaacagaaacgccaaaatctaacataaaatactagaactaaagataccaacctttaacttcttctcacttaaaataaatcgtatatatttatataacccatgtccctttatgcaatatgccacacaactaatggaagccattatttgctgccattcacttaatatcatagcctccctattgtatttgtaccataaaagaaactagaggaatatgaacactaatacatatcacatgtcattttatttttattttcaattaatggacttgttttggatggttttgtaggcacgttttttcaacatgaacagagggaatctattcaagttttgcggtcatttttagaaagaataacagagaccacatgtttgatgtttcttaattactcaccatttttttactatgaattatctttatatagaaaacatcaactcatttttattttatttttcaaatttgcttttggtgaagtggtccatatgccaagtgtcaaaacagtcttttgaagtttgttttacttgtcttttgaggttgctaattaagaaattagattgttgaaccaaattacaaaatattttgtcaccctttatttctttattaaagaacaaatagcttatttttaaaaacaataaatagtgaaagtctaaactaacaaagacatacttttgattgaggtaacttttccaagtgtccaaggcttctttttggtcatttggataaaccaacataatttcttcttctttttcaaataaggtggacacccatgtgagagaatggcatgtttgttgagctgatttctgacaaaacaaactgacatggccaaattcattcttgatttcaaattcctctctgtagcagctttacaaaaattctttgcttgtcttcttggacttttttttttttttgtattcttggtaaagtaacacaaaaggtcgaatccttttactgttctctatcatttttagtcaccttctatactttcccgaagaaagagactgcacattatcttaccttcttttttaagagtacacagacataatgtcattttctttatgttgaaaataagattatgtggtgctgatttattcttaattatttacaatcttgatgaccatgtaccagcttataactcatctcttcttaattaggtcactcgtaggtgtatcttgaaagttcctatctcaataaaatatgaattgttggaacccttaactagaaaaaaattacacgagcaaatacatccctaccattacaccatacaacacattttatcaaaatttatattcgaatagataattcttcaactcactcccttgctaatttatcaccctcccttaatagctttaaaatgtggtggactgacttactaatttgtgtttgtcctcggttgtgcaaaaccttttttttttttggctatttatatatgctcttctacttctaaaagaaaattctcacttgcaataagttgggccttcttgacaattaaggccacaacacctttcatcactttttgggatcaattttataatatgaacttctaatttgtttcaatacgaaattatatatttgtattgtatcaattatacaacagtcaaaattattttaattaagatgataatgcaagaaaaacataaaagattgacatgtatcataattataaagatatgataatcctaaagcttggtccatctgaaatgtaacaatatgtacgttaatatgatgaattcgaattggaaaggaccaaaaaacaaaatcaagtgtccaattttataacatagcttccttgaaaggtagtgatgttaaacatcggccaagtagaaaggttttctctagcaaggcattttacccacaacactagaaaaaaagggtctcgcgtcattactcgtatccaactctaacgaattcgtaatacggaaatttaaacaacgtacctataattctactttaatattacatatttacaaagtttgttatctattttaaaatatttttcctttcacttgtatttttttattcagtaaacagtagaaaaacaacactcggtatttttgttaaaaaattgttaaaatccgtaatatatacaaatagatccgtatttttataaacgttttctttttggatatttatgaaaatattcatttgtaataaaagtcatagtaggccattatcgaaagttacagttatccaaaacaagcaattagtttcaaattagcccatcagcaatactaatcaaggtagcccattatttaatatcaatttcactaaacaaacaaacagtaatcaatgtacttataattcatgtctaaaataaa

SEQ ID NO: 26668 - DNA, 2016 bp, Cannabis sativa
  modified_base (1983)..(1990): a, c, t, g, unknown or other
tgaaggataattcaaatttgggtcttgagatgggcaccagcttgggcgtgattttcaaaggtgataaagagaggtcttcactgaacccagtctctttatttgaaaaatatgttggcatgatacagttaggtaatgagggtattgggccagttacattagtgggccatgttgccttggtgaataagcttaatacccatccgaatggggaagctgatattggggttacttcgtgccacgtgcttaagggccatgacacattgggttatgtgaattataacttgagaggtgggcctggatcaccgtttaattcttttgggctcaaaccttgtgcgatgcctaaggcgaacatgttggaaggttaacatttagtgggtggtcattgtgaccccaatttgggtcgtgactactctgcccaacaggaggaaaaaaaggctttggctaatttttttcaagctcaagaagactacatcaaggaacttgaagccctagggtcctcgggtaaaagtaaaaggaaatcatttggtgttgacattggtgtccaaccgacttctcaatgtaatgcgagaactaccccggtcaagaagtgggagttagaccttgaaactttctccctaggaaagagaccatttgtgtctttccgtagggttaagaaagttgtcagagattacccaagaggaattggaccggttggtgaggctccagaatctatttttcatgactttgatgtatcggaggagcctctagatagtgacgaggttgcgaagattggaggttttaagacctcaactgaactgttagaataagttgataaacggattttgctgggacagtctctagacttacggcccggaaagctagggctagactaacgaatatttctattctgcttcctaatgtgctacttattgaggatgtgggttctgtggtgggtgtgccaggtgcgaagatgacccctgtggaggaggatgtgttacctcctctacaagagccaagagtcatgaaagcccttattcggtcatgcaatcctgatttcattttcattaccgaactaatggtggatgcttcaagtctggtatgttcccttaagaaacttcacttttatcataatattattgttccggctgtgggatgtgcagggggattaattttagctttgaaagggggctttgaatttgaaagttttagtgtttctaaaagtcaaattaccggttttgtgtactctaaccctgtaaggagcccctggctgttgtgttgcgtttaaggttctccgtacttccatgaaaagaagaaattttggtctagcttgatggttaatggtgaaaattttggtggccctttgttaatcttaggcgatgtaaattttgttctgagcaactcggagtgggttgggttcaaggggagggaccaatttatccccttcatctcggagataatcaaccgtcatgcgttggttgacttggctattaaaggggatatcatgacttgggacaatcatagagacggtgctaatcacattaagttggacctggacaaagctcttgtaaataatggttggttgtgaatctttcctaagacggtggttcagtctctcaccacctgtaattccgaacatcggcccctctttattaatactgacacttttggtcttcaactccagaaggccttttcgctttgaagcttggtggacaagggaccctcgtagttccttggtggtggatcaagcttggggtctatttcccatgattaggcccctgctagagtgtttaagaaagttggtgcgacccgcctagccctgagtaactggaaccgggtgcagtttggcaagttggattcttgctctctaagtttgagggtcagttacaagttatccaaagtttgcctgttggtgacaaaaattgggctaggaaggttgaggtgagaaaagagattaataaggctttaaagcagaaattaatttagtggcaactgttgggttttatgccnnnnnnnnaactccatttcaatgtaatctatttt

SEQ ID NO: 26669 - DNA, 7716 bp, Cannabis sativa
aaatttgggttggagtaaagaaatataattattaaagctttgaacaatattgcatatgatagaatgattaaagctgtgagtgtgaaatatagtatctaaaagattatatttgtaattaccatacatttataatcttaggtgaccaaaatgccattaagtgaatttgagtcataacatttaaaaggttgtatttgttatgccagccacaaaaaacactccatccagtcacggacaactccaccaaagccacctagccacggcacagcaccaaaccactcccagtcacgtccaacacctatcccctctccatttccatctggtattctatcttctctgtaaagtgattattgctgatattgtttttgtaatgtttatgtactgatattaattggttttatgagttttgtttttgtactgaataattttgtggaattagtgttacggtttttctgaatttcttgaccaagaatggcgaaggaggatttaagggtttacaattccatgactcagctgaaggagatctttgatcctgctcaaaaaggagtaaaaagtactgaccttgaaaagcataggctttcttccatcccaaactgagttcaaagagcatcaaatatttttctctgcttagttttagtcttaaatctcattgtggtgtgaattgttaaaggtaagctcgaataacttcctgtttaggtttatatttctatttttagaatgttagttattatctgttgttgtattgaacttttctttttaactttctaggacaacgcctgttacagtcccagaacttgttaaaccttggagtgataccttgatttttgttgaaacatcctcttttcccatcactgaaattagggtctgcaggtcatgagtggttgtttggtatggaaatttcatttttccaattactttttgtttggttggcagatagatttgggttctctgttgtctgaatgattacatggtctaagaactgtgtttggttttggtattgagtgtcctatgatggataattcaggtttgggaggcgggtttttgtcaggtccaaatggggggttactagacttagagtcatcaattcatagacaccaaacaagccagttgggtcattccacattagcacacccacatcatatgaatataataggtggcattgagagtgaacaccatcccattacccttatggaagtgaaaggatcaacatcgaaaggcatttctgtgtttggaaaagggaaagcagttgccccgatgaccagtagtcatagttataacatgagtgaagaagatgaaccgagttatatggaagatgggagtggtgagaattatgatggagcaaaggggaaaaagggatctccgtggcagcgaatgaagtggactgatcatgtagttaagcttcttattgctgtggttgcttgtgtgggtgatgatggaatgattgctggtggggacgggccaaagagaaaatctggtattttacagaagaaaggtaagtggaaaacggtttctaagataatgatcaaaaaaggttgtcatgtgtctcctcaacagtgtgaagacaagtttaatgacttgaacaaaaggtacaaaaggttgaatgacattctcgggaggggaacgagttgtagagtcgtggagaaccctgctcttatggactcaatgcctcagctttcagctaaggcaaaagatgatgttaaaaagatattgagctcaaaacacttattttacaaggaaatgtgtgcttatcataatgggcaaatgatacccgattgtcacgatattgatttacaaggttgttctttacctcttaggtgctcgaaagacagtaatccatctgaggaagatgctgaggaaaatcacgatagtgaggaagatgatttggacaatgatgatgatcatcacaacgacaatgatgaggagaggatgagacatttcggtgacaggaagaggatgaatgacgatgatgcccatttctggacatcacctcaggaaacttttgaaggtgaaatgatggggtttttccaagatcccacaaaatcattatgggagcggaaggagtgggttgagaaacaaaaattgcatctccaagagcagagaatcaatttccaggctcaagcccttgaactcgagaagcagcggtttaggtggctgagatactgcagcaagaaagacagagagttggaaagactgaggttggaaaatgagagaatgagattagagaacgagcggaaagtactgcaactgaagcagaaggaactggaattagatttgaggaggccagaagcttccttagagcattcccctctcggtatcgacatagtaccagggagagatcagattgatcttggtagacatcagtagattctgagcacatcagattgatctagtttggtcgatatcgatttcttgctatagcgtaggcacactaatcttgtgtgagtttttcttcagtgaattgctatataatatgctgtttttgttgctgtaaattagaaagacacacttgactaatcatatattaataaacaagcttgaaattgtattgtttttgatattgtattagataagaatggtgggaaattttgtaaaacaataatcttcagagactaaataagactgattacataattgaagaaatccctcttacatattaattacaattaatgtggaatatatatagagagagatttgttctaatttcaggtgttgttaatgttcctctcatattggtggtagttatgtaaatatattttggaatcattaatacgatatgtctcctaatttagtattttgcaaaatttatcgattgaatcatttattttgtcaataacaattctcacattgtgtatactaaaagtgtacaaaatagattttgaatttaatttttgtcaaattaaaacttaataataacttaatatgaaggtgttatgatcattatattttattgcatttgttcgtgatagaattatgcatgattatactaaaaaaagacaaaaattaagttcagattctactattttagtaaacacacgatttaaattgtcatttaacaaaatcgatggtccattcaacaaaataaaatagtatttactcttaattgtaatatcatgtgtcactaaaaggcagtgttacaaatataaatgtctttcatacacaataaaaataaagacgacaatacaagcataagcattcatttataatttaatgcatcaataaaaggtgtccaaaaaattaaaaggtgtcccaaaatttaagaagtaatatataataaaaattagttagactactagagagataactcccacaccaaacatattatatatgtgtaattaaacaactatatttggtacattgtctaatctataggactaaattaatcaacaacatttgaagttaaaacgtgtaataattacaagaaataatataaaaccactctaattagaaatcatacattatttttatttagtggggtgtcaaatctaataaataaataaaaaaaaaagctaaccaccacacaaacacaagtcacatacaacaacaacatggatgatcatcataatatgcatgatattatctatattgatcaaaatcaagatcttatgatttgataatattaacaatgataatcaatagtgcaaaacaaaaacattgtactcaacaatggcatctccactagatggagtgaattgatgagtcctagcctgaacataacctctagcaaacctaaacatgccacttcctccaatcacaggcatctctcttaccttagaaaaaacagtgttcctaccaagaatagttatggtacttccattatattttccttcactaaaagcaaaattcatggccataataaggccaacctcttcttgtgatgctgacccataaaacccttgtgcctttcccacaatcttggagcttagctcgggcccttcggttagaggatcgtcgatcatcgccaccatcccgaaactcgttgaggagtagttggcttgaggtgggattaccatcactgagcttggcttcttaccactcactatgtcatgccaatagaagtggaattgtgtgagcttttgttgcttattgaggtttagtgtgttagggtctagggttttggcaaaacttttgttgttttgatcttctttgatgattagggctatgcttaatatgcataatgaagatatgaataagagagttaatgtgtagaattgacaattattatctgccatgggatatatatgtaggagaatattatatcaatgcacaaatgttgatgatgatatcatataaatatatgttacacttataaataatttttctttgcctttgcaatggtctatatatatagtgggaaaaattaacaatgtgcttttatttatttatttctttttttatgagattgtcaaccatcattgtagtaaccaaccaaaagaataaagagttggacaggtgggaagtagtgatcaattctcacctaatttaatttgtcacctagacaattgtaatcaatcaattaattagtaaatcaagataatcaagatgagtagtatatacataacgattgttattggatactaatagtctctagatgttattttaagattgattaactagggacactctttaaaacttattatattaaactatatgagacccgatacttaactagactaataataatattgacacatataataggtaacactattccattttagcattactataatgaatttctaaaatgcactatttttaggggaagttagttttggtgcatgaccccatatcatgtaatacttattaagagaaaataattatcaattagttttaagattaaattaatcccatactacttattacttacatgctaattaacgattgttttattagtttattgttatttctattaggccatgtgcttatggttacaattttatgtaactacttataaatcattaatacatattctctatgtaatttattaatttcatctcactcatattttgtttctctatgttttatcatggtataagaaccaaataatcatcttcttgttctctttattttttttttcttttcatcatcatttttctttatttattttgtcataaatggagcaatattgcaatattcctaaagatgcgataggggtgtgcataaattgattcaatctaataacaattgatcgctccaattagaactgactgccaaacatattagatatccaattatgatcaaatcagattgaatattatttttgaatatccaattggatcgaatcggatcgaatgttggatagagtgtccaaaaattcaacacatctaacatccaatcgaactgattagtcaagatgttactttttccagcacattttgcgttggcaaaagtttagtattgtgctggaaaaacagaatctacttttggtgttggtaaaaaggattggcaaattgatgttggtattagaacatttgctagcataaaatgaaatgcactgacaaaaatgacttttttcagcatgtaaatacgatagtaaaactttgacattttttccagcacagtttgcgagatgctggtaaaagttacttttactagcatagtagagaactgcactggcaaaagtgatatttcttgtagtaagtattttcatttaatttagatgagtaattagattttatattgttatacataaaatatatatgtatatataaaaattaacattaacattttactttttttttgtcttagattggacagatccaatctaattcaatacatactagacctaaaatattagatgaattcgatcctatctaaaaatactagatctaaaatattggataaacacaaattaaactaataaatatatatgaaatacattcaatgaatagaactgatccaatctaacatatcaattagatgttggattgaggatgattgaaattaatcggttcagataataaaatctaacatcgaatatataattggatcgaatctagataggcctaaaaatattggatgtgatccaatgaacacccctaaattatgcgagtactcaaatttcttaaaagtattgttatctatgttttcagataggcaatgtgtgacctctcacaaaggcctaataggcatcatgtcctcaacgggcctaagaaaattaagatggtagtttttcttgattataagggcgaatctggataggggttgttcagattaagtccaacactctgaatctatggcaccagatacgacaaatgtacacttttcaaaagatcaatcagactaactagaatctcaaattagacggaagtgccctcaggggtcatttggaaatggaagctggaaaggtacttgagactgtctatggtcccgggaactgcttatgtgtcacatctctgacacaatcttgaaaattctggggacttgccccctttaccaacctttggaaaggcatacgacaaaaatgagattacctttttgagcatcgcacctcacttctgatattccctttccaaacaacgactcacgaccttgcttgttactgtcaacagtactcttatctatacgactgaatgctttcaagaatcgagcctcacctactcggcccaataagtcaaataatgctcaaatatgtataccaccctattagctagtgggctattttctacaccccaaaaccctagttaggcccaaattcgttcgacccatctatcatgattatctataaataagtcattatctcctccatacaaagggttcacaaccttgagaaatcacaaaaaagtactagctagagctgtaaaaactccattactaaaaacttataaaattatctcatggactaagactcattaatgtatgaaccacattaaacccgtgtgttatttttctttctaatttcttttcttttctttagcttaaatctcttaaaatttcattcaaaaaaaaaaaaaaaaaacctcttaaaatatttattagtttttaaaaatttcgataaacaaatataattcacataaaatttatatttatttaataaaacttatagcaaatttattaattggattaaatgaggagtttcattatattatatataaattgaattgaatgagcaccttacatacaactgacaaatatgcttcaaatccgattcacacattgagcatagagttatcaaaggcacttaatttagactaatatatacatgatgtgtagttggatgatttgtgttatttatgtctattttgtatttatttttatcttatttgtgagtagtaattttatcaactttggtgtttatttttgttggaaatagattaaatatggtccatatatatacatgaaaatgatcttgtggatgtaagaattcaaaatgctcactttggttaagtagaaagactccataatggacttcacatcatttctttgagttggatggttggtggcttataagtgatatatgaggtgacctttttttttaggatatatgacaactgattttcattaatccacatcatatttgggtctccggcccatacgtgcatctccaaaaaattaggagaagttgaaaaatatccatttttttatatattaattaaatttatctctaaatgaaatttaattcagatttatattgtacccaaattattctcacacacttacataactaaaacataatttcaaacacaatagatttgtgttcttttaggggtgttcataaaataa

SEQ ID NO: 26670 - DNA, 2167 bp, Cannabis sativa
tggttaatttttttaataagaaaatggtgtcagagttttgagtgacaacctaaagtttgagaaaaaggtttttgaattccaaactgacatgtaaagatgctatatctttgttatggagatactgtcacaatcctattcgatagtactgatagtttatacattgaactggagattcttttgtgtgccatatttgtatagtttgtaacagtgttttttgtttgcagatactcagttgagaaaattcctctgtatgattctgccgaggatgagccttcgtctaagctttataactttgcaaattctgaatataatgtggatggtgctaatgcggcatctgagcaccagttcttgtcaacttctcttgttgttcagtcccttgattcagtgccaatggaggggatggatatcgatgaatttaaaactgatgaagcgaatgcagagagtaaactatactcccaagatgctcaacacacaccttcacaaaaacatgcagcgacatctcacagtacaagtaatagcacaactcgaaagtatcaggttggaccaaagtctatggcaaagaaaaagtcaaagcggtatgctaatgggaagttgaaaaaagcagcacagaaggaagtagatatgaagttggttgctttacttttgccaactaaggaagcacaagaggaagtattgaaattcgaggtattcgtaaattttcactactttcttattattaattcaatctaaggctaagttatgctggaagtttattttttatgtcagagtacttgagtttcttatttggttgacaggaagtgaaaaattgtgctacctcccatcttaaaactttatacgatgagatacgacctgccatcgaagaacatgaaagggaccaccaagaaagtgtagctaccactgtagctgagaagtggatagaagcttcctgcatgaaatcgagggcagactttgaccttcatttttcagtggtaaaacatttcgtgaccacgcctcaaaaagccaatggcgaagcaaaaccaaccgaggctgatgatcagggcgaaacaaagtacttgacaaattgatgaacaggtactcatattgctctgtaatataacacttcgatagcaatttttttatgacacacattaacatagtgatctttaactgcttgtcgggaattctttctctcggatagtcaactatgcaattcaccatgcacatcaacaataaatggagttcgacgagaaaatctacttgtgacaagagtccaagtatgttcgggcatgactgaagcgaaagctcttctcattcatgtatcttctagtttggaattcttaccaaaacaatttggatcatgagtgacaaccctaatttgggatgtatgcttaatttgatgagcatctaatttttcatgtccaactcctaggaaataaaataccatttgttaaaacaaagggcatatatgtatgtgcttctatgccttggaaaaattatgtagtatttttcatttcttctttgccttcttaactttttctttattagaaagcatttcatggaatggaacaaacatgatctagaataggttagtggtgtatggaaaggtcaaagaagagatagaccaaggttgataatattggagaaattcttttagattgatgtaacaaatatttgtttaaagatatacaaaattcatattgaaataaaaacaaaaaaaatacaaaaatactcaataaacatgatatatggaattaaaaataaggtaaactaatgtgtgtatataatatattcatatatattctcctgacctagtgtatatttttgtataaaaaaatgtaagagatattctgtgtttttgtagatatatttatcttatatggatagtaatgtctgcatttgatttttctttcgacataaataattgaacatttttggtttaaataatttttttctaacataatttttttttattaggaagtcttaaattgataaaatgtaaaaatttaatatcataaataatttgcatgaattactcaattaattgttaattaatattgaaattgaacatcatacatcttaccaacaaactgttgggttttatgccctaaataaaacttatttcactataatcagatttactaattaataaaagatatgttgcatgggtcacatgatttatttcatgatt

SEQ ID NO: 26671 - DNA, 1764 bp, Cannabis sativa
  modified_base (1702)..(1713): a, c, t, g, unknown or other
ttttcgtcaactgacaaggttgagttgtgatcatttggaatatttcctctgcatctcttaagagtttgccttagtgaaaagccttcactctgccttttgaactgcacatttgggtttgaattttcctttccaatggtaacagtggctggtgcaataatagaattaaaatggttggtgacagggatagccaatgtttgattagaatgggaaataatggctggaggtgggggagggtatgtggcgtaaatgttggagaccaatggagaagatgaaatgggcatataaatggatgtgagatcagtgtagttggtaggagaatcttgaggaagtgaagcagcaggccctttcattttggtatttcccacatgatgagaatgagacatggcagaatcatgagtagcagaaggttgaaaaataaccgaaggtggctaggataaaactgacttggatactgaaggatttggcatagtgttatgtggaacattagtagtaggattttctaagtcattgatatgagaggactcgccagcaaataatcttcgaggttgtggtggaccacggagatgcaattgaggaatcgccgaagatagacttttcttagcaagtctagttaacaatggccaaacatcacccttggcaaaatcggttctataccgatcgtaggaagaggtaggcaaagcagatccctttatgaaggactggtattcaagggcaggctcttcaccattatcaagtttttcaagaaaaacagagcatttgttgtaaggatgtccaataatcccacattccatacaatattcaggaagcctctcatagcggaagtcgatccaaaacttgtctttaacatggcttaaagagatcattctccctctctttagtggcttagaaacatccatgagaacccgaatacgcagaaaaggaccccaaccttcgtttaaagaatcctcaaaaacatcttcatattgtccaataatgttgccaagagcaattgctaaagacttggtcttgcttagaaatggtagacgataaacttgcacccaaaagggagtaaatttaagatcatccgactgaaagtttttcccaatctctggtgtgtaaagaacaatatgatggttctgaaaatgataaggttcacgatccaggactcgtaccttgtctccttcacaaccgaaagtgagcatgaacatgtccgaagcttctgaaattttaacaggaaatctcccatcccaatgttcggccatttgattctgcagagtggaaagccagaccttcttcttagtaagaattcgtgcatacaagacagtatcaacactagcctgtggtgaaaaagcttctgtgtcatggaattcaaatacagcctcttcatcttcagtgagattaatcttagctttcattttgtgtattagaggatccataagaaaaatataacccagaaagaggaagatactgctagccaaatataatggtggataaaccagttcgtaaaagaaagaagaagaggaaattaactgcaagaaaagaggaaagaaattgcacaaatctggaaaaaaagcttgaataaaacggttaaccccaaaggggacataaaactgcctcagagcacaaaacgtgggcagactctccgaaaacaattcctaacatgaacatatactgaaaatgtaaaaaaaattttcataacacttttagatcggattattattannnnnnnnnnnnacaaaaaattagttcagggtcttatttgtactattttagaaaatatagtgt

SEQ ID NO: 26672 - DNA, 1861 bp, Cannabis sativa
tttactaaattaaagaagaagaagaagatgataaaagataagtgaaattactattctgaagccattgttggagattgcagaaaatgttttaatcttccaagaatacactatttcttaaagtattttctctgatggggaaggagagaataaagaaaacccttgtgtttcttggggaccactacctatttatagattcatcttagaatgagttttgggtatttataatttggcccctcaaaaaattataaattaacttatggtatctacacattatttgtaatgaccagttaagtttaatatgtgtgattattaaataattagagtttaattattaattgaattattaatcatgatctatacatttgtggagatttatttaattcagaatgtagtagttatgctatacgtgtgaatttattatttttcgtgttttagccgatagtagtggaacgcaatgttgggccgttagaaagtcacattctgtatggtttagaatattttagcaggatttccattgttaggcattggaagtagcgagaattgttggagtttggaaatgaccaaactacccttggttgtcacttaacctttgaattttggctaggggcaaaatagtcattttactaggggagacttttgtccttttatgaagttaagtgttatgttataatctgagttctttcttatttaaaaaaaaaagagtaaatatatgactttttatgaaaagtctagaaacccattttctctctctctctcgaattctcttgggaaccagctagggcttggaattttccaactttttttgtgagattctagcaggttttgaacaccctaattcaaggtaaatccatttagcttcttcctttgtgatttttttaagctcaagttaagtctaaatgtataaattttagttttaggttgttgtttattttggtattctggggttttttttagggttgtttaagttaatttgagctggaattattggttgtggcaatgtttgagcaaagttagggtttaagaactcaaaccttgctctctaatggtgatttggatttctgagatttttattgtgttctattgcttgttttgggtttgttggagtatatgcaggtgttctggaaagtattaagaagtttggggttgatttagggtgtagggtgtgtttttgggttatctagcactaaaccggtcgaccggttgagggagacctataggaaccggtcgaccggttggtcccaagtaaatcccactaaatcgaaattctagttggggaaccagtctaccatttgggacaattttagaaaccctagttttttctattgttgtgatgtttaaggtattgtcatgtgatttgtcgataggattaattctaatttttgattttatgcgcccgggaagtgttttagagtagttacagtgttaccaacacgagtaccaagggtacaaagttcatgtggtacaacatttagtaactcccacaagtacaataaagaccctaccaacacgaatgcacagtcggtactctagtgcatatggtaccgtggtcgtacttccatagtgaacggtcttaaccatttagtgagtctagcctttgggctcatgacggcttaagaaaaaagctggtattccattatctatatatgttttatgtgtatcttactgagtttgtcgactcatcagtttgctacctttgtataggtaagggtaaagctaagctgagcttgttggcaaggatcaaggattgtactacatatcgcgacagtgcaacctggagggttttgatcttattacatttcgggtttctttttgtggttgccatgtagtttgtgaaaaacatattatgtaacttcatatataa

SEQ ID NO: 26673 - DNA, 3107 bp, Cannabis sativa
atattctagtttatctaatgtgttttaaaaaattcaaacttattttcaacacagtaaataattaaaaaaaaattaaaaaaattacaaggatgatattaaaaaagaattcgacaagcaattttaaacacaaaaattaattaataaattataataaaaaattaacaataccatacataattaatttaagatatattttttattttatagatggggtgacaaaaatctaaaaatgtgtttttaggtagggagcatatcaaagggattgtcctttagtgatggtggagttaggttaggtagccccatagcttcatgagctggcctaactattaaaaactcttatcaaaaaccatttatattaacttatctaatccattttgtctcaccttttattgatcccaaaattgctagaatatataacatggttttaatcacttttattttatgtttttcatttaaactattaaaaatactttcacattagtcattaaatccctagttaatattatatgagtgtttattgtatgttttcctacatgaaaattcaatcattagaaaagattaacatgaaagtgctagtagtaagtagtaactaacctatgtagacattatttattgggatagagattaatgaatcaataatacctaaccattgacattttagttaattgttagaattaacaagtgaatgagataacactaaaaagaaaaagtcctcttgatttgagtcatgttttatttgtttgctttttatttagagaataataattatacattattaattaagcaccatattcatcaccattttaaggtgttctatataaatagtaaataattttttataataattattaaattagaatatataagatttgacattcaattataccaataatgacataacacaaagttgactgtgggactaattgagccttatgtagcaacaaaattattggcctatttaaaaaaaaatgtggtatttttaacatttactaaaaatatatgtatattttaatttttttagccttagacttgtgtctaacctaccttagcccatgcccgacacacctcaagtgctacacactatgagtacggtaccacttagcattatttacttagttataaaaagtgtttattaatttttgtttttgatgctattcggtggtctcttgaaataaaaaaacgattggggatgggaaaatgacgggtcccacctaatccatcttttgttgttgtgaatatttatgagtattgttattggatatcagtggtgtctaacaccttctataagtggtgctccataattaattagcgatattttctaaaagctattttcttaagttatatgagaccttatacttaattactctaatagtggtatgacacagagaagagtactagacaccaataatattttttagcaattctcatttttttatagtgttgtctctgagttggttatgtaaattttattggaattttgtcgtttatttttatataaaagaattacatgtaaattgatttattatataattatagattatatgtttatggtgtattgcatcattgtattggtgtgtctttattgtctttatttaggaaatatccttatggaatttataattattactttcacatacttttagatctatatgaatttagttctatttcaaacatttaataaaaattcatttatctaataataaccatactagggagtagattttactcagtgaggttatgcatttcataatctatataattattagatcaagattaagttgatttaaccgttaaaaattaatgtacatcaaaccgagcatagaatacattttaccttaactaatacataacagaacattctgctttttttttttttttttgtataaaaaaaaaagaataagattcataataatgtaatgttcacccaaatcaagcttccttaaaatgaatattagtctctaagagctaaccccatagtgtatgttggaatgaagctaagagccaaaaggtcctcttaatgtccccactatcaattaatgcattacattacattatattgcacttaaatggtccttctctactctcttatcttttttatagtacctacactacacttctaaatacactactttttaacaataactttcactccacactttcatgtttaacccaaaaatataaatattattatacacatgtgtatatctctatataaaatgtggttatatgcacttaaatattacatataattaataacataaataatgaattttaacttacataaaatgaataaagttaatttaagaaattgacacaccaatgtgttcaatattaaggcacatataatgcttttggggtcaatttataatgcttttcttaaataaggcacatagttattttcataactatcttttattataatgttttaaattatcaacaataaaacaaaaattaaaactactatttttacttaaccacataaatttaaaacacaactatagtactatactttggatttaaatttttacaacatttgtaaaggactaattattaataatatgattattaaataattacttaaaaatcctaaaatgtaaatctttgttttgtgataattcttagtcaaaaaagtcaactagtttattttgattttcctttatttttctttatagaaaaaaaaattaaaaattaaaaaatccaattaggatgagttaaaacatgtcctataattatctttatttcttgtccaaatcatacatttttgtgatgagactctttttgattcgttgaccacctatacctacctttgacttgtgtgaagtgttctaatcttaagaaaaaaaaagctcaagtctcaacacactagtccaccaaaaaagcatataatcttattatcttattatcccattaacaaaaattaaactaaagacaattacataattagccttttcaaatgggattcgtaatttgccgtacacgccatgttagctaataataataaaaataaaaatatttattccccatattagagtagagaaaaaaatataaacacttacaaatataactaaaatattttatcgaattttttaattttaaattattcatgt

SEQ ID NO: 26674 - DNA, 1837 bp, Cannabis sativa
tggaggcttgaagcggggacgttacaagcagatggagaggtatacaatccattgttagtgttataaaccactggtttactgaaatctcttgtgtaaaaagctttctttaactctgtttcttgctcataaaatcttctaacaccatctttcatttctttcataacactttatgaaatactatgattgacaatttggaagaaccctccattctctgaggcttctcttactctatcaacgatctctcttcgcctaactcgatctccatcaagaccttcaaggtctataattggaatactaaattgggcatctcttagaacaggaatatcatcatgttttgatttgtggaagaaacgaggaatttgagtaattccagcatcaacaaggcctttcactccaattttggactcatcaaaagctttaacctcacttgctctatcatattcagagtttggagagacttcatctgagtttgtcttcaccattctgaatattttatctcaaaaccccaaacttgatatcaacttttataggtaaaaatttatcatatttttaaaagtgacaaattggaatattttatgattgattttccagctgtacttgcatggtagactcctataattacgtataagccatatacaaatcaatcaatcaattacatgtttccggatatatttatatatgagcatcgctattaggcaccagtagtgtttagcatgtcgcgttgcaattggctaccaatgctccctaaagttattatattaaattatatgggacccgatatacttagttgaaccaataatgattttgacacatagaaaagtgctaagcaccactgataccttttagcatttctctttatatataagagcaactccaccataactactccatccacacatcaaatataatatatgtagttctttcaaatatatatatatctttatatattaaaagtgcctatctaacgggaattcttggtttaacgattctttttttttatttagccttaacgattaacttaacagactgttaacattaaacgttaacaaataaataaacccaataattaaacccaaaaattaaacaattttttttttaaattaaaaaaaatatcttacccacatatctctccaacaaattctacaattaaactaacataggatacgtgtataaaaattaaagtttaaacattggattgacgaagtcttttatgttaactttatgtatttttttactattatattttgtattcacagttttatcagacgagaataagaggttcatgtacgacgtcggagtctacgatagcgatgatgacgaaagtgtaagtacaaaagaatcaagtctgtaatctcattggttcaagacatgttgacttttcgctttccttctgacctttctcagccttagcaaaccaaaccagagcttgctctgtaaggttataatggaccatgccctactcaattattactccctattccatgaaccatttatttttcctttttatattaagtgggcgtctttaaaatattctcaaaaccagtttttatgaattaatgatgatgattatggtatggtactgattgtaatttttaactggttgatgcagggtatgggtgattttttgagcgagatggctgtaatgatgagtcaaacaaagcctaatgtgagttaccaaacacttttttttattatttatttatttatttatacatttgtctatgcatataaataaataaaaaaaaaattggtacattttccagtgtttgtaatatctccaaaattgaatcttggttctgctaatgtttttggagctggatcaaattaaggaagaatt

SEQ ID NO: 26675 - DNA, 1624 bp, Cannabis sativa
aatggaaaataaacattaagtaaaaaaattaatttaatatgatcacttaaggatcttagctttgaagaatatcaaaatatttgttatatggacttgatgtattttaagaaacttgattttcttgggatgattaatattgttggtgatatcttttttgcgtaatccttgtttgctcattttaaaaatagtcgcgtatattaggatcaattatagaatctaaatctttcaataaaattttgttctctttctaatattcttttaaagccaatctttgcttttgaatttcataattttgttctctagtggagttgctccaactaaatatttcaatgagctgttgattttcttttttaatagttttgacaatagtagaaaattgttcatcgtttttcctttttgattttgctttcttcaccccaataggtcgtttagatgaactacctccatcatcattatgtctactgaaaattatgaaagtccgtgagatgcagtttggggagactcggactccactgggtcaaaatttttgtagcattaatattatctgtaaattttccatatccttaagtatatcccacacatgattaaatttgaaacctttcttgtaatttttatcttgagctagtagaatcttgactcgattcaactacaaaaatcataaaatataacattaaaaataattaaaaatataacattaataataatttaaatgttacaaatacttacgatatcttattgagatgcaccacttgaatttaattcttcaatttgttttatgcatcttttgaatttagaaatcgctttaaagatcaataatattcgaacatgcaacaatcttttgtttctatcctgggtgacatacgtagttttagaattattgaaatcattcgcgactcgagaccaaaatagatcaactggattggtttttacctatttgaggatttttagaaatatcaacataaatatgacatagatacatatcattctcatttgtgtataaaaaacttctttgagtataatgagtagcaattattttgtgagagaacgtaaaagaaataaattatagcctgaattgaaaatgtgtagaagaaaaatgatgcggcaaggatgtaagtgacactgagatacaacatggaatttatagagttaattatatgttcacataatgactttgtcatcacattcaaaacaaaataatcctcatgtaacgccctaatgctaaggcacgttacagtgatttttcaattacattgctatctttgctaatcaaagaacttactcgaaaatcgtgtcaaattaaaacttttatattaaatattaaactttataactttataaaatcatttacaattaccgggatcctgtttttaaacttttatacaaaatattcaaaatacaatatcctggtcgcacaacgactataaaataacaaccccggatatcccgagactgaactctcaaggtcacagatagggatgcacatggggacggggcaatgcggggaatgcgttccctgctctcgtacccacctattatatttttccccgtccccgccccgtccccgcatattccccatcggggaacggggcagggaatccctgtcggtaatggacaccataacggg

SEQ ID NO: 26676 - DNA, 1931 bp, Cannabis sativa
  modified_base (1732)..(1737): a, c, t, g, unknown or other
ccccgaagcgatcaactaatcatcggcaaggcaaatctccataacctgaaggcggcgagagcatctacgcattttgtattgattgtgtgtgtaaagaaacgacttggcttaagcttgttgtttcaacagacggcgccaaactattgatggtgagaactcgtcaactaacttgttggtcggaaaatcaaactatgcttcaagttcagatctaagacgaaaagaaagatgaaacatgaattcaaattgttatcttaaaattgagagaatatgataaactttctattgctctcaaggtcaagttacaagaataattttccaaccccctctcacatcttaattagaaagtggtatttacagactctaatgacacgaggtacacggtggtcccaagggaataaggtgtcgctttcaagctgcacgtcgcaggtgcaggaagtggccttacacctcgtacttttttctggtgccaagtggtccccggttgcaggagtttggtctccggttgtaggagtgtcatccccaatttgcaggagtgagttgcagagtacctttggtcgggtcctcagaccttggaggtgtgttgtctccgctactcgtacctttgctttcagagtttgtagaatgtgtggttatacgcctctctgttgcacattttgtcatttgattcctcctccaatatcattcttgtccatatgtactcaaatttcacattttgtcctctcacttaaatagcatattcagcacttcataacactttcacgctaacgggcttgcatgcacacacatgcacgcacgtgcttgcaagtatgctcatgcatggacgcacacagaagcattcatgcatgctcgcattcgatttttctcattttaaaatgtcccttcctcggaaatcatatatatctttccacatctattttgttatatcatatattatatttgtggtactttttgtttagtaatatcatgctgagtgaaattattattatttcatatcatatcaagaagattcatcgattgaaagaaggtatacattaacagaaagtagtaatatatatcacattatattcttattagaaagcttattaattagtaatgtttcagtatatttttctttattattcagtatcttgagcttgtgatcatgcaatgagtgtcagacgtagggatgtcttaaaaaaaagtacgtaaaggaagttaataatccttgacaacttaattacatactacaaaaggcacgtggacgtgctccacaagattttattgtctcacagtgggtaggtgaagaaaattaaaccactcattgatcttttgtccaacagtttttggtttatttatttttatttaattttttaacaacattttcgacatatgtattattatgtactctttataactaagaaatctctatctaaaaatacatttgggaccaaataaattatattctaattgagaaattataactaatagagttacactagaaaaaaaaattaaaataccaaaaaatattaatgtaacaataagaactataaacaatcattaatactatatcataatagaattattttaaagtaaatataatatttatacatgcattatagtttggaataaaattattaattttatataaataaatttacaaaatatatgtatatattttattacgatgtaattattcctatatagaggtatactttgttaatgagttcctatatagaggaatactttgttaatnnnnnncttagaaaatgtataactaattagaatttagaggttattcttatttataattggcccaaattgggacttgatttttttataacaaattaaaggttattcttggatggagtattcttttttttttgatgaaacacaaaactttattaaaaaaccaaaaggcttaacagcccaagttcatagtggcaacaaagggt

SEQ ID NO: 26677 - DNA, 3665 bp, Cannabis sativa
tttaaatttgttgtatactgtgttgttcgatattggccccccaactatttagttctggctccgcccctgtttataccattttcaaattataaactacgtactcgataattattatggagacacagaaagaggtataccattgctacgacacaatgtacatgttcccatactcatttgacagttgacacacattatttcttcttcttcttcttctttttttctgaaaggtgacaaacattatttctagttaattaagaattaaaacaatgaaatgttgattgttcaacaaaaaaaataaaagaattaatttaagcaaaataatttgttgcatgcataagtgatttcctaatataaattcgaaggtggggtagttagatgaaaatagttatataatatgctagttttatacaattttggtgttattaataacagctacgtcactcactaactacatacattaatatagatataaagaaatcattcaactaatgatagctatagggagctttatacaacctttatacaaccttcatgtgcatttttctgaatatgtacatatactaggatttcaaatgttatatatagcagccccttgtggaatatatatataaatatatatcatcaacaactaataagtactgatttttaaattctcaaacagttggattctgtatttgtttaatgcttaggtacatacatttacaactactatagactcaacattgacccacgacaattccaattcttttatatattattatttcaattcaatttaaaaatatagtagattaaataattataatgactcctgggtcatatatctggaggctttcatgatttggtgccctcacaaactagtacaaatagctccatattactctccacaatcatatcatcgattctaatcttaatctgtcctctaatttctacataaatatacttcatatatcacatcactaataatcatttgaaaaatgagctactcttcccaatctccaccaccaccaagcccctcatcacaaccacctcaatatggttatcaaaaaccacccccaccaccacaaaaagatacttattctcctccaaaaccttcatatccaccaaagtcatcacctcctaataatgcctcaccaccaaataattatgcaaacccacctaaaccaagcaagactactccaccggttcagccaccaaaacctcattatccctctaagccagaaaagaactctccttcggctcaaccacccaagccctattcaaaacctccccctaaaacgccttaccccggctcaccgatggcccagccacccaccttccatggctacgcgccaactccaccaacttttgggtcgccttcacctaccattagtggcgtcccgccttcctctgccatctctaccccgccttcgggaggcaaccacacaactgttatagcagtatgcgtgtcccttggcggtgctttcttcttggcatttatcttggttggcctcatctgccttgctaagaagaagaaaaagccggttatgattccggctgcagctgcctgtgcatcatcatcagattctgatgtagaaagtggtcatggaagtggaactgctcgtcatggtgctgttgcgggagctgcagaccggtcatctagccatggttcagggcatcaacgaagtagttactaaggggttgttaagtcattaattgtggaaggcatgcatgcattgattatttgttttataatttgttaaattttttacgtacgtgtgtttaatttggttgaatttttcgttggttgggttggttgataataatgatttttcttggttaattacttactttgaattatatattatatgtgattctttaaattttcttaataaaaattgttgagtttacatatgtgaattgtcatttgtctattttcactactagagaaaaggaacaagcggtttataactaaagaagttgagattagcattcagtaaatgctactttgtagctattatcaaggcttaatataatagagttttgataatggataaatactattttgttgtgattgaacctgtataatacagaaaagagaggattgaatattgttgaattgacacaattaattatctcaatagtgtttgctgaagactaatgataattaaagagatgatatgcatcaatttaagatggatgctactacttttgaaaaggtacataatcacacaatcatatcagttagaacttgacactcttttgtgtaaaaattgcattctacaaatattactttcaaacttaacactcttttgtgcattggtgaaactttctcaatctttggattataatatgtgctatatatctatactatgctatatatgaaattgaaaattattgtaatccaatagaaatatcaaactaacaagattacaactctatgacaaataatacaaagaacgaaaatcatagattaaataatgttataacactaaacaaaatatacacataaaatagataatatagagatgaagagaagaattacaactcaaagcaataagttacacataaaatataatatataaatagcataaatatatatataagagatgtgagaacaatcttaatacaccacaagtgtataatagaagaaccactaaacttgaacaaggtcttacacctttgtccaaaagtttatttcctctaccacaagcacttaggaaaaagagaacttaggaaaaagagaagaatggaaacagttttctagttttctggagttataaagcctaaagtgtttctagtaatgtattcttttggcagaaacttgttgtcacccaaagtgaactcaaagacttttatttataatattttgaggatcgcatataaaaattaaaattccttcactacatggctattaccaacactttaattagtgtttattaggacaaaaacattggacaagagagttggaaacgtgctcaataaattcatgtatatatatggacgttattttaaaattagctccagatgaaggagaacaactataaaacaacacattatcaaccataaaacaattctttccagataactcaatattgagtttttgtaactcctctccgagctgaatctttctccaatattccaacacctatttaaatgatataaatgagtattgtaacagtttctaacagttagaaacttatcccattgattttataacttttatatgtaataactcacttaattacatataatcatatgtgatccttaggttaaaaaattattttcagattttgtaactactcttatgctaccaatcatgtgtattattaaacaatatattatataatttaatcactaaatacattaatcccatattaatatataatatataacatttaaatattttaatctatattatattatagcaaataatattacatttctcctctagattaaaatttgtgatacactattgcaacattattcaatcaattaaacatcacatatatctcccactttgattaaataaatcaaaaactttttagaaatcttgcttagatgcattatcacgatccgaattctaggcagtggcagatatgtaatattcataactcgggtggtcaaatgtcacactttgatccttgaggaagataatacttatatatgatcctttaatttatattaca

SEQ ID NO: 26678 - DNA, 2100 bp, Cannabis sativa
aacaaacaaaagattaaatattctaaattattttataaattttaatttaaataatttactatatattgagattaggattcaaattatttgttttgatatttatatgtgtgcgtacggcttgaaatatattgtaatgctgaattttaaattattcaaaaaaaaaatgaaaattcattagtgtaatatatcgttacaagtttttaaacattgaacacaccctatatatattatatttatataaatatataagcataataatatatatttcttttcattaatttactcatttctatcgatctaaaggaacatataaaatgcattatatctctgtggtagtgtttgtatatgttaaattaattcgtaagcattacttcatgtattataattatattataggtaattccaaagtgcaacaaatatgtgaattaattatatagtataatttttatatatatttataaaataaatataaagatgtatatatatatatatatattgctggtaccatcattttgctgccttcatgatcaataccatcactaactcaattccttggtacactatcatatttgttgtcactttccaatgcatgtttcctattatttcgaatcattttcctctggccaatcaaaataattatcaatatattataaagcacagtattattatatacatgtatgtattagtgttgatctctcgaaccacacatgaaatttatagaggttggtcggatctttcagtttaattgggcgaattggacctattttcaattaacagattggacggtttataattttttcgggttattttagtttgtaatttttatcgattttattagtttagtttgggcgagttattcgatttggatggtttataattttttttttgtacaaccctaacttttaggtttcccatagtttgtacaagtccagagcatcaaaaatctgataaaggaccgggatgagatgaattacactaaaaaaatattttttgaccatttgtggccacgacgagttggcttatgtccgtggccagaatttggcagaatgcatgaattgaagattggttcggtggccgcggcgagggtatttatggccgcaaccaattcttcaccgccgcggcaagaggacttatggccgcagcaaaagttgggtagagaagggacaaccttatggcggtgatctcgccgtgccgaggcttttggtggctgcagcaagagagtttgtatgactcgagggaaactttgtatatttgtaatattttgagtgtaaactgattctatttaaggaaactttgagttaaaaagtggggactgagaaaattaaccctaaaagcagaaaaaggacgacaactagagcgagagtggcaacccagatctattccacaatcagtttctttcttctccttttatttcttttatgttaattgttctttttagttttattatagatatgaacatgaatatcatgaactaaattctcaatttaggaatatgatgaatcttagttgatgtttccttgatttagttaatttgattgttagtttttcttttttggattgtgtgatttgttcttatttgctttaactacatgttttagactagccatctttattgtgataaacatcatacatcatactcacatatttaattcccaagcaataaatcacgctatccaatataaacaatcattaataacaaatatttgtctaataagacaaactaatgatgttacttaataaagtaaccattactcgttgttgcctaatgcgacaacatttatacagttgcctaatgagacaaccaatgtcactatcattttctaatgagacaaccgacaagtaagaaacctaacaacgtgtaacaccctactaatttaggcgtgttaacgtgattttaaattaattatgcagctggttgctaatcaacgtgtttattaaaaatcgtaaaaaattaaaactttctttaattacttaaaaatactaaaataatagtatatataaccgagatcccgttacaaaatatttacaaatgtttcatagtgcataatacaaaagttgtcgcctggcgattaaataaaatacatctagctatcccaaaga

SEQ ID NO: 26679 - DNA, 3046 bp, Cannabis sativa
cacttctccaaaaattactgctccactcctaaagtaatcaccatcccagatttagactttcaagcattaatgcaaatctagaagtctaagtcaacgtagcctaaaaggttttgaaaatatcgtcgttatagactaacatttaggtcttccttaatcttaagatttacttgattgtatccaaatgctcctatcttggatcaaactgataactactcataactcccactcaacatcaagtgtatggtctaatgcatgctagagcatatatgagacctctcattgttgacgcttaagcgattcttttcttatcctttatcttttctagaatagttgaaacttttccttagataaatgaactctatgtctaggagccaaaaaattccctaccccacaggtgtgggattagtgcgaggagtccaatcagactcaaaggaatgttataacatagcgttgaaactaacagaaaagaaaaaatgagtaaatgttacatatttactggaagctccccctcctcgacatgaagttttcaaaattgaggagatcccgcatgttgaaaaacccaacttagatcccagaatcctcggctataccaatgctgtgtaggctacagaagaaacaatcgaggtacctattaattcttttgataatactaaagtttttaaaatctgttccaaactaactttttagtagcaagagaagcttgtcacttttatcaaacagaacttagatgttttcacatggaaacattcatacatggtcaaaatattgccagaggtcatgtgtcaccggttgaacattgatcatgaagtgcgaggagtacgccaaaagtgacgcaaaatggacccctgaggtaccaagcgctcaaagaagaggtagaccgtcttttggcatggggcttcataagggaatcgtcttacccaaactattagcaaaccctgttcttgtaccaaagcccaatggcttatggcgcaaatgcgttgactttacagatttaaataaagcatgtcccaaggaaagctttcctttaccaagcattgaccaacttgttgatgctagcgtaggtcatgaacttcttagtttcatggatgcatactcaagatacaatcaaattccgatgtacgagcctgatcgtgtgcactcctccttcattactgatcgaggtttgtattgttataaggtaatgccttttgatttgataaacacaggagcaacatatcaaagattagctaacattatgtttacatatttactagaaaagaccatggaagtgtatgttgatgatatgctcgtaaaatctcaacacgcaaaggaccatgtcgctcacctagattccatgtttaggatcccgtgacactatatgatgtgacttaatcctctaaagtgtgttttcggagtaggcttaggaaaatttctcgatttcattgtaagccaatgaggaatcgaggccaatctagtaaaaataaaggcactgatggagatgcgatctcccaccaaaccaaaagaggtccagagactaacaggtaaagtcgctgcactaaattgttttgtatcgcattcttctgacaaatgtaaaaaattatttcaaattctaaaaggtaataaaaagtttcagtaggctgataaatgcgaagagactttttaggcactaaaaatgcacctggggcaacccccgatactatccaagccgatgcctagagaagtgttatcaatctacctggtagtgtccgaatacgcgattagctcattaatgatccgcaaagaccaagatagacagcatccggtttactatgtaagtaaacgcctactggatgttgaaacttgctatccataaatggagtgactaggatttgcactggtggttcttctcaaatattacgaccatatttttaagcacatagtattaaagtactgacaaattatcttttacgacaagtattggcaaaactacaagcgtcaaagcgactccttaaatggtcgatagagctaagccaatttgacataaaattcaaaccacaatcggcaataaaaggccaagcccttgttgatttcattctcgaatttccaaacgacgaggtggcaattattacagaagagcgagtcgaccttgaagtgccaccaggagaagggtggactttgtaggggtgttcatcaaaccgttcaaaccgcccgcaccgcaccacaccgcaaagaatgtggtttaaaattctttgcggtgcggtcgcgatttgaattttttctaaactgcacggtgcagtgcggtttgtggttttgaattgataatatgcagttcaaaccgcagtggatattataaaaataccaattattatatttatttaggtacaatatataaaggcccaactcaagcccactaattattgtattgttaaaatttgaaattttttttcttatttattttcaagtcttatggtatttttgacaagtgttgctcaagttttattatatttgtgatagtttaattttttggtgatagtccaaaccgcaaaaactgcataaaccgcaccgcaccgcactatttttacagtgcagtttctacggttttttagattcgcggtgcgggtgcagtttgggaaattgaaaaaactgcatgtcctggttgggtttgaaaaaatagtcaaaaacagcaccacccgcaccgcgaacaaccctaggactttgtatgttgatggggcatcaaataacgaaggattaggcggtggaataatattgataagtcctaaaaaattaagagtgcatgctgccttgagatttgaatttcctactccaaataatgaagacgagtatgaagctcttatcgtcaatttaaagctcgttattaagatgaaagtcaagtacctcgaggctttcagctattcccaaattgtggtttgtcaaatcaatggagaatatcaggtcaggggaggacgcttggcgatatacatcctatacttatgctttggcccattttgcaataccctagaattataaaatggattagcaaaaccctaattagataattatgtattattgagaaattatattattatat

SEQ ID NO: 26680 - DNA, 2063 bp, Cannabis sativa
acttttgcttctcctgaatccttgttcggtaaagtagctgtcaattttgctatactaggctcacggagcttgctttaggccatataaagccttttttaatctaagaactttatcttcttgtcaagcaacaccttaagcaattaacggcaagcttggaattgactgttgagcgtgaaatggcacgcagtaccagattttgaagcgacttgagaagattaccacaagatgctccaccaacttccagattaacatcatgaggacaaggtggatgtttgggagcagggtgatgttagacctcctattcaatataactaggagaagagctttgccacatgtctagttagttcttaagtggcggactattattttatttttggctgattgtactaaataattaataagtccaagtcacctttttggggggatataattagtgcattagagttaagtgaaggggggaattaacttgtatagagtagaaattaatttctggtttgggagtttccaagtaactcgaatacttggcaagattgtatctttctatattctttaaatcaaataaagtaagtttttcatctattgcctaccacactcattttatgtcatgtgattaatcatttttgtcacatcatcaatgtgcaattcttgtcacacccaaaatgaatcattttgaggaatttcatttttagatttgagtagggaatggaaagcattgatgtggagattggcattttatttttttcctttactgtgagagttttgtagtgtaattattcgctaaaatacagtgaccacggttttcctccgccacaagtgagggctctccatacataacgggggtggccagtctaagacaatggctactttctcttttttcaaaaaaaaaaaaatcatgcttgcagagaaacaaaaaaaaaaaagagagagagagaaaaaaaatcatcaaaaacacccaagtaaatacaatagaggtacaagggctagttactcaagcacatatgtctaaaatgtggaaataaactcaaaagtagaacatcaattacatatatgcagatgtaaatttaatttttggcaaaaaatatagagcttgactgtttgcataagtcataatcaacaactttaaacatcaaaagataaagcaacaggagaataaaacaacctcaattaaggaagaaaaagttttacctctcttcgaactttaagttcttcctgaataagtggtcggccattaagatacaacatatcaaacgcaaatatacaaacattgaccttgatctcacttgtaaccacattttttcgagctcgagtgctgagtatctgccatattcatttgtaaaagacaaaatatcaacactatttcagcaaaaataagaaccagcaataccaactaaaatggtagaaatgtattaactagaacattttttcaaaatacagaaaataaatgagaaagcatagctgacaagcagagaataagtacagctggctgtgtagtaatactactgtactatttttcagcaattctcctttttttttctgcaattctcttaacgcagttagttctaccaatgtacatggagacagcaaatttcaatatgatgcaacacggatagaaatcaaacaacgtcaagccaaaagaagctagcaaaatctctattttaataggcagttttcttaagtttcatttatatttacaaggtaggtaactagtgattgtttgggctaattaagatttttgtcccccgaactttgacatgtaccaaatcatactcttgaacttttcaggccgttaaaaatccccacgaactattgagattgttggcttcaagaacttttgtccagttttactaataaaagtctgacgtggaagaaagtttagggagcacgatttagaaggtgtcaaagtttagggtagatatcaaagttcgggagacacgatttagtatatggacattcgatgcgttagtaaaattgaacggaattggacataaatccttgaattcaataatctcaatagttcggaggaaatttttaacgacctgaaaagttcgagagcatgatttggt

SEQ ID NO: 26681 - DNA, 3065 bp, Cannabis sativa
  modified_base (355)..(361): a, c, t, g, unknown or other
ttaataattatattaatttactgagatatcttttataagaagctaaatattttaaagataaaatacattgaagggtaaaatggtaattttgtccctactatatatatatcatctacaaaggatctttgattgtttagattgaaataatagataatttatagcgtatctattcttggcgaatagagtgttttatgtaattaagagtgcaattctaaatctatagtggattcaggaggaattaataagatcgataattcacagggtaaattctaaaactacttattgggagcttcattacataggcacatagtcccacactaactaagataatattattttgtagtctcaattaatnnnnnnntttaatcatttaggattctaaatatttactatgtcttctttatgaattttactaaggaatatcataattgagaagaaaagagaattcatggtttgtttattaattatgagaccttgaaaggtctaattagtaaatatatttaaatggtaattttatttgataattaattatcattattaaatagatagaattagtacttataactagaacagaaaaatgacattactgaagagagataattttatttcattaatgaagcaaaatcatggcaaaaattaaactcatgagccttatagggagttcggctatgagtgatttatttaagtcattgaatcttttgaattagctcatttagttctaactctatacctaatgaatctctataaatagaacataatggcctttgattcattacaacacttttagactccgtcttctgacaaactgaatcaaacaaaagacaattatttttctacttagaattttgaaattctcatgagttttctacacaaaaattcatgctcattggtgttaagaagttgtccacatgtcaaagcaatactaagcatagtgaggaagactatgtagtctaattgtcatcagaaggagaattaaggttcagatattgatcatacttcgcaatagaaataatcaaggattagagatttgaatggaatgatattattctgctgccatcaatgtaaggttttctatacctttatgtgtttaattgattgtttttaggaaattcatctttagattgttagattatagaattataatccaacatacatgttagtaattaattcatgatcctagtaaaatatatccaataaatttgtggtcagagtcgaggtttagttctgagtttggggttagggttggagttctctttcgggtgaggtccaagtctgggtctggggttattgggttctatatgaaaatcttagtataattttacatgatttatcaatatagtacaataatatataatacaatacaacacaacaaaatatacaaaacgagcccttattgtacttattagtttaaatgtcacaaagatatacgttgttgacaagtttaggtacatgtataagttcatgattaattagttagtttatctactaattcaatcaatctctaagtatatttattttaacattaaaaataattagggtagcttttctggagtgatctatagttgccttttttttttttttttaatttcttatttttctctttcaatatatattctctatttctcaggttttttggaaaggaatgagatgaatgattggatatagttgttgataaattaattaatcatatataatttattataagaatgatttgtcactatcacacaattcctagtaccatcctaataaaagaacagtatgtgctgccaaactccacaaccagtagacgtgccctgatctgactcattatcaaattctttctaattctttcagcaatgtatagtgcctcaatcatgaaatgtccacatctttaattcctaattaattgagcaactataattatcacggattgatattaattaatcactaatcttaccttagttaatcaaaatcttagctcttaattttcttttttattttttgttgttgttgttgatcaattttattagaaaatgggttttgctgatccctctatatgagtcataccatgcatgatcttttcatgaatattagttagtggaattgatatttatttaattagcacatcatttagagttacagttttaaattaattaattaagatcttaagatacccccagcaacaccacaaccttatctcgcacccaaaaaagaagaaaaaacagaatttggtagtgacatcatatactaattaattgactataagacagcagcaataaccattattgtgtgtaagaaattaaactaatcttgcgggctatataaatatatacatttgtatttctagaaatacatttgtatatatatggaatatacatacttatacacttggagcctatcatcatcataatcatctttgaactaaatgaaatttgcgtaagcaatatgtctatttcgaagcttttgggttctccactctgtattataattgacttaattggcccacacacaataaagtaattaagttctattataaattattattatataatgtaaaataaattttcttaagtgggttggttttaacatgctatatgtgcacctacatattgggtacttttcatgaagtcatcaaatatatagctctagctatatataattgatatccatctctagagataattaattatactctcctaaaagtatgatgaactagaaatggtcaaagtacttgcacaatgtagggtatgtaatttgaagatttaactacttttttttataggttttaaactaattaaacagactaagaattgtgttagaaatagtattaatgcgcaggagataatatagtactcctggtactgttagatcaaatatcatgtatatgaaagcaaagcaaagccactcatatataaatatatatatatattaattagattaaattgaatgtcattgagtgtctttttgattgcacttggagacactttgacgacgctgctttctccaattttaccaagaatgcgacaactctctctcttaaaagtattaattataaccacaaatatgagggtttttttttttttttt

SEQ ID NO: 26682 - DNA, 2071 bp, Cannabis sativa
atagtgttagatctcgtaagataagtattttgtaaatacgaaatcttgtcgactcatccccaataaatgacaacttagataagggtttacaataccaaaacaatgaagtattttttgaatcaaaattattctttagatttcctctacaacctttttcatttaaaaaaatgctataatcatacataattagactagttggattatgatcattagcttatgatgttgctctattctcctccaagaaaattagtgatgcagatgaacatattccagatattctatccaaaaactaatgattatcctcaatttttaaaaattgaatctccttcatacagtgctacaaaaatatcgagtgaatataagcttaaggttatagttctaaaatcgatatcaagctttttgcaagctgaacttagagttataatagtgtattagtggcgatccaaactagaataataactcagtttttagattactaaacactaagtttaactttcacaagttttattatcaatttcaatggatcaaactaggtgttaatgtataaaattgagttgatattctgtgatcgagcatctacttaaactattcaacaaactctttatggtaactagacctagaaagtcactaaaagatcttacaaactgatgggagtggagaaatatttgatatgcagttcaaagatcatttaaatgaactttgaattgtaatcgaacttacctccttagaatttcggagttgcgtattgatgaaatgattaggtctatgattagttactagaagctataaaattccttctagggatatgtcttagagatagcaaatgataatttaaaagatcgttccatctaagactaggtcccaaaataaccttaggttatataatggtaaagtatttagtgtacaccattggtaaatctagggatgccctgattatgtccttaagaaatagctagaactgtttacttactttttttcttcaagttttggtgggctattattctaaagtgactaggggtggactatactatggtcatcaagagtagtatgtgtttgttttcataaatactgattttctagacgttgactacatagatgtaatcttaaaaacaaagtagcacacaagtggagatactgtttgattcgaatctaaaagtgttccattatcttatattatataagataatcccacatcctctgttgtattaatacaaatgaagaattctataccactgaagttcctagacacataatcatggtaccttgtcatagtgggaggatttctaggagtccatctcgttatgacttagatgatactagtgaggacgattcatcgtttgttcaaacaagcaatgaacagtcctaataaggagctaagactcaaagcctagagaactatggtttagctattcacatggagcaacctagaattttcataatacaaggataagatgggaaaccatagttctgagtttgtataagaacatcaaagcctttggtttgtggtatacctagtaatttacttactctgtcgcaagaaacttatattattaagaagctagatcatttttcaaatggctaactctaatagaggtcacttgaattccatacatagagttcatttatcttaggatttgtttctaactagtccagaaaagacaatgaccacaaaaacaattccctgaacatcaatagtaagaggtcttatgtatgctctagcaggcacagaccagacacctgttgttgagtaggagcttgagtaagtattagtttaaatccaaaaaaagaatattgggatataattaaacatatcatgagatagatgagatgaactatatgatagtcgataagggtggtattttaaaaccttaggctacaccaaattaggtttctagacttgtattaatgctagaaagtctaattaagagatggtgattactctgtgggtgaagtagtgtaacgccccgataatttgccttactttacaaaaaaatatcattttaaatgcataatttaaaaagataagaaaatccttgaaatacaacagtggattttggaaattaaaatgcaa

SEQ ID NO: 26683 - DNA, 4816 bp, Cannabis sativa
ctatggatcaatcatgtacacatacctaattattatatcttattattgtgttctatgttatatacaaatagatcttgggttaattgttaatttatccaacagcatatacaaagatgtgtcaacctatactttataagatacaagtacaacaaattatggactgaattgacacgtcacctaattattttcagctctagcctcaaccaaaggtaatcttaatttagacataatatttagaaaattgttaaaagatactattggtgtctagcaccctcctcaatataataccactattggtggatctgggttttggcgagactcttagagtgaaggaggttcttagttgatcaataaagaactcaaacttctctagctaacattacggtttgagacggatagccttgtcacggtccaagcgctcttcgaagttcagtgattatggtctctccgtttggtagttgtattgaggagtgcaaatgtcttctttctactttaaacaatgttaattctcgttttgttaaacgatctgccaatcgtgttgctcatacttttgcttgagcctcatggttatatgctgatcgtagttatttgggtacttctattccgagtaacatccttgatgtaattgtgcaaaaaatgctttaataaaatacattttttattcaaaaaaaaagtatcgggtctcatataatttaagaaaataatttttaaaaaatatctctaactaatggtgagacgctacttactactaatacccaataacaatgctctaaataattagttattcaccaaaaccattaattaacataacaccattattatctatatataaagtataaataaactttcaaactacttgacttgacttgacttctcatcaacaaaatatatatttacttatttactatagatatattaggtcttcctcatgaccatacttatcacgacaacccatataataaacaactcacaccccatcacacacgttattattactaataaactttttgtgcaagtttgtattttcccaatatatatatgtaccccatttttatattatagaaaaataataccttcaaaatgaaaaaaattataatcgttttaattttatttatatatttaagtctttattttgctaacgttgtttattttatatcaattgtctgcaaacactcctacattacaactagctaaaatatcaatgatcacaattatgtatacataatttataggaaaagacatttaattaattggttaaaattgagtaatgttcgtacgtacaatacaaatttgaaaagctaatagaacaattatgcatctctccaaaagatacatataaatacatgccagctaatctaatcaagaaaaaaaatagcactcaataaacatagaatttgtatacaattgtttgttaatttgaccatctattttttttttttttaaaaaaaaaaatattacaatcaaacaataataatacttattactaaattatcaataacaataaatagcataaaaataaccatgaacgatgtgatcgagacaccattcaacacatgaggaagcatcagtaatgcctcagccatgaaaaagtgaaagaaaatctgttgtctctaagttagtgtatccttcctcgcctactaataattttagtacacaacatttatacctatttaacatataataaattccttaacaaactttaaattaaactaatacatgtaaaataagtataaatgatgtgtcttgaaacaattagtgggaataaaaagggcgcaccaatttagagacaagaatttttcgtgaaaaagcaaccatagattagggttttatgagggagaggggagaagttgaatgtgagaatctttgtttttacaaaaattccttcattttttttacataagtttcaatattgtatctcttaaaaaaagaatagcatgcatcgtgagagagagaataaaattagaaaataattgtatcattgagcaagcataattaaaaatcattttagtgtataaaagcaaaaatgaaagttactttgttcatggggtttagggttttagcattaccctcaaaagttggtatttatgagtgattagtaattaatttttattataattattaaatcaaagttcaaaggatttttgactcttgaactttaacatgtaccaaatcatgtctattgaacttttaaggtcgttaaaaatttcccttgaactattgaggaatttagaggaatttttaatggccaacaatctcaatagtttagaggaatttttaatggccaaaaaaattttaaaaatataatttagtacatgttaaaatttaagggacgaaaatccaaattaacctaaattaaaataagaaaactagatgtatagagtttgtcactgaattactagctactgtaatattggcaagcctgactttttcttttggaatcttataatattgaaaatatgtatgcatgtgtcagtttacagcctagctaggggttgatcatagagctatttggtcaccaagtgtgttgaagttattcaacaacctcttatatatactaaaacatttaacactcaatttcatcttaaattaatcccaagtgccacaactaatacaaataatatttagtacttaattaattgtagtcaaagttagataacacttattttaataaaatagagcatcttaattattatatacggttgctagctccaattccctggattttggtataaatttcctaatcatagttgcatatataattaatcacatcaatcaacttttcatataaagagagaagaaagaaaaaacacaaaattaataaaccattctaaatgggaaaaagattaacatcattattaattgtggtagtgttcttcttctcatgttttggcttacatattattattccagcaggtaatatagtatttcatttcatttcattatatatgtatatatataatctcttacatggtttcttattatatgtatacagaaggtgtaggaaaattctcaaagaggtttacatttatggtgtttaaagatgggagttacattattaaaggtggaaaatcttgtacagaaatgaggcttaaaaagaggtcaactccattaccaccagctcctactaggaactccaaaaagattcatgccaatactcatctatcttataataatattccacttccaccacccacattgtctccattaaaaggccttaaagcttttcttgatgaatctatacctcacaagtaattattcatcatatttgtagatatatatgatatgaatacttatatattgtatacattacaattgttattattatttgctaaatgattagtggttggtttcatttgcaataataaaatttgcatgattaaatttaatatgatgcaatagttttcttgtaattcttttattaattcattatgagaaatttaattatacattggatacaaaggcagttcaaagtctgtagtccatctctcaaaagagttgttcaggtacaccactacctattttcccattctacaaaaatatttaattactgtaaatttttttcttcataaatatacatgttataatttttttaaactatttataattttttaaaaaattcttaataattgattttatctttttttttgaagcaataattgactttatgaaaaataaggttcttgatacgaaaaaaaatatttaaattttatttttaatactgtaaattattcaaaaaataataatttataagtcattctaaataattaaatcataaaaaaaaatagattaggatttaagacaatccatttgaaggtgcatcagaaaaaaattctttacttttagtagaaattattacacaaagtatgaaaaaatttaaaaactttactttttttatatagcatattttttttattacatttaggttatagacttttacaaatctttacatttttatggtttaaaatatgtcacatttttgtattttcatattttttttggtcaaattaagtttctaccattttccttttctgtcagtacatgagatgatattgaaatcatcgagtcctttatctccttcatcctcatcttcttccttccgccccccgtggaatgagatcagaaccaaaccttctccactgggaaaagcttaaaaaggaagctcaagcaagatttccaagaagaactggattagcagtcctccgatcacaaaattgcttccattgcactacacgatgctcaccaacacggatcttcctcaacccataccgtttttggagatttcacctactgaaaagagggtttggtggctagtttaatccttctcaggattttgattgccttcttccctcgcccaagcttaatgggtacaaaggagttaaggaaagagctgaccatggctccagagatggtatttcgcctacggctagccctgaaactcagcattaaatgtaatttcatcataaacctatgtgatctttaaacttgttttcgtctcaattttggcaatgtgatttaatttattaatttcagactatattacttttttattcttctcacagatgcttaaaccatccccagtctctacctctatcccattaataaaccctattttgtatcagtaaacaaccaacaatggcgaaagtataggtaggatcacgtacgacgggctcgtcaattagtagtggtggaatggcgcagaggtctctgaaagatatgggcaatgagcatttcaaagctgtgttagaattaggagataaaataaatggggttccatctcaaaactaattggcaatgggaggagtagcccattcatctt

SEQ ID NO: 26684 - DNA, 2037 bp, Cannabis sativa
tgtggcttcttcactcctccggtggctggagcagacttccttgccgccttggtcgccagttgcttccttggagcctttcctccggtggattttcttgctgtctgcttggtacgagccattgagagaatgaggtttgattaagaaagagaaaaaagttgtttgtttctcgggaaaatggtgtggtggaatgtattggatttgagtttgtatttatagtaaggatcaagtgttgagatttgttgtgtgtgttctgaggatgaattttgatcgttgatttattctaaatggacggtgtggatttaatttagtgtcttcgtgcggatcttcaaactaaaattttggcgggtcttcaaatttttttgtttagtggcgcgaaaatttgtaatttctgataattctagtaaaaggagggaaccatttgtaatttctgattttatttaagggattattattatttaagtaaatatattggggttatttatcatcctcttttttatttttcattttatatttgttacactaattactatttttacaaatagagcaaattatattttaatttgactatttatataaatatatatatgtatatcattaagattaaaaataacatgtataattagcaaaaataaattaaagaacggttcacataaaaaagtagacttcaaataacaagtaaaagcatgttatacaaaatgacatatgtgtattaattattcaacccaaattttaattgtgttcttttttttaaataataagaattatatatacaagtttcagggggtcctttgatttcaagaaccgagtgataaactttgtttatgcagcaacgatctatatgctctggaaaaatagaaatggttgtatctttgatttagtttgtacttctcctcttatattgaaactacattgaattatatcagatccaaacaaaataggtgtggcagagcgattttgatccgagatttaataagtatctgaattttgaatcacaaatgacctgtcggatcggagctccgacctgatttaattaaatggatctttttgacatgtctaagctttatccctagcgacttgcactctttattgatcaaataatttttaatacacgcgttgagttacaaaacaatggaggttgaaactcctttggtcactcctttaataaaattgagaaaaagttttatccaataattgaatttgcaaagtatagaataaagaagataatgaatgttgaaacataaatagacaatagtcatctatagtaagattttaaccgaaaatatttggcctaaaatcaatcctaactaactttaattcaagtttgatacacatttgaaagattgaatagattgttctctctaagccccaaagggcatcaaaaacaattactaatagtctagacaatgcctgagtttgttgattaaaacctcctttgtgaacatctaccatcttcttaacttgcacttctttacttttcaataacatttcgaatgaagtgacattttatgttaatatgttttgacttcttataaaatatggtgttcttcgtcaaatgcaatacactttagttatcacagttattgaaatagatatggtctaaatcaaagtcaatctatttagttagacccttaatccataaagcttcctttatggtttatgtatcaatcatatagggagtaaatgtcacttcccccaccacaaatgtataatgacatccttagagatagatgagtacaatctcatgacaccaaagctacctagaatatcaaaggagccccgggggtgtcaccccgagacgactgccgacactctcttcatgttgggtcttgggggtgtcacctctaagtattagtttctacccccgaagggggttaacaatcataccacaccctagggagaccctcatcttcaataacaaattcaaatattcaaataccgccaaaagtttaatgacagttataaactcacaaaaataacgagatattatcacaaaaacagacttcaaccacttccaaaaactaaggagacggttgagat

SEQ ID NO: 26685 - DNA, 3287 bp, Cannabis sativa
ggtccattttgtcatttaataaagtagagggtccaattgataatttttgctaaatacaagatccaaaatagtatttacccatttttaaacattgcataaataaccaatcattttatatgttaagtataaaatctcaattaattaattaattaattacaaatcaattagttattataatatattattgtaaaaaatattgtatatattttcttaggttgttacatcgatttaaagtttaaaattaatttattattataattatatgctatatatagaataataattatataaaatttgttataaaatcatttaatatgtatatatatgcttgtatttttattattactaataataaatttatttaaaaaaaatgaagcctataagaaaatcaaccttcacgtgagtgattatatttttaaaaatttttaaaataaggaaaatttatattaattttataaaactaataaataattgtaaaataaaaaaaaaattaaagagagaatagagatataatataattagagcgtcatgtcaccgccttatatatctctttattaattgataatataagaataaaaataagaatgagaagttatcatttttaaaaatgttgttttttaaggggaatattattttagaccttgtgttttgcaaaaagtactctctgttttgttaaatgacaaaatagatcgtgtattttctaaaattgtacaaataagaccctgaattgattttttatcaaaataaatcttaataataatctgatctagaaatgttatgacaaaactagttatattttctgtatctgttcgtgttaaaaattgtttaaagttagttatataagaaaaataaaattgttaaaaattgaactcaaggtcctatttttatcattttagaaaatataaggtccatattatcatttaacaagatagaaggttcaattgataactgttgcacaatatttgatctaaaatggtatttaccttttttttaaaattaattaatatttaatactacttaaaaaatataaaaaaataataataaataaaataaaataaaatagaataaaattattttaaaatactatgtcaccatattatattcctaattttagtagaataagagtttcaaaattttcctatatttgagtctcttctccaaacagccctaattatctttttcaattttatatacccattcttatttttttcttttcaatttgagtctctttagcttcgccgctactgtgcatgaaatacctaaattccattatcttcttccccaataaatctttgtttcttctttctttcttctccgttcaaaattcctccacaaacaaatggcgcttgctgctcctgggcagctaaatactgaagtattgccatcttatggctctcgaagcgtcgactgcttcgagaaattggagcaaattggtgaagggacttatgggtttgtctttccttttctcccttatacaatcatagaaacatgaatcttcaatttgtttcttcttcttgttgtaattttaattccctttcctgatattttcccaagaaatcgaatctactttttttaatttttttattaggtcggtaattgtattcatgactgcgaattgttgttgtttggttgggtgtagtgttcaccaataaatctgtgaactctgtgataatgttattgaagttgttgagtgcttcatgctgctaaaagctccaaattatcgaattttgattataaggatttgggattacttaggttccttttttatctttttgcagtcaagtgtacatggccaaagataacaagaccggagaaactgttgctttgaagaagatacgaatggacaatgaaaaagaaggggtacgttttttttttttctttcttgcaaattatagtttcataactgatttatattattagtttatgcctgctaatttaccttattcctctttgttttttccccttaatgcagttccctattacagccattagagagattaaaattcttaagaagcttgatcacgagaatattgttaggctgaaagagattgtaacctccacaagtactttctaaagctcttttgtatatagaatcttattacttaaaagatgtagttttgaatgcatatatctatgtatgtattgattcctgcttaaatattttgtttttgctgtcttcaaggtactgaaaaggatgaacaaaacagtcaaggtcagcaaattgttgcataaattactttgttgtttattttaaacatattgtgtttccagtctttattacttttatggttgctgaccgtgttctacccaagtgtttttctgatataatttttttgtctatacagaaggtggtaagtttaaaggtggaatctatatggtttttgagtacatggaccatgatttgactggcctttctgatcgtcctggactgagatttacaattccccagattaaggtgccatttatttttgtaatgttttttcttcaataaaacatatttatgtgtttctctttgattagctattacttaatatttatcttatatttcttgcagtgttatatgaagcagttactgtctgggcttcattattgtcatgcttttcaagtacttcaccgtgacatcaaaggttgcttattagctagcaaacttccgtaagtaatatgaatcttttgctagtcggatccattttgaccgaagtctgttttgcaggttctaatcttttgattgataacgaaggcaaactgaagctagcagactttggccttgcaagattttttgctacggaccatggaggaaatcttaccaatcgtgtgattaccttgtggtatcggtacgtaattcaattatattgagttgttcttacaatttttagcgtgatcctcagtattgctaaaaagcattgcatcttagcttgccttaatattgtgtgatttgaacagccccccggaattgcttcttggagccacaaagtatggtccagctgtggatatgtggtctgttggttgcatatttgctgagcttttgaatggaaagccaattttgcctgggaaaaatgaggttgggcctataaaatgcttatttttttatttttcggtttgatattaactttaacattgtagtaactgggcacttattcatctagttcattttacaatagagtaggggttgcacaaatatcatctattccccgtccgtcctccccccccctccaaaaaaaaataaaataagaaagcctttttcttctgtcaagagtcaacaccactgtgtcttttatattactctgggt

SEQ ID NO: 26686 - DNA, 1845 bp, Cannabis sativa
actaaactgtgtaattactaccctagtaattaccctacctagtaattacacagtttcttccaaacacacccttagtattttcttcagtgtcatactcttattgatgtaattaagtatcaggtcttatataatttacgaaaataatttttagagaatatcactaactatcgtggggcgccacttataaaggtaatagacaccaataatattttattgttatagtgtcaaacactatcacgatggcttgtgaatggtgaatgtcttaacataatactttcaaaattaaaatacaaaagagttatacttaattgcattaatttctctaatttattagctgaaaatagaaaaagttagaatgttgtaattgataacataaatacttaagtctacttaggcatttcatctaaatatctaatttttaattttaacggtataaatacaaagtaccaaatgaatattatttaaaatacaggctacagaagttatttttagacaaaacacaagctctactgatcatggacactagtatgattaatgtgtcaacaaactaattatttgtcctcgataaagaatttaaagtaatctatcttagaacaggaaaattataaagaaactttgactattgctccatgagcttctccctcgacctgcccaaacttggcttagtcaagtagaactgggttgtgttgcttgatgctccaaacgaaaacaaatttggataacctctagtttgatcaagaaattcgatgaggtaacaactattcaaccaaaacccgaaggtgtggactaattgagtatattcccttttaatttttgttaaaatatttaatttttaacttaatttatgcttcaaaaattgaaattaaatatttaagtataacaattacataaacttagatatttaattaagtcaccaatattcctagagaaaaaaagttaaatattaaatgtttgtgacgtcaaaataaaaaataaaaaatgaaatatttgaatggaacaaataaattatctcaagtttttttatacagccaaataaagagttttccagctcttttcttttctttggtttatttaatagagtcaccttgtccactaggcaattcataagagtcatgtaacaaattaggtattctagaaaaaaaaaaaaaaaaattaaaaatgtaacaaattatattaatcatcataaatttaatctagtgaaatctgtgaaatacaaaattaccttttgttactgaaatgaagatcctgatcaggtagatttatgaaagtgataaatcagtcttctctactaatttctatatttttcatttatttatttttggtaataaaagaatgatatatatgaattagtaaaacaatatgtggttataataggatacctcatattattattttatttttattttgttaaaaatatattttcattttatacaatctttttttaatttttttttccttttatattaaaaaacatatacataaaataaaaattaaatatattttaaatattacacaaaaaaaataaaataaaatcttattagaaaaaaaagttataaaacaattattgaaattaacaaaaaataatgttaaaagaacaaaaattacaaaatatacatataaaaagtaaaattttaaaattaattttgttttttttaatattaaaatatatttataattttgtgtaatgcaaataaaattatttcactaaatcgaaatttgtacaaaaaaaaaaactaatattatgacctgcaaaatcttctgtgtttgagtacaatgcatgttcatatataaatattctgcttcaaacataacttctttatcttcttttatgctttttcttccctt

SEQ ID NO: 26687 - DNA, 3324 bp, Cannabis sativa
aaactaaggggcatgagtgctgggatcatctgcgaccttgctagcagcacaatctgggacttcctctgcattcgcatttttagcatcctcgagaaaaatattttcccccaagtccctgggtctcagcaggacacatagcgcgaaatacatcggctatttcaaccacctccactccaagaactacaaagtcaaagtcaggcagcttggacaaggtagtataaatgtaatcagagacaacctgatcatattgcttcttcccggtctccttttcattctcaaggtcgcgaccgagttcatcaactcacgattcgaagactttgaattttttcctctgcctgctccttagcttttccaagatctttgatatcttttccctttgtggtcacttccagcttcagtttctttacactgtcttgtagaagcgaattctccttcctcagaagatcaagctctttggaacctaaaacaaaagcctgtgagaacatggtcatcaattatgatgccaattctgcgaagcgtggcatcaagtcctcggtaggaaccccctcgaccttagagacgaactcattgctcataaacttatcttgaagggctatgaagtcgtgggccttgacaataggatcgatcacaactttcttccccttgtcctgggcagttttgtgctgcttctttgacgagtcagccacctgcgtaagaacagcgtcacttttcctcttccgcggaatgactagagaagttttcgcagtacaaaccttaggttttcggttgaaagttggagcttgctttaggaaagtcatttctgcaagaagatcataaataagaacttattcttaacataaaagaaagtttatatgccaaacgtgttacttgatgttgttctcgacgtctgtttggatagacgcttgtctattctttccttttgtttctcagaaggctccttgtgtactggttctcggtgaagactggtgttctcaaggatgatcttgtgttctcacaattttgtagttgtgcacagaagttgtcagtcgcgatcttgaacaggtaggctacctaaaactccagcgatctctctacgggcagggtctagtacaggtcgagccggtctatctgcgattaataaaaatagacattagcaactatacaaggtaataaaaatatatgctaagtgtcaagatatgcaacgtactaggttgtcgattgaagtcagttctaactcctagcactttaaacgcgtagaacgttcatagtgtctacatcaagaaccaagattggtggagctattctactttagtacactctagttggtactggaagaagatggtagccctcaaagaccaaatcagaattttaacagatcataatgtatttcagaggaaaaaatattctattgtagcaggttacaagctgttccaaccctctccaagtaagttgaaatggtgtaatgaagtttgggctagactaaacacacctaaacatagtgtaatcatgtggctggccatgctgaataggctaaaaacacaaaacaggttgatcaaatttggcgttaaggtaaatggaacttgctgcctatgtgatgttcatcctgaaaattgtcaacacttgttctttgattgcaagattgatagacactgcctgctggaggtgaagaattggctgaactggcatgcccaaaccagcaatctccctcaactgatcaggtggatcgggaaagcaaggatctcgaaattcaagaaaaaagtattagctgctgcaactgcagccttggtgtacagcttgtggaagtccaagattgctgtgatttggaaaaagtctttgattaatcctgctagaataattgaagacataaaaggcactctaaagatccagattgctatgttcatgcctaggaaagtcaagaatattaatagagattgggtttttgctttataatggaaatgtaattgaaatgtatagattgcaaattgattgtgtatagatttcttggcccttgtttgggtgctaataggttgtaaatactatttgtgcaatacaattcattgatttatcaaaaaaaatgcgtagaaccatttggatttccaatctcccatattggaaaccgtaccttctaccctgtcaatttcagagttagcccatttactaaagcaataaaaactattgtcatgcccaacgctctttatgtcataaaaatacctgaagtcctccattgttggtttcccttgaacatattccatgtaaatcgcataaaatcctattattatgagataattgtttggagttagttggaagggagagacatcgtaatgtctgaggatggccttcacaaaagggtaaaaaggcagcatcaccccacattgctggataggaatcgagaccactacatcttgtgtagcgatgatcgcaggatttgagaagggaaagtgaggttgctgggatgccgaaggtcttaaggtccctatgcaaactaaattcaaccgtgcaaatgtatgaaggtctgatttcgtaactcgcaagaccagatcctcgcatgaaaatggtttgtttagttgggtattatcgacttaatctgtttcgcttccttcagcatccccctcttcctcaaaatcacaatcaggtacctcgaagtcctctcccatttcttcaacctcggtgtcaggggcatgtctcaagggaatgagatattcctaggctaacaccgtggactcactatcgcgtatttcaaccgtcacgggctcaacgagttcttgaagcatcctatctatctcattagcagatagcgagccctggcagatcctggccgtaggggcttcctccttagatatcgaggtgggtatgaagctgtcacttctttctagctcatcagcgaaggcccctcctccagaatcgagcatctggctatccgacaagtagctcatctgaaagatagaaaatcttttcagtgtggtgaaagtacgaaactaacaaagtgccctcacccgcacaagttgagaaatagaaaaaaataagagaactgaccagacatctcgagaaatggctgggtgtatctttgtaacataatggtcatatcgctacatgagaattaaggtactgaaacgcacccaccatttcgagaatatagtcaatcctcaaaaaaagtaagtcgcaaagttaaaactaattgtgtacctcaagaaatggttggggtatcccagtatcccaaggggcatgcattccccacatgaacattgagttaatgggacacacccaccattttgaagaacttagtttgtcccaataagtgactacaaggcaagaaaaatgaaaactaactgcatgtctcaaatggtt

SEQ ID NO: 26688 - DNA, 1517 bp, Cannabis sativa
tttgtggaagagcaagtggaagacgtactcgacccctctaaacaaaaggcaaccaatttccaaagacatctaaggtttaagttgaaactttagatggtgatgatgaagagtagattagtaattgttgggctctcttattacttcatattattggtttggtgcgttttttcattgtgatatcgatttaatgcccgtatgtaccacttaccactctttcattattaggtcctcagctcgagggcacattctttttctatatctaaaatttacaatcgattgtactgtccttttcatctttcgtttgatgagtttcatatcgaatgagaggattcatatttataaattaccaatttattcccgttaaatgtatatttattatttcgtgatacatacatttcattcatttttctcttgcaaattgttcaaatttagtattttactgttttttctttaaatgtatagaaaacagaattgttataaaaactcaaatcaccactttttatcatttattttccttttttaaaaaaataaattaactaactaatctcattgttgaaccgtttttttattattaattattatattaaaaaaatataatgataataaagaaaatgacttgttcaacaacattaaaaaaagaaaaaaaacattaattaataatatttctttacttttctttccactaacttttaagagcctactactcacttatccatgctcaaaaagaggaaaaaggaaagagaagaaaactctgccaaaatttacaaaaaaatgatacgatatattttcatctttaagaaaattctaaagggtaagttttagggttctcacttatcttcttttcttctttcataatttttctttttttttttttccactttgatctaggctttctaagctacaaaagatcttcaaatgtgagatatagccaaagaaaaataagagaatttaatgtctccatgccgttatgctgcccaatttttcatagatttttatgtttctctttaattctctaaacttcgaaaaataagtcaatataggagtacataatcaaatagaatgataaaatcttaacaaaaataaaagaattgttatgctgccaaatttctcataaatgatttttatgtttctctttgattccttaaattttagaaaataagtcaatatgggagtgcataatcaaagagaaagatgaaaatcttaacaaaaataaaagaattattatgctgctaaatttctcataaatgatttttatgtttctttttaattctctaaacttcaaaaaataagttaatatgggagtgcataatcaaagaagaagattaaaatcttaaaaagagagaaaggttatgctgttaaatttaccataaatttttatgttttggtttgattcactaaatttttgaaagtcaatgtgataaaaatcaaagataaaaataaaaatctcgagtaaagaaatgccttctgcagtaaaattttcactaagaaattgtatagccaaagaaataaaactgttg

SEQ ID NO: 26689 - DNA, 3052 bp, Cannabis sativa
tacattttgatttgtgtttgagaaaaaattgctgttttgatttagttgtgacgttcgtatgttagtggtgaaaatgaagttaatatttcccatattcaggattgttgaaaatgaactgtttaagcatgatttgagatcaaagaagaaggtgaaaatatttcagtacgtactaatcaagtggacatttgcccttctcattggactcggaactggactagttggctttttaaataacattgcagtcgagaatatttcagattttaagctcttgctcactactgacctcatgtcaaagaaacagtgagctttgtactcttctctccactaaacaatttatctttgaaagttaaagaaataactaagacataaaagatgtggttcgagtgcagatactacaaggcttttgcagcatttactggttgcaacgttggtttagccgttgcagcaggtgctctatgtgcttatatagctccggctgcagcaggttcgggtattccagaggtcaaagcctatctcaatggtgttgattctcattcaatacttgctccaagcaccctctttgtcaaggtatacaattaaaaagtctattcttttagcatattccttctctgttttgaaatcatgttgcaacttacttggtttcctctgttactcgggttttggaagatttttggatccattttgggagtgtctgcagggtttgtggtgggtaaacaagggcctatggtacatacaggggcttgcatagcctctctgcttggacaaggaggttcgcgcaagtatcatttgacatggtcgtggctgagatacttcaagaacgatagggatcgacgagacttgatcacttgtggtgctgctgctggtgtagctgcagcatttcgtgcccccgttggtggtgttctgttcgcccttgaggaggctgcttcttggtacttatctttcttccacatcttacttgtcaaacaaaattagtataataataaatacatgaactattttattgcagtactaaaggttgttgtgtttggtgtggttaaggtggcgcaatgctcttctttggagggcatttttcacaacagcaatagttgctatagtgttgagagcttttatacaattttgctctacgggaaaatgtggtctattcgggctaggaggtctgatcatgtacgatgtaagctcagctgcggcaatatttaatgcccctgatatcttggctgtgatattcattggtattactggaggattccttggtagtctctacaactaccttgtgaacaaggttcttcgagcttataaaattatgaatgggtatgtatcaccatctcttatttcattaaatatgatagtcagtcagtactaagcattatttgatttcattgcagaaaaggtgctgttacgaaaatcttgctggttatgacaatagccattttaacttcatgctgctcttacttgttgccttggtctgccaagtgcatcccttgccctgaaggcattacagttagctgccataatgttaaatctggaaactataaggcctttcagtgtccaccgggccactacaatgatctcgcctccctctttttaaacaccaacgacgatgctgttcgcaacctcttcagtacccgaacaaaaaaagagttccagatatcctcactcttcatcttctttgcagctgtattcttccttggaatcgtaacttatggaatagctattccctctggccttttcatcccagtcatacttgctggagcttgttatggcagacttgttggaagactctttgaaacaatctctcacttggacactggtctctttgcgttacttggtgcagcctctttgctcggcggcaccatgagaatgacagtttccatgtgtatcatactgcttgaacttaccaatgatctgttgctgctccctcttgtgatgcttgttcttctaatatctaaaactgtggctgataacttcaacataggagtatatgaccaaatcatgaaaataaagggattgccttacatggaggctaatcctgagccttacatgagacatttggttgctggtaatgttgtttcgggtccattggtcgccttttctggcatcgaaaaggtgggaaacgtactatttgctctgcggacaacaaatcataatgggtttcctgtgattgatgaaccacctttctcagactctacagagctgtgtggtctagtgttgaggtctcatttgcttgttttgcttagggggaagaactttaccaaggaaagagttatgtgtggtagagagatacaaggaatgttttctgcatttgattttgcaaaagcaggatcagggaaaggaatcaaattggaggacattgatattaaagaggaggagatggagatgtacgtggatcttcatcctattacaaacacatctccatacacagtggttgattcaatgtcacttgccaaagctgccgttctctttcgccaacttggtctcaggcacatgtgcgtggtgccaaggagtaaaggggtatgcatgttttctcctatcctatctgtctatgcttaatactctctctctctctttctctctctcactcatgcattgcaaattgcagaaacatccaattattggaattttgacaaggcacgacttcatggcagagcacattttggggaggtatcctgatatggatcctcacaaacaaaagtaactcaccatggtccatgccatgtcaccaaactgtacctttggtccccgacagattatcgagttattccggaggaaggaagcaagcatttgaagttaatttcaatatgaacaatgacatttcttcaatctgatgagttgagtagggtactattgcacctttttgtcatcctcctgccactgttgcaactctcacgctataatttcaactttctattgtgttaatgtttcagtttatctcggtccgtttggaaccccaacaacacccaccacctctccatattagggtgagcaattagtaataaaagactctttctcaagttggtctttttatttttatttaatttatttatttattattttt

SEQ ID NO: 26690 - DNA, 2250 bp, Cannabis sativa
gttttgcccatatcaaaaagattttatttttccattatagttttaagggaaatattggtgattttagtctgttttgtttagattttttatgacttggaaccaaacagaggatataattttcagtagttgagtttagttactaaagaaatttaatgttaccaagctttattattgtctaattttataggaacattatctttttagtcatgaattgaattgagttagtatgttcattaaggtagagaatgagtttagtttggatattgtaatttttgagatagtttgttgaagaaggtatttcgagttttattgtttagttttataagagtgtcgttttcttgtgtcgtttatgaattgacttagtatgcccttaggatagacgatgaatttagttcgatagacgaaatccattcacaatgttataattttgagatactttgttgaagaaggtgtttcaagttttattgtttaattttacaagagtatcattttctcatgtcggttaagaattgacttagtaaatatgcttttaggatagacaataaatttagttcgatagaagaaatatacctcctcaatatttaaattttgagatactttgttgatagaagaaatccctctacaatattgtaattttgagatactttgtcaaacaagttttatagtttaattttataggagtatttttttctgattcggatcagtcatgaattgatttattatgcccttaggataaacaatgaatttagttcgatagaagaatcccttcacaacattgtaattttctttcctcatttattcataatattatgatataatctattcttttctgtagtgaaactgcattagttacatacactaatctgtgaattttcatggttgagcagtttggaatgtctggtgcattggaaactctctctggacaagcatatggagccaagcaatatcgaaaacttgggactcaaaccaacactgcaattctctgcctcattttagtatgtatccctctatctctaatatggttctacatggaaaatatccttatagtcattggccaaaacccccaatatttcaagacaaagcaggccaattcttgttatggcttatcccagcacttttcgcttatgcaacacttcaaccgctcattcgctattttcaatcacaaagcttgattaaacccttgctagtgagctcatgtgtttcgatttcttgtcacgttcctctttgttggaccttagtattcaagtgtggattacaacattgtggagctgcaatatctattggtatttcatattggttgaatgtgattttactccttttgtacatgacattttcttctacatgtgaaagtacccgagttccaatttcttctgagctctttcaaggatgcggagagttctttcgccttgctattccttctgctgctatgagctggtaaaaaacctttttcattctacaaaaaaagtgtgtatttactctgtttcattaccaaacaaagcttctaattacctctactttttctttgtttcatgtcatgattgaagcctcgagtggtggtctttcgagataattaccttgttgtctggtcttctctcgaatcctcagctcgaaacctctgttttatctgtttggtatgtctttatcatcgctgttttggtatgcatattttacatatcttggatttcaaaactttaattaagtgaacgttttttgttttgataacagtatgtctacaatttctacactctatacaataccagaaggacttggttcagctggaaggtaatatgaataagtattcttaacattttttttcgatagattaaatcacaccaaacacaacatttacccgattaccaaaataattcttaacatttttgttggttattgattacttcttttttcttttttttggacaaaatagcactagagtttcgaatgaattaggtgcaggcaaaccaagagcagctcgtctcgcagttggtgctgtcatgtttctttccgtctcagaatccattattgtaagctcagctctatttgctggccgaaaagctttcggttacttctttaccaatgacaaagaagttgtggattatgccatgaacatggctcctctagtttgtctatctgtcatattcgacagtttacatgctactctttcaggtattttttccctagttctttcttccttgttcgatcgatcgatcaatagtgataacattctcgaatctcgagtcactcatgattaat

SEQ ID NO: 26691 - DNA, 2014 bp, Cannabis sativa
atatcaatgttgcttgttcttatgggttaggttgactattggggaggtttaaaccatcatgaaagtgtagccagccactattataaatataatataatttttgaaattgaatagtggccccaagtgaacgaaattacgtttatgatcttaattaattttagggcacctagaggctgacagttttcatatttccacacagaactgttaatctgatgatagtattagtggggtaaaagagaattaaaggtttagcttccctttgctacatctattgagatcaaatttgatgtcgcttattaccaattgacctgttttaagattggttatagagtcttttcacggcaggttctacctaccattttgtaaaggtcaagaatcattattgctttttttgtttccatgtctcctgtagatctctaatcactcagattagttcataacaatttgcttctctctctctctctctctcattagatctattttaaaggttttgtggagtgtaacccatcacaagatatctaactttaaataggatctattcaatgaaattcagagttgaaaagtcactaacaagttgcataaaaaggtctagacttggcatttagatacgagaagaaatagtccaaagctggtatttattagaagcttgaattatgaaaagctaatacagctgtattatatgccttttgctttgtgcttctgcaatattcttcatgtattgtttttgtttggtaaggctatcttttgcacttgagttgtatctttgacatgaagaattgtatataactgggacctggccttttttacagagcaaggccctgtaggaccatacaaaaacatgacattttgggtgtcttcaattattatttggtgttctatcatataagctcataataacatatgtccatacaagtggtgtttgattaaaattccattaaattgtgtcccacaggtggaaaaacctgttgaggtttaccatgacgaagagtacaggtccaaaagatggcgtttcccttctcataacttcaccgtatcagtgatttggactccgtttcttatcaaggcagacatttttgaagacatgaatgggatatcttctaaagaaatccagcttacccttgacaagttggacaaagtttggacggatcaatatgagagcctcgattatgtggtgattggagggggtaaatggttccttaaaactgcaatataccatgagaacaatactatctcgggctgccattactgccccgggaaaaacctgactgacttaggatttgagtatgcctatcgcaaagctcttcgtgaagttcttagcttcatcacgagttctaagcataaaccggttgttttcttaagaactacaactccggaccactttgagaatggagaatggttcagtggaggatattgtaatagaacagttccctttaaagaaggtgaggttgatatgaaagatgtggacactgtaatgagaaatattgaattggaagaattcaacaatgcttcagaaactgattctaaaaatgaaactgttttaaagctgctagacacaaccagtctatctttgttaaggccggacgggcaccctggtccataccgtcaatttcacccgtttgacgaagataaaaatgctaaagttcagactgattgtttacattggtgcttgcctggtccaattgattcttggaatgatttggtgatggaattgttggtcaatggtgataaatatcagtaaaatcaaagaactcaaaggagggaagaagtagaagatcggttgtttcacatttaaagtcatatacagagtatttttgcagtgatcttggacatgatttgcatctcaactagggaaggtatattggcttttgtggtaagatgacacattgttgagataatgatcgaaacagggaggggagaaatttgtacaaaactattttttccacattacgttgcttttgaaattctttttctgcagtgcagcagcaaatagtttgaaccctttgttgaatatcaa

SEQ ID NO: 26692 - DNA, 6781 bp, Cannabis sativa
  modified_base (5596)..(5608): a, c, t, g, unknown or other
atcttgaaaagttgactaataaattaataatattttttttaatgattatttcagagttggtgtgagattaccaacagttgaagttaggttcgagcatttgacagttgaagcggattgctacataggcagcagagctcttccgactctcccaaacgctgccttaaatattgctgaatcagctattggtttacttggtattggtgtggccaagagaacaaagcttacaatacttaaagatgcttctggcatggttaaaccatcaaggtaggttttatctttaaaaaaaagtcaaaacaataaaaacaaaaaaaaatcaaaatcaaaagaagtcacttttagtcttgcacaagtagagaaaaattgttaaatttacttaattgaacttattattacaacaaaattagtaattcactcacgtaagtgattttgtcaaagtttattaatttttcttcctcttctttttatataggatgactcttctattagggccaccttcatcagggaaaacaaccctgttgctgggtttagctggaaagttggaccccaccttaaaggttagtcatatcatccatatacttatattataaatcttaaaattaaacacattattccaaataataatattaaaatattgttctacaggtaaaaggggagatcacttacaatggctataagctcaaggaatttgtaccacaaaagacttctgcctacattagccaaaatgatgttcatgtgggtgaaatgactgtcaaagaaaccttagatttctcggccagatgccttggagttgggactcgttatggtaattacttggcttaattaagtcgtaatcacattctaagtagaacacttcaattaattaattttttagttaactattattatatcgttgtagaccttcttgctgagctagctagacgtgaaaaggaccataaaattattccagaggctgaactagaccttttcatgaaggtataaaaccaaaattaactacattattaaacttcttttttaatatttaaccgaaaacttagattgattggtgaaagcatatttatattgatcccatatatttcttgtaattttcaggcaactgctgtggaaggagttgagaacagtctcattactgattacactcttagagtaagttcaattacaaaggccttcttattattttatttttcaaataaaaacaaaaaactttagttaccaacttttttaaaactgggacaaaggagaggaagattactccccaacttgtatatttatgaccacaattttcttatctagcctcgcctactttgttgactgttgtatttttgcaacgtttgttaattcacggagtggggcccaaatcccacatatatccactctttatttctatctttgttgactatcggtggtcgttcaacaaccttgttgtcgaattctatattatttacacacttaaaaagaaaaaaaaaatatttatcgaagcaattttttttgggatcattgatggctgatatgatgatgttgacacgtggaacagattttaggacttgatgtttgcaaagacactattgttggtgatgatatgcagcgtggtatatctggtggccaaaagaaacgagtgacaacaggttaatatccctaactttctcattttcaatacaaaaacatttgtatgaaatatctcttatatatatatgcaggccttatctacctaaatttgacttattctcttgtgagggcttaaaaagttactcgctctttgtacttaattattactaggtctttaagatgtcttacgtatttctctccaaaaaaaacaaaaacaaaaccaaaaaatgtcttacgtattcaaacgcggcttggttacgttgatagatcataatagatattagataatcacccactttctgtaagaaaagataaataaaaagttgtccatttttcaaaaataataatgatttatatttcgcattcccaacaaccaactcagttgctttaaattaagtcttccattcaaatttagtacaacacatgactactatcacaattgttaaaataaagcatataaaaaaatattgctattaggcactaatggtatttagtacttttgcaatatgtcgcgttgtgattgattagcgatacttcttaaaaattattatattaaattatataggaccaaatacttaattagactaatagtaatattgatacataaaaaattattagacaccactaatcacttttaacatttctctacaaacaatatctacaaatagaaagagaattttctttttttcaatttcaaatggaaaaatacattgctttaaatggtgagtttgacaaattcagattgaacttaattttcactggaatgattctaaactctagttggtgtgtgggtgctgctgagctgactccaacaaaaataaatatttttaactatttgatttattaaatgaggcttgcattaacaatgtacaggagaaatgatagtggggcctacaaaaacactattcatggatgagatatcaacgggtctagacagctccaccacattccaaatagtcaagtgtcttcaacagatcgtacacctcaccgaagctaccgtgttgatgtccttactccagcccgccccagagacctttgatctttttgatgacatcattcttttgtcagagggccagatagtctaccagggcccacgagaacacattttggacttctttgccagctgtggcttccgctgtccagaaaggaaaggaacagctgatttcttacaagaggtaaggcccaattccaacccaaccaggcccaggcccgttttctattgttgggcttaatttgggaaaatgggctaactttcttctcttttcttccattgtaggtgacgtcgaagaaagaccaagagcaatactggtcagagcgaaacaaggcgtaccggtacataccggtttctgagttcgccagcaggttcaaacggttccacgtgggcatgaggctggagaacgagctctctgtcccgttcgacaaggaacgaggtcacaaagcagccttggtattcgaaaagtactcagtctccaaaatggagcttctgaaagcttgtttcgacaaggaatggctactcataaagagaaactctttcgtttatgtcttcaaatctgttcaaatggtcattgttgcgttcattgccgccacagtgttcttaaaacccacaatgaagatcagaaacggaggagaagacgatggagctgtattcattggtgctctgttattttccatgatacataacatgtttaatggcttctctgagctctcaatgaccattgttagactccctgtgttttacaagcaaagagaccttcttttccaccctgcatggactttcactcttcccacagccgtccttaaaattcccatttcagtattcgaatccttggtttggataatcatgacttattactctattgggttcgctcctgaagctagcaggtactaaccctcacttgtttttgtattttatatataataataagcatacacgaagaagactatattttgtgttttggtacataaaacgcaattgggttttcgtttttgcaggtttttcaagcaactattgctgatatttgccacgcaacaaatggctgctggactatttaggcttattgctggagtttgcagaactatgattatagccaacactggtggggcacttggtttgcttcttattttcatgcttggaggcttcattgttcctaaaggttagttttattgtcccatctaagcaaataaaactctctgtttttaaaaattgttcagtggcttatgagaactggattaatttaacagatgaaattccaaaatggtgggtctggggatactgggtttcgcctataacttatggttacaatgcaattaccgtgaatgaaatgcttgctccaaggtggatgaacaaactggtatgtttcaaacatggaattgttggttcttttttttccttgttttatttacttttttccgtttctcttttagcatttctgaaaagatacaacgtattatttccaatgcaggcttcagacaattctactgctttggggttgaaagtacttcagacttttaatgtctttcccgataaaaactggttttggatcggcactggagctcttctggggttcgcaattctgttcaacatcctattcacgttctctcttatgtatctaagtcgtaagtttcaactctttgtcaaatgtttggtatcaaactaagatagtattgtgtgcttctttgtgttgagaatagtttttcatgttttgtttacgaatatcagcacttaacaagccacaagccataatatctgaagaaactgctcaagaaatggaaggagaccaagaagaatcgaaggaagagccaagacttcgaagacccaagtctaacaaggagtcaatgaatagatcactgtcaactgcagatggaaataacacaagtaaggaaaaaacttccaaaaagattcaatatttcatatgttacctttatgtagtattctaaagtggctttacaaaatattttaggagaaatggctatccggcgaatggccagtcgatctaatcccaatggactaagcagaaatggtgattctaaccttgaagaggctaatggagttgcccccaaaagaggaatggtgctgcccttcacccctcttgcaatgtcatttgactgcgtgaactactttgtagacatgcccccagtaagaatccttttcctaattatccttttttgtgcttatcaatcgagcattgcagctgtcctaattaagcacctcaatattagcttatcttgtttaatctttgaatggttttaacaacaggaaatgagagaacaaggagtaacagaggacaggttacagctacttcgtgaagtaactggtgcatttaggcctggcgtactgactgcactaatgggagtcagtggagctggaaagacaactttgatggatgttttagcaggaagaaagacaggtggttacattgaaggtgatattagaatttccgggttccccaagaaacaagaaacctttgcaagaatttctggttattgtgaacaaaatgacatccactcaccacaagtcacaattaaagaatccttgatttactctgcattcctcagactccctaaggaagtcagcaaggaagaaaagatggtaagtatctgtttgttttgcttttctgcaccaaacaaagaaaaaagttgagatttagtagtaagagtgccaattttttccttttgtagatttttgtggacgaagtgatggaattagtagagctagataatctaaaggatgccatagtgggacttcccggaatcacaggattgtcaactgaacagagaaagagattgactattgcagtggagcttgttgctaatccttcaatcatttttatggatgaaccaacatcaggtctcgatgcaagagcagctgctattgttatgagggctgttagaaacactgttgacactggaagaacagttgtctgcacaattcatcagcccagcattgatatctttgaagcctttgatgaggtaataacctctctctctctctctnnnnnnnnnnnnntctctctctctctctctcatattactcgacttactgagttctattgtgcacctgtactagttactattgatgaagagaggaggacaagtgatatattatggaccattgggtcgcaattctcacaagatcattgagtactttgaggtaattgctacttactttcatccaaatataattttcttccacccctttcttttttatgtgttttctaatacaaattttctttttgcaggaaattcccggagtgcaaaagatcacacccaagtacaacccggcaacatggatgttggaagtgagctcaattgcagctgaagtccgccttaagatggactttgcagagtactacaaaacttcagccttgcaccagtaagttcctaaacaaatactaattgcatcaaatttatttttaaaggttttgaactgacatgtaagcttatgtgcagacgtaataagtccttggtaaaggaattaagcacgccaccaccgggtgccaaagatctctattttgctactgagtactctcaatcatcatggggacaattcaaatcctgcctttggaagcagtggtggacatattggagaagtcctgattataaccttgttagatactttttcaccttggcttgtgctctcatgcttggaaccattttctggaaggttggaactaaaaggttagtcctcttcccaaaatttctcaatttctatatgtggtggaaattaaaaaaaaaaaaaattgcttacatgttaattttatacatttttatgatatgatcagggagagctcgactgatctgatgatgattattggtgctatgtatgcttccgttctgtttgtgggaattaacaattgttcaactgtacaacctatagtagccgttgaaagaactgtattctatcgtgaaagggctgctggaatgtactctgcattaccttatgctcttgcacaggtgagtttaccatatagtgttatgttatttcacaaattgatcaaatcaaaacatataaatttatctatttgtctctaaacaatacaatggctttgattgatgttgcagatgttagctgaaataccatatgtacttattcaaacgacttactacactctgatagtgtatgccatggtgagctttgaatggacagcagctaaattcttctggttcttcttcgtcaatt

SEQ ID NO: 26693 - DNA, 1848 bp, Cannabis sativa
ataggaaaattaagatgtagagcaatatcatgttcacaaaacattacagaatctcacaactctcacactcttattggcatataaagaaaaataaaaagccaagccaagccacacccacacaccttcataaccatttatataataataataatagtattaaaagtgtttattattatcatataataaatttagttgtaagcttcagggtggtccttgaggtaagcttcaacagtcttgagcatttgagtggcttgtttctcaccttccttaactttctcttcattcacttgagcatcaccagcactgtagtacttgctaacagtcttaattacgttgcctccatcacccgaagcaaccaattttgattcatgtgttattttctcaagctgatttccttccaaagcatctccttcaattatgctgtaagagtatgttaggctctccttgtcgatcgcctcgatcttgtgcttaacatacttgaatggaacccctacaaaattaacaacacacactttcatacaaagccgacgcaaacctagtctgctttagcccaagcccgaccctgcttacatacaggatcgtcttttgggtgcataccatcttattaattatttaaaataattttttaaattttttttaggatacttgaatgaaaaccctacaaaacaaccgacgcaaacttagtctgttttagcctaagtctgaccctgggtcgtctttcgggtgcataccatcttattaattgttttttaggtttctagcttgcaacacaagttattaattaaaattaccttggccgaaagtgatcttcttgattgttccaactccaccatttccttcaagaatttcaaccttttcaactgcttgaggagagattttcgggacgagattgtctccatcaaggacaaaggccttgaaaagcctagctggagcaattgaggaagtgaactctgattcgtaagtgaaaacacccatgttgttgtgtttgattaatgaacaaaggggaaatttattgagagaatgtatgggtttgagtggtatttttcttagttagttttgctgaagaaataggcacattttggttggtatttataagctataaggtaggctaaaaatactcttgtgttagtgagaacagtactttacttacttaccctctttattgacttatattaaaacaagttgttacttattaattggataactcaaattgttggcaaagctatatatttttttggtctggtaggaaattatagctttcaataagtagtttcctagtcaaatatggcgcccatatatatttattataagaagaaagaaaattaaaataattgacaatctagatgatgtaaccaaattttaaagaaacctgtagagtaattattgacaatatcacattctcttttttaaaatacatagcatacatatgagtttaatttctgatttaagttttaacttttgccattcttctatttttagcagtaaaaataaaaataaaaagcaggagcagaagcagaaagtcatgaaaatttttaagtcttggtatttttctaaaagtgtcattgaaaaataacaatctattgtagcaacttttccactacaataaattattttaaataaaagataaaatcactagccaaacttataaaccttttttggtcattgataattacaacatgttgattaattaatggtcagtgctaaagccatattatacccaatttttttttattatatgattatttagtcatttaaattgaaaacagataaaatcatgaatttgctcaaataaattagtaatttcagacaaaacagaattcaacaattttgtatcgagtcagattgtct

SEQ ID NO: 26694 - DNA, 4936 bp, Cannabis sativa
tttgagtgatctaaattgccgtcttctggcttctatgagaattgtggagagcactacacggacttatagttgttgcgttaattttgttcggtttacaatattggggttctgtgataaagtaatgaaaatttgatattgttgtaacttgacatgaaaagcttgagaatttattgaattagatgattgacattgatttagatgaatgcccaactaattttctgcacaactctcttgcttatctgcaaattacagggtatctgtactgtgtgtttatatacccacataattgtttacgggcagttgtgttgtattttgttaaaaatctgattcttcccttttctcaacaaaagccaacaggaagttgatcgtggtgaggtttcttctgaaggattgtcctcagtgtcaggtttttttctcttttcattttcctatgcatcttgctttgcctttgatgtaaagtttatgaggaatcattactgtaaaagtataacttacttgattctgtttctaatggtaattgtgcaagtgctcatgccatatagtttaattcagttcatacatagttatactgctacaaaaagaaagcctttgaaaatcagtgtctgtgggatgacaaatacgaagtttgtttagctttctcttggtatgccaagtgtaatacttttagttttatgggtacaaacgttcatctttcctatttttaaaactatgttaagcaccttctttgttagattttcatttgtgatgattgatactagtgtttttagtcattaattgtcatggaatgtgtacttttttttttgtttgttttaaatacatctttgtaaactgtgtaacaagcctaaaactacacatggaaaagaattcaatctgtgtattagatgtagattaattgcgaaggtgctaaaatctctctatgaaatcagctggtacgtgtctcaggctatgaaatttcctgtgtacgtggaaggatgaactctgtaatggaattttgatgctatgcttttcccttaacttaactactgttggcataataataggccctcgatatatgtgagctaagctcaacaagagagtaactgcgaaatacatatgtattttgttttattttgcatcattgagtaaagtaaattaaggattttgtgatgccttgtagtaaagtaaaaaagcaagtcaagcatattactggtaaaaaaagctgactgacaatcaagaccatctaaattgtaggtgactaaaagtgagaactactaaacaactctaaagaagctacatctccctctcccagaagtaacaaaagtcattggcaagtttaatagattttttgacaatacttctaagtttatgtgcccatgtatttagaatgattcttaataagtctcactttctgtttatcatctgacatggaattttgtgatatttcctgaaatatgtgagtgtaatgataaattattggtttatgccttcttttcttctgtctttgtttacaataaaaaaaatgctctcttctctctcctatttttgagacatcatgcatgctaggagtttccatggcccttcttgccatgtattgcaccatgatcccactggtcttgggaagaaatctggccattaccccactggttttggttatataaaacagtatggaaatgaggggaaacttggaccaaaaaggtactagagtttcagaactgaacacaaagtgttcatgattacattaaaatgagatggaggatcagtcaaaattgttagagaatcaaactctcaggttttgagattgttgtatcaatcgatgcagcagtttggattatggaagtcttggaggagttgcagaaaagagaaagggcagcaaaggattaatttaaagaggtcttttaggaacaactctaacaatttttcctggaatgttttaagaatgcaaagggacattttctcaaactttcagtcttgaggataaataagatgaagatggtgattgttccagaagaaaggcatgctaaggaatggaaggattttgaagaattgtcttagagtgctactaagaaggaagacaaagaggctcaatgacaacatggttctgttgcaagataggaagattgacggggaaggaagaaacaacctttcatgcgttaacgtggttaaacggggagcagggcgcacaacaagggcgaaatttgtgatgtgagaaaccaaaaggccggacccctgaaaaacaaagagaaggctacttttcaaagcaatggtgatatagaatggagagaattatacccagcaatcaatctgagcttcaaaccaaacaatcaattcccagcaaaaaggctaactcaaccaaaatttcatgaatatatgcgagctaaatcttgtcctagaaattggaagttggtagtaattataatgagagacaatagtcacgtggcatggagtcctattttttataacttatcgagagaattggaaagaaagttggaagttagtcaactctttaatgatagatcaattatttggtgcaaagatgaggtggaaagagatgagttgatcagtattcaagagttgaacgtgccaggggccagtacagtagtgtcattcatccaatggagttgggaacatcagagaagagatatgaaggttgattgcagaggttcttggattggagtataaggatcacctttgaatctctcgaacatgaataaggatttgagtgatgtgcatgttgataaggctcctgaatttaggattctcattcatcctacgaacacgtggattaataatactttagagtcaaagtccaattggagctcaattagcttgttgggtcggagcaggggaagcccaactacatatgctcttaacttaattaaagatgtatctaagagccaaatgaataacttatcttctgggcccaagagtataattttggccccaggatttagagaaggatttcatgctgaagaggcttcagtcagaatgaatttgataaaccgtaattatggaaaggtggattgccttaaaaataatcaggccttgcaaaaaaggatgtcgccacaacaacaaatttatgaatttttggagaagaggctcaggtccattcgacccaagcagtgacaacatttcaatgaagcaataatcttgtcctggaaagatttcgatgtacaaaaaagagaagaaaaggcttcagtgctttttcaatcagagggggatgtttcaaatgagggtaatgtcaccggtgaaactgaaggttgacacaaggaaacggagagcgatctgccaacatatagataaggtgataatcaatttacaaggggagtttcttatggagcggatggaagaaattaatgatccaaggcttgaggaaatagcagaatatagctctaacagtgacaattttgaggagggagagtttgaagaggaagaagatagtggagtaggggaagatattctctgtgacataaaaatattgtggcttcaaaaagataaagtggtgaaaccaagagaggcgaaaaaaaggagtggtagaaaggtactacgacgggagaagagccagtacaacaacaaaaaatcccatcaaatgaagagggtagtggttgtggtggaggtgataggggggattctaaacttagcaactcttcttggcataatatagtggctactatggtggagttggggatgaaaatagtatctactgatgagccagatatagagaagggggttaaagacaaggaagtgagaaagaagagtagggaattaaaaaatttgactttaaacataaatcatgaaaaaagtcagaaaaagttaattcagatatttggtggtctcgttttaaagcttggattcttatcccaacaaatggaagattgggaggtgctttgatggtttgggatactaaaagtatcatggttattgactctatgaactttgattcaagttgaaggcagagacccttggtggttctcgagggtctatgagccattttcttacatacttagatcagattttttgggatgaattggcagggctgagttcaatatgctgtgattcatggcgttcatggggggattttaatgtggttaggagagttagagaagctgaatagtacttcatgtactagaagctgaatagtacttcatgtactaagacaagtggcttctttctcttttacaaaaattaaataaattaaataataatgggaatattattacaatccttttgcaaaaatttgttgaggttaatgttcacttcgagtctttccaacaattttgaaactttatgttcatattaatgtttgctgtactggcaatatatttatattgagcacttcatagattctgtatttaaattataaatggttgtggagtttagatttttatattgaatggcttcttatgttctgtttgttagctttattgggctgtatatttagcgatatcatatggtagatttgcacattgcagtccttaagaaatgtctctttaacctttcttgtctgtaataaaattataacaactttgtatgtatgtttctccttgaaattatctctaccaaattatgtatggagagttctccttgcactcaaccttcagaagtttttggagcttgattttgttgaatgtctattggcgtgtatctatgtatcttgtttatttattttattactaagttagggcagatatattctttatctcagaaaagtaactcttaacttccctgaaatcatttttaggtggagttgttgcgctcggaaagtttgatgcccttcacattggtcatcgtgaacttgcaattcaagcttcaaaagttggaacaccattcctcttgtcatttgttgggatggcagaagttctgggttgggaatctaggtaatattgcctcatgtcttggttttattcattcaaagcatcttttttccttagtttatggaagcattgatataattttataa

SEQ ID NO: 26695 - DNA, 1567 bp, Cannabis sativa
aaattttttatttaaatactatttggtattcttctttattttgttaccatatgtatttttggtactcaattgtaagttaaatttcctttaatttttttcttttaaaagaaagtaccttctatcccgccatgattttggtatcaaaactatatacggtaataatatacatttatgttttttatttaataaatagaatcggttatatacataataaattacagaaattaattatgttatttcttaactcacattataatttatatgtaattatttgttctaataagtataaatgtgtaaagtccaagtaattactggctgcataaaatacctttcgaatccttctcttcaaatcacgatcgcatgtagcaacaatgaagcatttatgctgttcaaattatataagaatatcagttagatgaacggaacttaataataaaaaacttaaaagcagcagccaatcaggttcatctaaaataataaaagaaacattttcaagcacttcagcttcgcagtctgatgtattttttatttttatatagatacccaaaaatggtttacaataatagtagtaaacacatcatctaatactatcgtcaaccagattgttcatcctaaattcgaacactaaagacaaccattatatggttttcaataattgaccactacaaatacaatcagaacagcaacaaaatctagcactgatgttatcattaagactaaaaaatccaggaaaaagtaaatacctgagtaactctatcaacaatacagtcatcagcataggttcctctatggatgcagggtagtctctcaaaacgaggatcctttgcaatccttcaaagtagaaaatgaatgttttctttaataaagaaatatttctaacttgatgaaaacaggcaaagatatttatgaaaaaaaaaatgcaactttataacacttccaaaaaaaagaagaagaaaaagaagaaggtgaaacacgtgaaaatacctcagagccacacggtatttctggcctaatttctcaagctccgccattacacagtcagtaatacaaggtgtgcctatagtttccaagagagaaacaattagaaaataaaaataacaaatacaaaagtacttatggctcattatcttatagttcaccaacaatctaccaagtaataataataactaataacaatgtttacattcatattaagacaaaaacaataaaatcttaggacaaaataatcaatgatatttaagcttatcaacgataactagtataaggtgctgatcaaagctctaacattttgcatttaccaaatggtgcttatttaatttattactagaatctagcattcaacagcttctgtggatgttacaatacgaaacgtgcttcacaagctatatcaaatacatgctatgagtgtgattgaaatttatcaaaaaggaaacgtgtgtgttttgttccacattgtttaagtgagtgatttgtgagatttagattacactcatagatgccaagacataaccccatgataggattttagtaattggataatgctaggagtgtgattgaaatttatata

SEQ ID NO: 26696 - DNA, 2521 bp, Cannabis sativa
ggggaggtaggggctggccagtttgttggttctatggctggccagcctggctggcccgatccgtgaacaatttgctctcatacttctggtcgatgttgtaatttgatcccttctgcactcggttggcttttcccctggcatgattgtcgttgagcctttatgcactcttgtccatagctatccagcttctttcttggtaacgcttcttagaggtggtattgtaataccacgtctatgagttatgttgtgcaagattaaacactgtgtatccatccccctaatctctgctttctggtaaggtttttatttggaggtatgctactgtggtgtatccatgttttttgtccaacatgtttcttccttttgaaatatggatacttatgtctttgaagaactgagtgggtaccaagttttccttggttgtcaaggcactactggttggtcaagcgagtgcatcaactatcacatcgtctttggggatttgccttttagtacagcctttgagctgacatatcaagtcttgacattagcttaagtaggccatcaactttttgcaatgagctacatattcacccaggacataacttatgactagttgggagacgtggtgtatgttaggtgttcagcccgcgcttcgtgtgctagcctgaggccagcaatcaaagcttcatgttcagcctcattgttagaagccttgaaattgacctttgttgccttgtgcaaccatttcccccaagtgttttgaggactaggcctgcaatgggtaggtggtcaatgcaccttctaggttgagttgtcttgttcttgctctcgcttcttctttggctcttgcttttctctaaaactttgagagatttggggagatatgcttttatgtttagccatgaatctagcaagagctttgccttttgtggccatgtttggttgacaggtggccttatattggttgagtctcggtggtccacttgagtggccagccaagtgttgcgggttttggtgacacctattgccgtggccagttggcatgcattgctttgggagttttggtaggagagtgaagcattcacacttctcctccttctcccttagacttcatggcgtaagggaatcgttaaatttccctcttatactattatgttggttagagccatcgttgttgcgcttgcctccaccattctcattgttggagaattgatagagattgtctatgatgaccggcatgtcagatagtacttggggcactatgatgccctgtatctattcgacattgattttccctcttgcttgggcttaccagacagcttcttccaactttatgaagccatcaactcgcttaaggaactcatttatgttgttcattgagatccatctaatatcttttcagaagtcattgaacggttggatgccttctgagtatgggtatatatcagccttcctctattaggcctttgaccttggtggcctcagccatgaaccgttttatgtggtccttcaaaggttcatcatgtctttgctttatttcgacaagatcctccaatcgtgaaggcatttgtcttgaagcaaataattgaatatggaattcttgggagaattcttcctaagaattaaattttcctggggctagtttgaaatactattgttgggctattttagctagagttgccagaaagattaggccatgcacatctctagatacttgttggagattgtttggatcttaaagtatttcaggtatactaggggatcttctttccccgtgtacatcttctaagttggcatcttaaatttgggcaagggcaaggcattgatgtatactgagaaaggtgagccccttgacctatctagctcaaggtttgatggttttgggctagccaaacccttgagcatatctcgtatttgatccaaatgtgcttgcaaagaaggatcttttgctataggggcctggttaattaacctttcttgattcagctacagccccgaatcagctagagcatggcatgccataccttgggaaagggtatgttgaaggccagccagccctaggccttgcaactgtccatggctagccagccctatactaggcagggcctggccaaccatgtctccctaactggttagtggagcctgtgcgttgaaatggagtagatcacaataattgttggagtttggtgaatctaaatgtctgtattcacttctcgaattgttgttttcttgggtgtttccacccgttcctaggcctagccagttaaagattagcttttgagtggcttgctccccttaggaagggagtgtactcccttagcttgccagaggtattcttacatgtggctagctagccaaagtttggttgataggggttattgtttagtccgagatccttggttgggcccccatgtcgttggttgtcaggatctagctgttctcgccattagacattcgtgggaaggcctatcctccttcaggtaggggaaggtctatcctagttcctaaagaacctggttggttagcttgttgatagacc

SEQ ID NO: 26697 - DNA, 1532 bp, Cannabis sativa
aaaaaaatatttcggtatatgatttcgaacgtagaagttaactaaaaggttgtaataggaggttgtaatttttcaaaaaattacagggatgatactgtaactataacgaatactgctatgaaaaaaaatatttcggtatgtgattttggacgtagaagttaactaaaagattgtaataggaggttgtaatttttcaaaaatttacagggatgatactggatgatactgtaactataacgaatactgctatgaaaaaaaatatttcggtatgtgattttggacgtagaagttgactaaaaggttgtaataggaggttgtaatttttcaaaaatttacaggaatgatactgtaaccataacgaatactgctatgaaaaaaaatatttcggtatatgattgcggacgtagaagttaattaaaaggttgtaataggaggttgtaattttttcaaagatttacagggatgatactgtaactataacgaatactgctatgaaaaaaaaatatttcggtatgtgatttcagacgtagaagttaactaaaagattgtaataggaggttgtaattttttaaaaatttacaggaatgatactggatgatattgtaactataacgaatactgctatgaaaaaaaatatttcggtatgtaatttcagacgtagaagttaactaaaatgttgtaataagaggttgtaattagcactcctcttaaatttaactatgacaacttttatattgcgtcacatcttaaaatctgcatttctcattattaaatgggcagaactactctaaactgtcatttttttaatcacttattttcaaataaataataataataataataatgggacataatatcttttatttgtgaggctacaatattgaagcccacctgtctttaatttacattatcattttcagtgggtgaggtttagcagagattgagtctgacatgtgccatatgaaagcctctctcaaaccctaaataaagagaagatttttatttatattttattttttttttaattttcctccgatgacagacaattagattgactgacacaactctgctcagatgtttttcaactactcatatcatccagctgatcatcatcctttttggtatatatatttctcccaactataaattcaaaaaattccttcacttactctgtctctctaagctatatatcactgttcaattctaggatttctacttttgtcaattaacaatatatatacataaataaataattcttttatactcttataatatataataagctttcatgatttttcaccatctgattcgtttttgtgggtttgattaattgtgtttcagaccacggacgattcaatcccgatcatcacgttgtttctgattgttatataatttttttaatatatatatatttatatatatcagccaaaagaagaaaaaagagaaaaggggggcgcagtaggatatatcaaaattggtttgtaccgtacaagtcggttgtgcagagaaagattttcctttttttttttttt

SEQ ID NO: 26698 - DNA, 3246 bp, Cannabis sativa
tgtgtgactattgcttaagtcaccccatcacgttaatcacgtcaatcacgtcgtcgaccattgctatggtataactgttcacgtgcccattttttgcagctttatttcaaattttaagtcaatttttagtattagaaatggtttacgtacatttcttatttttctttttttatataaaaaaatcagttacatcatactagttttagctgtttgtttataaataggaaaattctcattataaataaggaattttagatatttgctttattttttctttttaagggtttatgggtatgggttaggattttattttcttgattagattctcttgagtttattgtaagttttagtgtgtggttttgattatgagtgttttttagtgcatcattttgattttttgttcttttggtggtttggtattatttgatttttgagtgttcttttttttttgatgaatcaacgagattatcattgctccaataaccaattacaacttaaacatcatctcaaaagtgagacctgaaatatccatgtacaacaagtataagtgttctattacaaactttcgaaccatattctatttgaagcactaacttttttaggccaaacacttttgattctatacaatatttttgtttttgttttgttcactatacaatcggtttggattcttttttcttcccacaacaacccatttctcacctgccaaatgttgtatgttaatgctgcaattgcagcagaaaatactctatttttaaagctgtttaccttgtttctttgtagccatcgcaccagcccatgatgagagcttgaaaccacctgccactgaagccatttttttgagctgttgcagacattctgctgcaatattgcagcaaaaaaacaagtgttccaagtcttccttgccatccctacagagtaagcatccatcctcaattgttagattagtctatctcttgttcttagcctattttgcacagctattcacatgaaaaagctatgtcgaggcatgttcattctattccaaacaactcgagcccattacactttatctccttcacaattgataaagctataggccttggagatttggaaattccttgcactcatcaattgttggaattccatagattgcttaagcttttccttggctagctgtcactatctttttccaataccaacttgcttgtactggagcttgataactccaccaatcttcctcttgatatacacattgtgtacccatttgatccacaagttatcttctttatttgcaattgcccaaatgtacttagtcatggctgccacgatccaatcttccactttcttgaacctaattcctcctgttgatttggattgacataccgaatcccaagcaatcaaactcgcaccatgtgatatgccatggcccttccacagataagccctacaaatagcttctatcttcttgattatcttctttggcatttttgagtgttcttatcccctgtatacctaacgaaatggttaaaacttgctcttcaatttctccttctcattctattaaattagctactaataagaagaaaaaaaatgaaaaatgtatttgatgatgaagatggtggtgaatctgctcattctgatggatctggtggatcaaccgatagttattgtgaatctgttttgtaaactaagagaaaaagagtagttgagaaagttaagaagggatgttcagaatctaaaaaaaattaaacaagttgtagaagacgtgtcttaggattatgatagtgaagacatggtggttgaagatcagaataatttgaaggtatttttatgatcttatatattttttgtgagttcttagtttacgatttattagttgaaggttttttatgatattttagtttattgttatctatatgaagtattttgatcattcattgtattttttttatttattgatattatttttttttacttttttttttgcatgtggttcttgatgtttcgctttgtcatgatttttgtgtaaagatttgtttttatatttatttcttttagatctgattctttattgttaggttagtttatgatttttttttttttttggcttagtttttagttttgagaatttagcttacttatatttagtttttcaaaatttagtttactttgttgttgtttttcctttttagtaatatttttgtgattgttattttggttgtttgtatatcagtttactcttttagtaattttaacattagtttaatttatttttttaattatttatattgtagtatatcaaatttagttttcctttgttttttttttttaaaaaatagtttactgtgtttgttgttttttatgttataagtgttatgatttattttaaagtttagtttttttatgttcatttttggtagattgtagtttattgtgttatcaatgtaaataattttagtttacaatatttatgtttattgtgtatttgtgtttgatttgtcaattagtttatggtttatatgtattctatttgtagttttttgttttccttattttatgtgttatttatactattttgtttatgttagatatatagtcggttattctgttaagtcttacccttgacagttaagtttgttaactgtcagttttgacaccaaatgacaaagctataaatagctttgtctaactcagttgtaactagttttttcagtgaagacacatattgtaaatacaagataattcattcaataaaggagcattactgctcaaggtttttctaagtgttcgaaactggtttgtgattgttcttggatcagtgtgtttgattgtataggaattgtctcattccttacagtttacttttgttgttcacaccttagcacaaatttattgttttgcttgttgcatgtcatgtgttgttttaggaatgaaatttatattttaagcatggtcaaaagattaaggaaaaagtcatcttattccctaatcaagataatattgttgttaaaaatatcaatttcaagttaactgaaggtcaacgttatatttttcgtagtacttgttttggtcatttttttagatagcatgttggttttcaatctcaacttgttcataatgccttgcatagggaggttcatcataaaaataaaagcttgatgttttatatagattgactcgtacactacaacagatttctctattgccggcggtattattgccggcggaactcacccgccactattattgggggtattaccggcg

SEQ ID NO: 26699 - DNA, 1118 bp, Cannabis sativa
  modified_base (42)..(57): a, c, t, g, unknown or other
catcgttttagaagttcaatattaggttgttaaatcaacatnnnnnnnnnnnnnnnnaagatcctggataaatataattccaacaatcccctgcttcttctttgcgattgttgcagagacaagatgagattgctgcagactttggattctttcttgcggctaattaagaatgccaaagttcaatctcgaagggagatatgattactccacccattctcagacctgatacagtgaagaggagtttacactcttcttttgctaattcaaagaaacagggcaaagttcagattactatggatgatattgcagatgaaatttcctactggagctcagctaccgtctgttacgtcctgggagccaatccacctctctcggtgctggagggatttgctaggcgcatttggaagggcaaggtggacaaagtaggtatgatttcatatggaattttcttaattcgatttacaagtattgctgaaagagatgagatattggctgggggatacatattttttaataagaggcctgtcattatgaaggcttgggatccaaatctcaatctaaagaaggaggatattaggattgtgcctatatggattcagctagaagatctagaattgaaatattgggggcaaaaatctttgtttaagatagtggggcaactaggaaaaccaattatggaagatgcaataacaaaagaaagggataagcttacttttcctagagtgctaatagaagtatcaatgcagcaagagttccctgatttgatttattttgataatgagcatggtaatgaggtttcggtggcagtcaaatatgagtggaaacccatagtttgcaagcattgtcaaggcatggggcatgcttcagaggactgtagaaggaaagaggggaagaggcaagaatgggtagtaaaagataagagtaagacaagtgaaatgggagctaaattgcagaagcataatggtgattttcaaccagtgacaaaaggttggaaaccaaaaaataaagaggctgtacctgatacgcatttatctaacacttttaaagctcttgagctgaatgatgataatgcagaaatggaagagcaaaaagagttgaaccaagatgtgtcaagcaaa

SEQ ID NO: 26700 - DNA, 2260 bp, Cannabis sativa
tagctttgttcaaacattcatacacaggtttgagtcttgtttccatcaattattcatttttacttgctgtatagataaatatttcagttgaagatatcggttggtgatgttagtctgttgccattattgtgaggagttttcaaagcctcgtctgttttggtccttttggacaatggttcatagagctatggtgcttgtgctacttgcgttgaactaattattacatacacagcagggagataaaccctcgagactgtaaagtttattcaaactcaaatatgcatgtgaaatatatttcttttttccttttcatttacgaaatgtgctatttagttttgtttatatgttttacagacatgtgagtttcatactcacatttctttggacctcaagcttttaggtacttgcacaaaagccaacataaactagtttcagtcacgctcaacttaaaatatcattccctaatatttgtgcatgtttaacttgatgaatagtagtgataaaaaatattaatactcaaaatcttattatattaaaagacaaccttgtgtccaaactccaaaggtaaaagtgaaaattctttctaaaacaagtcgggcaaccataatcaagtcggttgggattgcccttccagtttacacgatgctaacgacgaaactttctaagagacttatctctaaaattgatggcatggtaaggaacttttgatgaggttgtgagaaaggaaaccgtggcctctatttaaaagcatgagataatctatgccttccaaaatcttgtgggggcttaggcttccgaaaacagtagagatgaaccaagctatttttagctaaatggggttggcatatgctaaatgaccaccaatccctctactgcagggtcttaagtgctaagtatctcaaaggtaatttatgaagtgctcttataaaagtttttactccttattctagaagaatgttgtaaaagccaaagagattttgaagaaaagggtttgtaagatggttaatgatggaaaagacacaaatatatgggaagactcgtggataattcatggcaaagagtatgcaatattttgacctgctagctgatgttagacaatggagattgacatctcctcaagctctattccctttttgactctaaaaagatttgcaatattctgaaagggggtaagcctagtagttaaggaaataaccaatggatttggaccaaggagtctaacaaatttttctctagtaaatctttttacttggtacaagcttttgatcgtgctcctctctgtgttatggctccatccctttggaacaatttgtggaatagcaaaatcttagagcagcataaagttttttggtggtgtattctctctaatggctttccaatttgagctctcttagctaagagaatgcagatcgaagacacatcttgcgctctttgcgaggagactatggaacatcttttccttaattgcaacttagctttccatttatggagatcttccctattgggggtcataccaattcttaattcatgtgctagtgtctagaattggataaatttctatggggcttaaagtcaaaggggtcaatgttgatgagcttttcttttatgcttcaattgtggtgatatgatatgtcaagcccgtaacgataaagtacacaataacaatatgagtagcattaaacattatattgactctattactcattgttatgcagattatggctcatgtttgttcctttctcctccagtggtcgcctcatttttgttgggatttatgctctaaaagtaaataattaatggataatatgttagagaatatatgaaatgcaattataagataaatgatacattaattataatagtataattattaaatatctgaagattccttattcatatggagaaagtataatcttgtaaggatgtataagagaattaagattaataaaacaagtcgttagtgtattaaagtaatgagaatctttaatatagaactgctaattatgatttactatatactatacttctagagtgtgtgattttgatttagatcatatatgtagatagacatgtagtaaaggtgttgtgtataattcgattatgcatgattagatcgatatgtaataaacatctttcattaacgtgttgtttacaatgaaagagttattcatatctagggctagcaaaagggttagatgcaataacatgactcgaaacccgcacgagatttagcgagtttagatttgtcttaaatgggttc

SEQ ID NO: 26701 - DNA, 1656 bp, Cannabis sativa
tttgtcctaatttctcattgaattatgtactagaccggccctgaaattgaataagaaaaaaaaaattattaggcttttatttaaaaattatgtataattttaaacgagaaattttttttaggctcctgggcagggtgggccctagcccgtcttagcccaggctcggccttgattttgtacatattaaaaaatttaatattttctaggtagttggtgaggcaaagaatggagatgttgttggtgaaataggcttgttatgttatagaccgcaaccatttacagttcgaacaaagcgattgagccaattgctgcgcttaaaccggacatcgtttctaaatattgttcaagctaatgttggagatggaacaattattatcaacaatcttcttcaggtaaagtacaatctgttttcgccgattcttcgtgttgtgttttttagttttaaactcaagtttttcattatgttgtgtcgtttaacgcagcatttgaaagaattgaatgatcctcttatgggggaaattcttactgatacagagaatatgttggcccgaggccgaatggatttgcctattagtttgtgctttgctgcaacaagaaacgacgatttgttgttgcagcggttgctaaaccgaggttcagatccgaatgaacctgatgttaatggtagaactgctatggtgagtagtataatgttatgtttggaaattagaattggattagatatagatatatagatttataaattaagataaatattattctagactttttgttttgaaaaaattactaatgaaatttttagttttgttaaattaaaacttaataataacttgatttagacgtattattatgaccagactagttacattgttttgtctcagttcctgctaggaacagatttcaggatagttatattaggaaaagtattgatttaaacaaatggtctcgaaataatatttttcctataaactaaaaacttctcttaagaaaattactattctgtatttatcctataaactaaaaacttctcttaagaaaattactattctgcttttgaacagcatattgcagcagctaatggaaatgagcattgtgtagttcttctactagagtatggagccaatcctaatgcaacaggtaaaataatcataagcatatgttaccataaatacacacaatacaatcaaatctcttaattaagtacattttctctacagatttactgggaaatgttcctcttggagaagcaatacaaggaaagaatgaagcaataatcaaacttctcctagagaatgaagcagagataccttctagggatttcggtcgtttcgcatgcattttagttgaacaaaacaacttagaattgctaagaatgttcgccgattatggctacgatgtgacgatgccaaagatcgacggaaccacagctcttcacgctgcggtttgtgaaggaaatgccgaaatagtgagtttccttttggagaaaggagctaacatcgataaaccggataacaatggatggacaccaagagctttggctgatcaccaaggccatgaagacataaaagagttgtttcaaagtagaggtgatcatagtaataatgcatcaccaatgccctatcaaacaccaatggacctttcaaagcacaagagtga

SEQ ID NO: 26702 - DNA, 1345 bp, Cannabis sativa
attattatataaaaaaaaaaaagacttttcttctattgttcattaatatagaagggatgaagggtatttactttgtattaatttatcaataatcattcaccactttacttattcataataaaattaaataaaatgtgatggaaaaactatattactgtaaaaagttatattttgatggatattattaacaagacgtatactatatgagcacaacttagtagtgtaaaaaattaaaaaaattaaaatactaattattcttttttttgctaaacaactatatcattaagttaggccatctccaataagagatgtaaagattttgttatatttgacaaaaaataattttatgatatatttgcatcaatttttaacattatactttaatatacaattacaaaacttgatgcaaaatttaatacttttattaaaagtataaaaaaatggatttttttacaccacatactaaaattttaacttttttaccgtggggcagaattttttttaaaaatattgtattttttttttcaaaaataagttttataatgtgtactgcgttaagttttcacgattattttttagttgttccactgttattttaattgttttgttttgttattttacgattattttataaaaagacaatatttttgtaaaaatccttaaacaaataataactctataattagttttattattatattatataaaacaataaagaaataaatataaaagatttataatataatgtaataattaaatttaataataaaatataaaaaaatagtataaaaataaatataaaagtactacatttattttgatataaattttacatattgtcatattgtgatctaaattagatcaaattttactatatgacaaatttaaatcacattttacaatattattggattaaattttttacaagatgaattatattttagcaattgattaacaatttaaatttctaatggagatgctctatgttgctagaattgtataaagtgagtgtatagtaaatctgagaccatagaattgagcgtgatatttaaaaaaaaactcacaaagttcaatcgaaaaatttgtgaatagtagaaactgataaacaatggctgaaaggttctaaatggaagctaaaggtaaagataacacttttaatttctctaataccatattagaattataatataagagtgtatgataaattgtatatctcaaaatcatgaaagaatcgctcttaaatctaatatactatatggcagccgattttgtgcccatatgtgcaaaacacggattggaatccgttgtacggcaggggggtcccaccgtacttttaaatgttttt

SEQ ID NO: 26703 - DNA, 3301 bp, Cannabis sativa
tccatcaaaggtatccgatgtgatcatgccaaggagctccacctccaatcttttttttttttgcacttaaaggtatattaccctatcactcatgtgtagagagacctcaacagaactttgtggttaagtgtaagcaccaacacattttaaacattgcaagagcacttgctattcaatctcgtttgtcactaacttattggagttattttgtccatacaacagtatatctaatgaatcgaataccttctattttactacatttaaaatcttcttttgagttgttatataataggttgccctcttatgatcatctatgggtgttcggttgtcttgcctatgcttacaccttagataacacttgagataagtttagcccccaatctcgggcttgtgtgttcattggataccccgcaggtatgaaagcttatacattacttgatcttgagtctcacaagatttttcaatctcgtgatgttattttttatgaacacatctttccaatcaagaatacttgttctagtgcgaccattgatgcttttttctactacactaatgtttcttctagtgagtatcatcaggtacctaacgtcgcaccatatccacccagggaaagcaatgtcacaattctagctaggacgagtatccctcctccttgaacatttaaagttggtcgccccattgttccccccaaccatttataagactatatatgtgagtattccactgcgcaccctatatcttcttttttatcatatgacaaattttttccaagtttttcaggttgccattcttagcgcccactcggtttttaaacccacttggattgtagtatctcttttccctggtcaccacttcattagttgtaaattggtttataagataaaatacaatgccaagggtgaaattgagcgactcaaagctcatttagtagccaaaggctacaatcaatagctttgcattgattacctagaaacctttgcccctattgcaaagttcaatactttaaaattcctccttgctcaaactgccatctataatttgcaattatatcaaatggacatcaataattcctttcttcatggaaatttagaggaggaagtttacatgtctctctcccaagggtacaaacacaatagagagctccctcccaatgcagtttgtaaactcaacaaaagaatctatggccttaaacaagcctcgagaaaattgtatgccaagcttagctcaacattacttcacgatgggttcacacaatcaccttctggtcactctttattcattcgatcatctaatgatatttttcttgcagtgtttatttacgtggatgacattatcatcgctagcaacaatgtcgctgatgcagatgcctttaagaggcaacttgactccaaattcaaattaaaagatcttggtcttgtatgttttttccttggactagaaattggccagtctactaatggcatttctgtttctcaaagaccctttacattataactcttgacggatacaggttacctaggtacaaaggtcgtctctactccaatggaacccaacacttgtctcagcaaggacactggtctctcctagcaaggacactggtcctctccttactgaccccactccttataaaattttgattggtaagctcaactatctcaccattactcgacctgacatctcattttctgtcaacaggcttagtcaatttctcttagcacctcggcaacctcacctccaagctgcccaaggcattctccaatacctgaaaggcacacccggcgaaggcctcttttttttttacagtagctcctcacctcaactgaaggcctatactaaaactaaccttgttgttaatgatcttcaacttaaggttttttctgatgcagattggggcacttgtcccaacactcgaaggcttgtgacaggttattgcattttttgggacattctctcatctcctggaagtcaaagaaacaaaacacagtttctcgctccttcgccgaagcagaatatcgtgccatggccagcacaacttgtgagctcatttggcttctcaccctcctcaaagacttcagcctcaacaacacggcacccactctcatgtattgtgacaacaaggcggccatacatatatctgagaactcggtgttagatgaacgcactaaatatgttgatattgactatcatattgttcgagcacgagttcaaaatggtcaactcaaacctcttcacatcaacaccaagtacaaccttctcgatctcctaaccaagccactttttccctcccaattcaaagagttactgtccaagatgaatgttacaaatatctaccttccatcttgaggggacgtgttagatttattacttgtttgggtatagatttagcttattctctgttggtgtaccattctatccatatataaggatatttcttacttatccaatgtatatatagaacatgttgtattgagttgaaccctaatgtgatatttttcatatataagaaataaagcttttctctctctaaaacctaataacaagtattgcataaatgaattttcagttaagttttagattcaacatttgtatattgagttttctacatatttctaaatatttttatgttttaatctttataacagaataatttaaataattatgtataaaaatacatagttatcactcattgtttgatttgtattatgtaacgagtaaaatttcttgaatttaacattaatagtggcaactacatgtaggatacggtgataacaacaggtgaaatacaataataacaacgattttaatgattgtgatataaagataacgtggattgcgagaaacaatattatttttataaatatgtaattttttaatagagcaatttaaaattccttatatatgaaccgtataatttttaaacttcttaatagaactttccaatctttccaatgaaagagttttttgataaaaatgtaaaactaaaagagttcttttttaaaaaaaaataaataaataaaattattattattaataataagtaattagataatattattatatattaaattattttttaagctatattatttattatattgataaataattagttttttatattatactaaaataaaattaaaatagtccttcaaagagcgattatattaactaattttatatataaaataaatattaataatataaagattttaataaatacattaaagttcatttgtgaaaaataaaacatataaagaacaatataaaattagagatatgattttgtcccgtgatgtacttt

SEQ ID NO: 26704 - DNA, 4676 bp, Cannabis sativa
tttaatattgttgcttacattttagttaaagttgttaattttttatgattatgagctaaccgaaaacacattaaatgcacatcttcattactcataatcatcaaccaagatctatattttatttaaagcatcacaaaacaaagataaatatacatacctcccattgatgatccatccatgtgaaccatattagagcatccaagaatcttcaatatgagtacaaataaaaactcaaaatgatgttagagagaacactatgtggaactatcccctttcactcattaccattaacccacacccaaccacttcttcataagacatatttatatatatatacatatatatatatatatatttatcttatacccttataaccctaaggggctatatacaaattgggcttaagtggttcaataataataaactataatttaatgggccaactatagtattaagggtactttcatttgcttctaatacataattaagttgttaaccatcccattatgattattagcaatattaggcatatagttaataattgtgtattatggaattaaacctataattgtattagtccattataataattctaagaaaagtcacttttacagtatcttttaatactgtttggtgactaagttctcctaattatattcggaacttgttagtagcatatgctactcaataatacattcttggccctacttttattgagtttcattactcttggtgattgagatctttttctaaaaaaacaaaaacatgtttttttattctttttaaattataattattttcctcgagttgaagaggatgagtaggtttaaatagtagtcttataattaatttggcgctgggacacttcattgaattggatagaaatttcacaaacgcatcttggtgcggtgggacacaacaaaaaagatgtcaatatcaatagaaatatcagtactgaaaagtataaattcatgcaaatatcaaaaatattttcactattgatggaaattttgggaaaaaaacatacgaaagtgatgaatatttatctaaaaatataaaaattaataataaaacttataaaatactaataaatttgaataattataaataattaaaaaagatatacatgtataagtacattattttttactatgacaaaaaaaaatgcattttctaattaatatttatagctttctctaataatttatcatagtacttattatttaactcatattttctccaaaaaaaaagtcctatatgtctttaatttaataattgtatttaattatagtaataaatttcaaagtaactaatacagttatatatatatgaataattagtatttttgtcccttaaatttttgacactatatgattttgtcttttaaaatatacggtttgttaaaactacttcttaaaatataaatacataattaaaccatttctattaggttctgtttcttttaccgttaaaattaaattagcatttttactcctaaactttgatcaataataattttgtcccctttaataaaaaaattaattttaaaaattataatgttttttattttatgaatcaagaaattgtatagctcaaacaaatcatttacaacttaaccagcatctcaacctgagatttgcaaaaaaataaaaaaaaaataaaaaaaaaaagaaaaaaagaaactaattacaatgactgaaaccattccctttcttctattgttttaatggtaacatttagacctgtaattctatgctttacattcatttgtacatgtttaacacatctttcaactgtttgcgttttgttattccaaaaacaatcatttctattaatccaaatttaataaaccaagcttgctattaccccagcataaactttctttttaaattgagaaagtttaactcgagatatccacctgattgtcgcccttaaggaacaagcagtcccttaccatcccagcaattttttgatttcatcaagacacctactactaaaaacacaatagaaaaagatatgttcaatagtttcaagagcagctccacataacaagcaagatccatcttgacagatcttaaactttaagagccggttcctagtttaaagccgatcttgaatagccaaccacaatatgaagctattttttggtatgttgtatctattctaaacttctcaatgctaataaactctatttttatcatcacaaagttggttatatgtttggtggatactatacttattactaaagaatgatgcaagtggagaaggtgtttataattttctttaatcttcacaatttgtctcaaataccaactccccccttatggttgcttgatagttcaccaatttgtgtcttttaaataaatactatgaactcatttcactcacaagttgtcttattttgtcgcaactgcccaaatttatttcccaagaacgacttcattccataacaatgtgttttggaaccccaagctcccacctgttttcgatttacaaagctgagaccaagagacataaccaagattatttgtatcagctgttcattttcataagaaggctctacaaatggcatttatcttttttaacactatttttgaaagaaccattatctgcgtccaagatgagtgtgtagcaataaacactaagcttatcgaaatttttcaaccaacaaaagacatattctgagtcccccaaattctaattctttgaaccatcttctccactattgaaccacattctattaccattagtcttctagcacagatggggatccccaagagtctaaatggtagatcactcctaataaaacctgaggcatccaatactctttgaatctcttcctcttccatatcacaacaatacaaaactgatttcatttcattaggaaataatctaaatgacttggaaaacaatttaagacattgtagaagaaagtagatagattagaaatccgcatgaaaaaataaaactacatcatctgcaaaggccatataatttagttttaactctgaacacctatcatggaatttaaaaagtctattttctttctaactttaattaagatccgagaaagatattgtatacatagaacaaagattaggggagacataggatctccttgtctaattttccttttagcctcaaaaaagccatgcatggttccattaaaaaaaaagactaaatttaggagttcgaatgcataccatcaccaattcaatgaacttgtgggtaaaattcatggcaaccatcatctcctcaacaaagtcccactctaacgtgtcataagccttcctcagatccatctttatcatacaacttggtcttgcgttcttcctcccataatattttaccaaatcttggaaagctattatattgtaagcaatataccttccttatataaaaccacattgattttgagcaagaagttctggtagcacctctcgcaatctcatacaaatcatcttggttaccactttgtaaataacattacaacatgtatcagtcagaaattactaacactttcagggtatttcactttggggatgagtgttaaggttgtagactttaattcttttagcaacttgcctgaatgaagaaatgagaggactgcattagtaatatcttttccaacaatatcctagttatcctggaaaaaatagctactaaaaccgtttggacatggtgctttacatccaggaatgctgaacaaagcttctttaacattagcttgtgtgaattcttgcaataaaaaatctctcctttgttgagttaatttcggcccttgattgataatctgatggtgtacatgcttcctttgatccatcttagaccccatcaaagtcttgtagaagttcaggaaagcttcaggaaagcttcactcacttgatctggttcttctacccatgtttcttccatagtgcaaatagagagaactctatttttcacccttctagttcttaggctagcatgaaatactgctgtgttatcgttaccttccttcaaccattgaattttagctttctggtgaaggaaagaatagatatgcgttgtgaatctccatgtattttttcctcgcttccatctccttctggcatagagattcatttaatggatgactttgtaaagcagcctggctgtctagcatattattaaaagcttgaacatcagcagccactatatcgccaactcgagttttgttccattctctaagtgccagcttcaaacccttcagtttgcaaactagctaatacatatatataagtaccttccacatgctccttccaattttcttttaacagctccacaaagccttccatttgctgccacatttagaaaaatcgaaaaaggccaccttcacattttaaactctcgatatactgttaatagatgggcaatgatcaaagagaccttccgacttaaatacaacctcattattttcatatttattcagccactcttaatttgccaagaccctatcaattttcgagtgaatttgagtataaatttctttcttattgctccaattgaaaaaggatcataaaaacttaacatcttcaactttacaggcttctacacactccttaaaagccgttgatttactcactttgacaggtctccccaccctttcatcgagattcaatatattattgaaatctcccataatgagccattttcca

SEQ ID NO: 26705 - DNA, 2578 bp, Cannabis sativa
aatagtggaattgttttgtacaaattagttgagggtctaaattttgatattgggggtttttaagggcaaaaattgaaatttccttttgattatgtaataagaatattattatattagaattaataataataatgttaattctaattgattttatttttctaaattttttatttaatttgttatctattttttttttttttgcttatttaactttatttattaattaattgtaaaaatattataataattaacaattaagtcctaaatatagaatctaaataacgaagatggtgcatatgtttatgtatatattaagattgttggtataatttatttagagtattgtcaggcatggtgtctaacacttttttgacatgttacgattgactagcaatacttcctaacaactattgtattaaattatgtaggattcggtacttagttagagcaatagcgatactaacacataagaggatttggcatttctctttatttaatgtaacacttagtatgatcaatcttaaattatttatttcatctctctcattggcaaaggccaacttcgttgacttgagactttgaaatagttcaacttcaacttcttcttcttcttcagttttcattcttcactctctataaaccctctctggcgtcatctcaacgcacctaaaaccctaactaaccttcgatcctcttcgatcatggaatgtatggaagaaacgatcaaattcaacgcccttcatatcgatgaaaacagcatcgtcgccggttccttcttcgacaggttagtcaaagaagaagaagacgaacaagaacagagcgaaacaggggggaactatgtgatcctcaacgaagctgagataaggcaacgccaggaagatgatattttaagggtttccactgcactttctgagtcaagagccgccgcgatcgtcttgctccgacactttaactggaatctcagtaagctgttcgacaattggtttgacgacgaagaccaagtccgaaacttagttggcctctaccggaccccgatcgtacttcggttcttgtccgatcatccgattacttgcggaatatgccttgaaatatgcgacaatattagtaatactacagcttgggcatcttgtggtcacccattttgcagggactgttatggaggttacatttcgaaatcgataaacgatgaaggaccgggatgtttgtttctgaggtgtcctgacccatcctgcggcgccgccgtcggtgaggacatgatcggaatgttgatcatcgacaacaccatcaaattgaaatactcgcggtaccttttgcggtcttatgtggaagatagttacaggaagaggaagatcaaatggtgtcctgctccaggctgcgattacgccgttgattttttcgacttcatcgggaataattgtcggacaggtttcgatgtttattgccgatgctccttcagtttctgctggaactgtaacgaggaagctcacaggcctgtggattgtgatacggtggcgaaatggaacatgaagaacaaggacgagtctgagaacgcgaattggattctggtcaataccaagtcttgtccccaatgcaagcggctgatcgagaaagaccatggatgtaatcacatgaggtgtgctgctccatgcagatatgaattttgctggcattgtcttggtgaatggaccacaaaatcattccattcttgcaacaaatacttaccagaggctcctgctcctgaagctgatgagaatgacatcaaaagaagagagatggtgaaggcgtctttgctcaaatacactcattactataaccgttgggtagccaatttaagatcgaggcagaaagctgtggaggccatacgcctagtacaagctgaatatttagataggcttagtctcttgtatggccaagagaagccacttctgagattcataacagaggcatggcaacagattataagatgcagacgagtgcttcaatggagttatgcatatgggtattacttccctcagcatcaatgggctaaaaaacagttttttgagtacttgcagggtgaggcagagttcagcttggaaaggcttcattactgtgctgagaaggagctagagaagtatcttgatggtgaaggttcttcggttcaggaattcatggactatcgtttgaagctagctgaattgacctctgtaattgggaactactttaagaacttggttagagctttggaagatggtctaactgaggtggagtctaatgggacttactggtcctgtgagctatgcagctttatgaattccttggccaccactagatgccagatgtgtcacaattttccaatgaccatcgacttatcataatctgtttttttggcaggaggagccatgcagtgcatagtgggggtctaacttttaaataattgagaggctacattaatatttattgcttgtgttgcttcttttataatagttatctctttttaacttgttttaagccgaggaattgttatgtctacattctctttcttgtttgtgtatctttgtatgtacgttactagaaacattattacatatatatatat

SEQ ID NO: 26706 - DNA, 2026 bp, Cannabis sativa
  modified_base (161)..(164): a, c, t, g, unknown or other
cgaatacagtgtaatgacaaatcatgggacttaaaattttaaacatataatcatgattatattccactgttttgaaaccactataataatgaataactatataaactcgatttaatagagtttatacattaatcacataagcatgaaataaatcatgtgannnntgcaacataaaatgatttctaatcttatattaattagtaaatcttattatattgaaataagttttatttagggcacaaaacccaacaccagattcgttagaccactattacccgtccgttttgagctggcattcaacaccatgatctttgtagcagtgtttgtgccatgcataattgtgttaccacttgcacatccagctggtacaactttacgctctttggtactagcctcaccggtcaaaatcagaacccccacttttaccaccgtgttattttgccaaacattgacaggttcttcctgagcttcacaataaatctcggtgcccaacaaagcaagctcaatgttttctattattggcaagacattttcgtgttcatccacctgtctttgggcctcctccacatctcgttgcatacactcaagctcatatggggcatagtcagatcgagaaacaatctttacaacgtgactcaaagtgcatccatgatccatacattgaaatcgtccttccaaaattatctgaatcatgcaacgatgcattctacaaccagcttctttgtgacccttagtgccacacgcaggaggttttgatacttaaagtagcaccacaaccacaagtttactccttttttcatgggaagtatgtgttccactagaagcggccatttgagttggaattgcacctagaacttgatgtattcattggttgggaagccattgtgccacatatcaatactaaaaaatgatccaaacgtttcggcaacacgaattgcattattctgagactagaacccagtttggatatcatatactctaacccaaaattgtgtcaactagagatccgcagatgcccacaagccgtctttcgggataggcttggcaaacataaacccatcacaaacattcaatggtccctgtttgatcatgtctcagcttcctttcattgcatgaactgggaaataaatgggttttttgccacttttgtaagcttccatccttgtttgagcttccatttttgggagagaaatgaccaaaggagtctcagaaagatgaccttcttagagatgactcgagccactagtgattgttcattcaggtctttacccaattcttcaaatctttctaaagttactgagagatctttgacgtgaaatcactgttcgcttcattatcctcactatacatcactacattactcttgtctaccattggcaatgaagatggtagaaggagaaaataaaagaaaagggaggtaaagaggctaagcatacaaaagatacagagtaaatgaaaccctagaccacttaacagacttaaagcaggatcaaagcgagagttgagtaggttatacgagagcattttcaccctagatcattacatctcaactaaactaatgacatgtctagaaagaatggatccccatgatggacaaaaaactcttgaaggaattgaaaatttggcaatttttagttatatacgtaattaacaaaaatatcttatagataacgacaaaaaaaataaaacatcctatatatgtacatgcttatcgaaaattaaaaaaaaaatcctatttaactaaaaaaaatggcaacccaaaatttttaggcaagtatcgtttgcccaaaacggtgtgtactacacccttactgagcaatatatattcatctgagaacaaaaaaaaaaagaaaagtttcgatcaaccaacaaaatccaaactcgatcatcgaagctctccaatcatgtctgtggaacctagcaactaaatccaccattaaagctacacaaaagcttcaattctctgtaatcaaacaaattttcaatctcagactcgaatttcgcaccattcgaatctccaccattg

SEQ ID NO: 26707 - DNA, 2425 bp, Cannabis sativa
gtagtatatatttgacacttttgttcttgttccaaaaaaccatataattcttctcttctcaaaccaaaaaaacccaaacaaaaaagtttctctctgatcagatcaacaaagctatagtactctcaatacatatatataaaaggtttgaactatatatatatatatactttggagttaacgatatcaaaatgtacttttatatataaattataacaacattcactttgggcacaatttgttatgtaaatacatgacacttttttttatatcaaattggtacgtaaaaacacatataatatttatatatatatatatatataaatatatgttgtgtatgtgtttttttttttaaatctcaaacatggacccaaagtagtgtactttgtttggttatttttttttctctgttagctcatgaaactcttcttttgctttttgtgaaaactatacagataaagaaagagagagagagagagtgagatatatatataatcatatcatgtgccctaatagtagtgatgaatctcaaacaattataaatgggtctcttgatgaacctttgttacctaaacaaaatggaataaatatgagaccactcgtcgttgagggcggtggagatggcggcggtggcggcggtggtgttggtggtgccgccactcgctttttacaaggctttcttcaaaggttttttccggctaatagtcttctacgaactctaccccttaatgaggtatttctctctctctctctctttcctaataaaatgaaaataattgtaatgttattattaatattttgggttttttttttttaagtatggcaatgacataaataaattacatcaaaataataacaattagggcaagggaataatgcaaatatatattaatttctatttctttctaacctatgtttttccttaaaaataaattcttcatattaattattacatatgttgaaaattcttctattttgtaataaatatttctttatagtgttgttccaaaaaaaaataaaaacagaaaattaaaaagaagaagaagaagtgttttatgttattgatagtgtaattagagaaccagttaatattaatccttaacccaaagtaagcaaagaagtttttggattttatattttattattaatattaattattaattgttttatggggaaagtaataattataacaagcttagcaagcatgcactaattatattctccaaaacccaaaaatattaatgtatgtcttttaaggaaacagtactactactcactaaaataattattaactactataatagttactcaattaataattaattaccaatctagggtttagttaaacaagttattatttgatcatatgaatatattaatcaaaaagctaaagatatataattaatattttaattaaattaaataaaaggtgtgcttagagctggactacaagccctcatgagcctttcttgtttattttctaaaaccatataatatagtataattaaaccttgtgaagatcaagattctccctttctttaaaaaaaattaattaattaaaagaaagatgatgtattatttatatttttaattaattaattaattagtaaaaataataattatacgtaccgttagatgccaataacagtacttgtgttgtcctaattaattaattattattatcttacttattaattacttagaattatctcaattcatgtatttttatgtaacaacattttaattacaacatattttttgtaactaaatattacttttttttttataaattactaaattcactttagtcacagcaaaaattaatttattattaaaatataatatttagataaaatttattaattttaattataataaatattgtgactaaaaacagatttaatgacaacaaaacataaattttgtaactaataacatgataacatacgaatatatagtgatttatagaaatttttgtagtaattatataaattaatatattaatatttattggaagtttcgtatgaggtggagcattttttgactaactaattaaaaatttattctgaattattgaaattgttagatttaagaatatctatccaattttgtttaattttactagcgtgcacttgatgtgaatagaagtttgggtatacgatttggtatatgtcaaagttctaaagaaattattttgtacatgtcaaagtttgggaggtacaatttgatacatgcatagacaatcgttacgttagtaattttacctgattttaagaaattttgaataatttataacatcaaaaacaaagtttaaatatagtatgtttcacacatataaaaaaattaatttaacatgcatgttactaactatttaattaaacactatatttttagcattgtaaatttattagaattttttgaaaactaa

SEQ ID NO: 26708 - DNA, 3283 bp, Cannabis sativa
ctcttgaactagttgttagtttctttagaggaaatttgattaagtactttgctcatctccgggtaatgggtcttagtccgccacgtgtcctatgccgagacttccacgtatattgggaaaaacttggagcaatacttacccccaagtcttatttagtcgtagataaataagacttgtactccgtctctgacctcaataaatgtcgtgacacgtgcctcgagcgtgtaggccagatttagaatcgtcatcattcttccttatctctttagcaggcaacgattcgtttcacgcctattgacataccccttcatcaatcttgatgtcagaaatatactcaaacatttcgaccgccttttctcctcatcatgctctttcatcttgtccgttggattagggaatttgaacagttgtaaacccccaccgtgcgatggtacttatttgattctgtttcatagccgagatgacctatataaatcaacacttctctcgactgggttacttttactgccctttgattttcaaattctcaaacccatttaacgaaattccagacttttcaaatttcctcctactcttcctccgccgttgccaggcgaagcattaccgtcgtacgacgcctcttctccctactttgccctcattgtgtaagtctttctttttgtgcaaatatttcttctttgtttgctagggcaagtggcaatagtagctttttctaggaaaaataatgtgcatgtttgtttgccttgcttatttttccttaaatgacggccatggttgctgtctgggtaatgtccccttcagtgggtgtccgacgatgcatttcttcttcttctatcattaaattttttatttattaatatatttagggaacagagtcggagaatgttttggctctcgtccccatgtgccctttctggcagtttcaaattgcccttgcatgtcttctattcttttctcttaatcttcccgcaaggcttagatattttgcacctgatgcctgtcgttgcgaatcgtttgatgattcctcttgacattcatccagagggggtctctttccagcggttaggggacccccattcccctttttggcttagggtttgatgtgggggctaactgttggatttcttatctttttcagatgagtgaagttctacaagatcttcacgaccatggtttcttcgggtttgaccaggaaatcctcgagcttcaccgagccaattccatgtcgactcttgctacaaccgacagcaagtcttccaagaaagggccaaagaaattggccaccttagaggaggttatgcagggtccgatcgcttataagttttttttttttgccgttccaatagttgggaggctgatgaactatgttcgtcactaacctgcgcctaccagctggagaagatagtgaccgtaaatgggatcaaaccatcgagttccgaagtttaccatcgcctcccgagggatgaggagactccaaatcataactacattggttttggggcctggagccagacccatcgcatgtctggggccatgctacctctccaagattattttattgacttcctaatttttgtcggactctcaccataccagctgatatctcaagcctaccgcatgttatcaggcctttttcattttttatgctgtcaagggttgggctactcccagcctcgctgaaattttgtatttttatgaactacttttcatccccaaaaaggaagacaagtttaaagatggtttttacaaactacaaaagctcacccggccaacaaaatcccagtaccctttaattttcaaaagaatatcaaggaataacgccataggtttttcttttctttcaggaattaaggctttcgagcatccagacctattgacggagtgggttaagatccccctgatgcaccgtaccgcgcccactcaactcttcttggaccacgcccaagtgtttgtgggctacaagaaggaagacatgaacgtggaggacttggtgataaccgtgaactgttggagggccaaggtgattttgaagggtcaatccattgacgattttaacttccaaggtcatttgtcccaacgcccaaaattccaggagtgagaaggcgcttagggtcgacattatttcttctgctgaggacaaatataacaagtacacgtataagagggagcagaagctcgcgctcaccttcaggctgcctccggaagggtcattcaggaggaggcaggagaagagaaaacaccagtcatgcccaaattcccgttcctggttccaaactctggggcccctagtgtcagtacctctggagcctgtaactctcctttgaatattcacttcgttccttctgtccaggattatgcgaacttaaggccagtagaatttgacatgagattatatagatcttatttaaaaaaatcgaaattttagaaaaaatcttaaataacagtactaaaatataattaagttttatatatattttttgctaataacctttgaatgctaaatatatatgaatatacactataaattaaaagatagaaataataaaaagtaggaaagattctgatatttaacaagagtgtgggtaggttggacaatattggttaaaagatgtgcatatagtactaactaaccatacaaactgccaatgaaaaaatttcaataaaaaaattactctcactattattgattgtaggagttttcctcttttattatacacacaacaaatgaaataatcaattttccaaggtcaaaacttacttttctcactgagtcaaagctcaattgactcccaagagttaaaaccataaacgacaatcttttaatctctagactacaagtcgtttttgacttaaccctaattaatcctccaagaacaatctctaacccttcatttcacacatacacactcgatacacaaagagaaaccctagtagagcttcgtgtttcttctttgaagaacacgaagtctgctcaaacccaaaaaatcaaattcaccccttcccagatcaaaacaaaatcccagaatcatacataaatcaaataaacacaatagtaaaatgcagaaagaaaaatagaacgaatgcactagagatttatagaggttccccaaatgttgctcggtacatcctcttcaagctcgcctcagattgctcgtttccactatggatcttcaaagatcaaagagttacaatgatagattccaaatcacaagtacgattggtaatcttttgtgtttacagtattatttctctctctctctctctctctctctctcaccctcct

SEQ ID NO: 26709 - DNA, 2717 bp, Cannabis sativa
atttgcatgtaatttatttgtattgtgaagtaatatatgtgtaattcaatatcaaaaagcccaaaaaattaacacttttatttaggttattgtggtgtaatatatattccaaaaaggtatatgtgcaattcaatatctaaaagcccacactttttaaaatattatcatttgcatgtaatttgtttgtattataaagtaatatatattctaaaagagtatataagtaattcaatgtgagaaagcccaaaaacattgacacttttatatatttatttttatgttggattttttctaacttagtcaactatggttttaagaataattaacttaataaactcactatattcagcttataataactaaataaaagattaataaaaatcctttgtcactaaagacaaactagggtaaatttactagtttactctttcggcctcaccaagaagtaatcttaccacctaaggacattttagtcaaacttataactctgaatattcccgatattctaaatgtctaactaaattactttgctatttctaaaatactaaaccaaaataaagtgactctataggccatacgtcgcatttgtactgttatcggcataaaataggaaaaacataaaatgtcacatataacatatagcacacctagaattcaaatatatctccataattatgtaaataataattaaaagtattattctaaattaaaccctaattatttgctaatttcatattaaagttaagcggtcattacaagggatttctagactgtgtagttgtttcgatttggtctgagattcaaggggaggagattattgtttgggaggggaatttgagcttctggttctttatttgctgctcgagcttgtggttgactggttctttctttagttgcaggatcaattcaaatcccaggataactgccattgtcgccattgttcgacatggctctgataccatgtaaaactctgaaaaacaaaattgtttgagcagagagagaggaaaatggagaagagtgaaaatagtgaaataaatgctcaatcacataagattggcttcggtattgtatttatatagagattcaatcacatgttacaactgtacaattaaagataattaagtctaactaattgtaacaacttccaaggaactttaactaatttttacattcaattattctaacaaatgtattatccacaagaaaaaaaaaaagataaaaatgtgtgcaatttgtatgtgtttctaacattccttaaatgatatgtttactggaagaaaatggaaacaatttcatgtatttgtttaatacattttgtaatgaaagaaactagtagggttcacataaattaaagtaaaaataaaagaaaatgttttcttttttttttttttaaaaaaaaaaaatctcaaaatcacatttccaccaactagcttagaagaaaagggaggggacaaggatttattgattaatagcatcactttaagataaatgcgtggatacaagtacgataaccgaccacttaatcttactggtaaaagcatacttaacaagagtgtgaactgcaacattaatagatctaagataatgagaaagactagtaaattaaaaatagaaaaactatgtctaatattattcaaaattactcttcaaaaaaaaaaaaatattattcaaaattaaacccaaagatgaaactaaaataacatgattattaaacttgttcaccaaattcaaacaattaattttaaaaaggacattaaagaaacctaacatctgacactaaaaactgcaattcacaatgccaaggcctctgccaattcgggtggataatcacccaaaagataacatatcgtcgaagccaaaacagctctcactataaaaaaactgctatttttagtgacaactttttagtcacaacataaaaattttgtgactaaatgtaacttttagtcacatcaaaaaattatttgtgactaaaacataacatttagacacaagttgtcactaatttagttttagtcacaacaaattgtaatttttgtgactaatatttttagccacggactttttagtcacaacatagaaataataatttataattagttacaacttttttacttttagtcacgaattttgttgtgactaaaagtaagaatttttatagtgctctactatcatcaagaaccatcataccaaagccacaataatcctttttaacatcaagagcaatatcaatattgatttttaccatctccaattgaggcaaaacccaccgaggaggcaacaaagtatcaacttgaggactaagaaaaacatccaatagtaaagtcctaagaagaactccaccactcaaatcattcatttgatagtctgaaagaaatctccaccacaatgcaccacgaacagaataaaatattattatgaaggaaaggttctcccttatttttataaagaatgtcatttcttttcttaattaaaaatgagaagacaattttgctcataaaaatttataaataaaaaataattatatattattaagttaacaatttagttaaattaaaatattttaattatcttttttaattatgtaaataaaatgattctcatttcatttacggtcaattactaattaaattttatattttaaatacagtgatatcattaaataacatgccataaatatgttattaacggcatgttcggcaatcattttgcttttt

SEQ ID NO: 26710 - DNA, 2999 bp, Cannabis sativa
  modified_base (2278)..(2280): a, c, t, g, unknown or other
aaattttaaaataaaaaaaaaaaacataagtatctaaaatttcgagtttcaccatgagtatcgaaaaaataaaattattattttcgtggagtttcgttagtataaattttaaaggttcaattgtaattaacataatattaagttgtattatattatattaaattgagatatttgtgatgaaattctcttaacatttacgattgttatacttacacatataactctaatttataaaaagtgacagcaaaaatattttatcttataattttagtcattaagtgctaactcaaaaacacataacaatatattattgaattatgtattaaataaactaaataaatatgtcgtgtttttaattgacacttaacaaccaaaaaaaaagtatgactacaacaaaaccgtaaaataaagtaattttgttgctatttttttatggtcatatgtataacaattataaatattaaacgaattttactgcaaatatctccgttaaattaaattgggttatgtatatatcaaaaataaaaaaaaaactaagaagcatcatgtatatttctttttgtctataagaaaaaagaaaacaaaaaccccaaaatagactaattataatcaatttaacattttcttcttatgaagatccaccttaaccttatatccccaaatcacttccttaatagaacacaactcattcttccataaaacaaagtcatgccaaaataatttatgatcatgcttaataatcaattccaatctcaaaataagcccacacaacatacaaaccaaactactaataatcccattttcaaacttaattttatgattattaggagtagaattagtggtagtagtagcccttcttcttgaagaattgatcatcatcaataactcgttttcttttcggttcaagaagttcataacgttattaactacctgaatagtgtagcccttattttctagtactagcagttttggtactaaaatgtttttgaatagtacaattatttggagaattctttcttcgttttcgtccgaaatcaagaagaagaaatcaactaatatggaagagagtatttctattgccgaatctatagtttgattttcgagatatgtcttcgtattagttgcaattttctttgattgagtgtcattgttacataaagtgacaatctttaacaaccaattgtaaagaaaattattgtcactattattgatattcaacattgtttaaaagtgagaagaactttgagagagattttatgtgtttaataataattaaaattatatatagatagatagatatatgttaattactaatatcattaagagaatttaaaatttaatatcttaaaatatcgtttcataataatcttttttaaaaaaaaaaataataaagttactaatcatattctttatttattcattttaaatgtaaattattcaaagactgaataatcgaatgaatatctaatatctattggaattttatttatttatattatgtaattaacagaagaaaaaaaattacaaactctcttcccactcaaatcgtcaatgtaattaaataaaaatataattaattttttttatgaaataaaaatataattaataaatcattcaattcgatggttatttttaacaaaatattttaattgtactaattattttggcaaataataaattagatcttgtatttttaaaatggtacaaaatagtatctaagctcaaatttttgacaattaatttgaaaataatttttagcatgaacagatacagaccgtcttgtcgtaacacttttagatcaagttattattaagttttattttgacaaaaaattcgctcaagatactattttgtaccattttaaaaaatacaaggttcaatttatcgtttaacaaaattgaaggtccaatcaataatttttgcaaaatacatgattcaaaatgatattttataatatgagttttttttttaaaaaaaaaggaaaattttatttacaccctcaaaatttgtaaagacactttattttaataatttttattttatataaaatttatgttgtattaggtttttttcttaacttttttctctcaatttataatcttaaaaaatataccatcaaacaaaaataaattatattttaaatattatgataaaattaaaatatttgaaatataattaaaataaaaaattatataaaattttcttagaaaaaaaatatatgtatatatatacatgatttaaaaagaaaaaataaaatataaaaataaaatcaaaatannnattgaaattaacataaaataatgttagaaaaatatatattaagagtaattttttaaaaattatttatttttttaataataaggtatacttatcattttatggggtgaatataactcctaatgattattagttgagagatgcttataatatcaactctaaatgagaaaatattaacaaataaaataccacatctaggggtatctctgaggccaaccaagtggaagtatgaggattgtgatatcatcttaaagaaactaaagctgaaattacattcttgggcaagccgtcacctatcctttgcaggtagagttcttgtaataaacattgtcttaattggaatcagaagttattggatgagcatatttcaattacctcaaaaaatagctaaagagattgaccgattgtgtagaaactttctttgcggggaaaaggatgatcggagcaagcttcatatggcctcttggaacttagtatgtctaccgagagaacttggaggtttaggatttcgagaaggtcctgaatggaacaaagcggctttggcaaagtatctatgggctattactacaaagaaagatgtactttgggtaaaatgggtgaacaatttgtacataaaagatcaagagatgtggtctcttgagctgaaagggaatgtgagttggtattggaggaaaattctgagattaagagattcattcactcgtgaagctatcatgaaagct

SEQ ID NO: 26711 - DNA, 2229 bp, Cannabis sativa
actttctgtctaggaacattagtgatattgacctcatcggttgtgtcaatacaatagacagtgggaccatcttacatagagtaagatgataggacacttttgaattggatcaactagtatctcatgtactttgctactttgttagatttagtcatgttcttagaaaagtagtattttttaaacaaatacttttttatgttaataaccataggatgttccacccctaatcactttagagtaactatcaaacatgcaaactttagttaacagttctggcccttcttaagttcattatcaaggcatccctgaatctagatatggtttacactaagtatacaatcattccataattctgatgttttcttatgattatacttagatgggacgatacagaatgtcatttgctatccctaaggcatttccctagaaggactcagggagctgctagtaactaatcttagacatttaattttcattattatgcaatctgaatttttgggaaggtaagtttgtgtacaattcaaagttcaactgactgatctttgaactacataatcaaatatttctccatccctatcagttcgtaagatctttaaccacttaccataattgttttcaccatcgctaaaaatttgtagattttctcaaatatttcaattttttttttgcataagaatattttagagtgatcatctaagaattcattgataactcatatccacctctgaatgtaaattcatatgtttgaagacagaagtggattatggcatgttttctctttgtacaggataatcttatcaaaaccactatgaacaagatgcaaatgccatatatatattattgtggctgtggtcttttgatgatactatgtttatttacaacaaagagttcttacaatcgtttaaggggattcttgtcaacaaaatataaaactcataatccatacacttaacagaaagtttggatccattgatagaaaatggatattgagaacttgtgaaagttatactgtagtgtttaatgtattctagaaaatgaaattaaatttttatttcgaatctaaaatttaaagtcaaagacataaatttatacccaatgagtaattcttctagttggacccctactaaagtagtaattcaactctaattttaatttccttacatacaagtatttgaagtaggagatttttctaagatttgaggattgttattattacgggatataatatctataatatggtcatttacaacatttactttatagaagaaaataaagtgatatcataagcagatgatttataaaccttcttgtcaaatgatacatgttaagaatttttttaatgaaaaagctaagaggaaaactaaagaacaatttcaattgaaataagagttcgatgatctccgagtaggagaaagccaacattgttcttatttcataaaattctttatcgtttcagcattgtaaacactagtctaagttttcatcgtatggatgagccaactagattttgtatttacaaaatatttatctcacgagatctaacactattatgttgtctaatagatgacaatctattggggattgtcccattaataataataagccaagttataccaacaatgaagattaaaaattgatactatataatcaataaatgaaaacaatacaggtaaatataaattcatacacaattttcaaaaatttgtcagcatttagcaagtaatgaagatatcaaaaaaaatacaaagcactcaaatattttccaaggttatcaggatcgatatacagtgtccccgtacaagagagtcaaagatatcatcaattgagtagagtagtcagctcatctaaaatggacaccattttagcaaccttttattttataaaaataagaatccaacattttcccagtaggcgagagtcaaggtaattcttattttatgagattctactattatttcttatttgtaaatttaattctatgtagtcatcatagggatgagtctactagaaaaaaaaaatcaacaaaacacttatcttctaatataaaacggtgttaatgtttaatggatgaacaatcatcaagggcacaaaatcgagcgactcgagatcccattgaaaacaaaatcatgtaagaccaatagtggagatcgaatatcttaaaattagagatcattgtttttgaagaaattgtattttatttaaatatttattccaatctatttattttaa

SEQ ID NO: 26712 - DNA, 3898 bp, Cannabis sativa
aatattttgatataatataaagtttaattttcaatacaaaagttttaatttgacatgtttttcaagaaaattctgtgattagcaaagacttccctgtaattgaaaaaacactgtagcgtgccttaacatttgggcgttacagatgagtgttgattcaggagttggaaataaggctaatcagaacgagcttcctttgatccaagaggaaccagctgctgaaatcttcctagacccgtgcgaagaactggagaaaatcctgaagggaaaatatgaagatctgagtgccttgaaaccaaatccccgatctactagctggggagatgaggttaccataacacattttcaagcttcagccaaggatatgtggagcaatttcaatgtaaacaaagttagaactccctcctcaaggctttgattatattgaacccatgaacattagggatcagtttgtggcaaaacttgatcaagaggaagtagaaattgacgcatcctactggaaatcatctatcatctgtattgtattaggtgccaacccgcccttcaaagtttttgagggttttattaaaagaatttggggaacttaggagtggaaaagattgttaggatgcattatggtttcattggttagcttcagggatgaaacgactagggacatcatacttgaaatgggagtgatccattttgacaaacaacctaagcttcttaggtcgtggtcttcatatttggatactaaccaaatggtgtgatctgtactagcctttattaggctaaatggccagggtctttaatattagggcaagaattctatgaatgctttagtgagcactataagcaagcctatcatggtggataaagtaacacttgagaggtctatgatcaagtttgggagagtccttgttgatgttgagatttcggactgccctccaaaatctattgcattggtcaatgagagaaagcaactaatggaataaattgtagaatatgaatggctgccatcaagatgtacatcttgttctctattggggcacattgtagctaattacatcaaaggaaaacatgtgacttggaagaagaaacaacatgttgttaagaaagatgaactagtgcagcatggaacttatgacttgaacaattcctatgttgatatatagcagcagagtgattctatgcagcaagaaattcaacatagtgttgcagttcagcaacacactgttggtgcgaacattatagcgtccctaaatgaggaaagggtagtgcagaagctatcaatagatgtaatcacagagaacagcagggggataaactctgacagattaagtgattcaaaccaatggatcactcctaggaaataaggctcaaaaaatgtgcagaatctgagtactagagcccgtattagtgacggatatgaggtgctaaaaaagtagaggaagaggcggttggtactatttagaatcgttcttaatgatggataaataaaatgtcttagggtggaatgttagaggactgaataaaaaagaaaagcagcttgagttgttagatatttgcaggaataataaagtttgtttttgtgctctttttgagaccaaaatcagccatgaaaaataaaaagtgtgaggaagaacttacccaactagaattgctattctcgtcagagtatgttttacagaataatgttgatatggattgataagttagtccaaggaaggatgattatggaagatagtcaatttgttcattgcaagatcaatatggttggcttcaaagaggagttttttattatggtagtttatgacagtaactcccttaatgagaggaaagatgtttgtggtaaactgccatgtcatggtaatttgaatgagtcgtgaatcattattggagacttcaatgtaatgttctattataaggatagaagtggaggtagacaagtcaaaccctctaaaattcaagatgctcaagactggctcgccatgggtcaagttgattagttgaaaagtttggggacttactttacttggtcaaacaagcatgaagagggggtgaggatctactcaaaactagacaatctttgctaatgaggcttggttagatcaattcccaaatactgaagccagctacagatggaggaaaattttggaccatagctactacattattaaacctactgaggttggtaactattgtaacagaacgttcagattttgtaacttttggatgtttagagaggggttcaaagaggtagtgcttaaagggtggaaggactctaaggctactaatttccaaaacattgtgaagaaactctacagggttaaacatgctttgaaaaattggcataactcagagaacggagacttgaaaaccttgtatatggctgcaaaagaggaattcataagtgcgcaagaacaaccggctggcaatccctcttgccctgtgctcattcaaaatgagaaggaagtgcatcaaagatacttggctactcaaaaaacttatgtaagctatttacatcagaattcaaaaattaattggcataggtttggcgatgagaactctaactacattcatgctatcatgaagaagagaaaagatgaaaacaagattgtgtcttactggaagggggactctatatttgaggactaacccaaagtggttgatcattttcttcaacatttttcgtaattttacggggaagaaaagctcagctactagaaggattgaagagaagcctggggtttgaaaacaagctagatctccctcaacaaatccaactaatttggcctttcagtaagtcagatgtcaagaaagccttattcgatatccacaccaccaagagcccgggtccagatggttttggttcaggatttttcaaagggttgtggaatgaaattggagaggatatttctcaagccattttggggttctttcaatatggaaacttgccaaaagatctcaatgagactactatttcccttattcacaagattaacaatcctaaggatgcgagtgactataggtcgattgcctactacaataccctctacaagtgtatttctaagattatctgtgctcgactttcaaaagtgcttcctagcctgattcatgataaccaaggtgcctttattaagaataggcagctggctcataatatgttgatcttccaacaacttcttaaaaaataaacttggaagaaagtctcaactagaagcatcttcaagatttatctcagcaaggcggacactgttgattggggatttttctctaatcttttaaagggcctttggtttccttataagttcattgtttggattttaagctgcctccatggtgcttcctacaccctaattatgaatggccgctttcaggggtcctttaaaggggagaacgttcttcgtcaaggtgatccgatgtcactgatgcttttcattctgaccatggactacttgacaagagtgctgattcagagatcctccttgaaaggctttaggtttcaccctccctgtaagtccttaaagcttgtgaacatttgcttcgtggatgacttgattattttttgtaaaggaaatgaaaccttggttaggcatgttcatgaagtttttaagacttttagtgaaattacgagccttatagctaacaaaaacaaatctctggcttactttggtggtgtgaatgaaatacacaaagaaagaatcttgaggatgatgcaaatagaatagggcagctttcccctcaactattttggagtccatcttagaccgaaaaagtggtgagcctctgattgcatagttattattgataagatccataagaagttgcacaacttggctagtagaaacttgtcctttgttggaagggctcatcttaaatatatatttttctaattaattaaatgttagaaaatataatt

SEQ ID NO: 26713 - DNA, 2689 bp, Cannabis sativa
ataaacttttcagaaagttccaaaagtgtaagccccacaattgatgaccaatgataacttaaggaataacatctaagaaaatgaaagagagctacaaaccacctttcaaaggaataagccacaaacataattatcctttgaacatgaagaagttatataaacataaaaactaaattatgttgagatttccaacagcacagtcccaaagcaaattcgaaaacctgattccaataagcagaaggattattattttgaaaatctaaaagcacagataaatgttttacaattactaagatcttcattctaactatgacatcatatatgcaataaaaaacggatcccaacaactagtaagaaggtaaagatatttaaaagagtagtatagtatgttacttaaaatattcggaaacatcttcatccttaaaagtgctctcagctggaaatgtcaagtagatctgtcttgaggccgagttcatcttttcagcagcagacattgacaaaaagtcatttctttctggtcgacaacgcccaaacttgtaaaaatcctctcccatcatgagtgctgctgctgcggctgcggctctataatgaaacccaaaaaacatggataactcaacatatagtatgtacgcgtacttatacaacgtatgaatatataaacacaaataagggccataacgaatacgaacgacaatcacttcaaatgtatgtagtatgtaagtatgtgtattaataatgaatatatatatatgtatatacctctgggggtcattatgctgttgcaagaggaaattcatatacttgttaacagatggtgagactccagccatgaactgagatgcagcagctaacctttgctgctgctgggcagccttccatctcatcatttcctcatgttcgaaaccctcgaacttactcggcgaacccacaatggcaccagaaggttccactacatctccgaagccgccatgcacgaacttgcagttgcttccgttcttgcaaaaccctctagcgaagtaaaggcaaggcttaaatccaatacccaagcctgaatcttcagtcccgaaagatacctcactagccgagtagctccttcggtggaaatgggcatctccattgttgacggaatgaccccaatcatgagcaccgtgacccaattcgagccgcagatcgactaaatcctcacccctagacgacgagtcgttcataaaagagaggtactcactgagctgatgctcgtcaatgaggtcagcactagcagcaacagcagcctcgccaccatccttgtagtggtgaagcgggactggaaacgacccagaccgaatattgtcgtatgagagcaagggactagacttcggactactaatggggttgtttgaaaacccagaaagcggccaagaatttgaggatggagaagaagggttcttgaagtcaaagccgtttgggagtctcggagaagattgcgaaaatgggttactgttacagctaatattagatggcctggctatggggttaagaggtgaaggagaagaaggcgttgaagaaggtgaagacgaagtgttcgagcaaagtcccaactggattttagcccttacaaccaacgagtgcaaaaggttatccggtccgaaagccagtcgcaccaaatctttctctgcaaggtcttgaatgagaatgtacccaatgattttcgaagcattctctgggtctaaattcttgaccttggtgaaaataacattcgtagcttcataagaagccatggttttttcttgggtttgttgctacaattactactactctccacttaagggagagcaaaaggatgagtattccctctttttcacttccttcttcaaccaaagaccttcaaaacaatcagtatcagtaggtttttctagtgttaaaaacctgtgagtctctcactctttctctctctctctctgtctatctatcttcctcttctctctctgtaatctgtctttagaggagagtggtagatttcagatctacttcaccaaagagtaattgtcaacagcttcatatatggtcgtatatagctctatatatactgtataattatactgatgacacagcaatatatactccttttttttttttttgtcaagagcaatatatactctcattatttcttcttcttttttttattcaaacatataacatggtgtgaaaccctaatgcaatggtcccacactctcaattttttttccttttccctttttcttttttctctcgaaagtttacaactttttaattaattacccccataaattaatatttgaaaaaaagaaataaataaataaattgtacgttatcattcctaatttcctaatataatgagaaggacattagtgtcaaactattataattagtattatttattattattattataataatttgaatgataaggcattaattttattggtttgttctctaaaaaagctaattaaaatttttcttcccaaattttaacatgtaccaaattatgtctttaaatttttttgtcgttaaaaattcctcttaaattattgaaattgttaaatttaagaacttttatctaattcttgtaaaaaaattctaccatagataaaagttcagaggtataatttagtatatatcaaagtttggacatgatttggtaaatattaaagtctgggagcatggtttagta

SEQ ID NO: 26714 - DNA, 1439 bp, Cannabis sativa
atgtaagttaaataaattaaatgttgtacaatttatttattaaacacttaatgtatattattcttataataatatatttatctagatatcttatattatcaaataatacaatatataatgattaatataatataatataatattttaataattatatataattaataatataatatatatattttaatgattcatgtgataaaatataatatttttaacgtatcaaccaaaatagtaaacaatatcattgtattaatactgtaaaaaaattgatggtaacattggacatgacactgaaaaagttgttgtttaaagtactagacttataacaacacggttattcaacaacatttaaaagttgttgttgaaagtactagactggtattttcttaactcttttttggttgatcacaatttaagtgtaataaaagagttattacacaaatgaattgttggaattcaaatttatgtttgtatgactattaaaaattggactaatactcatttgtatgtgagaaatgagttaaaaaatatttggttttagtttggtcgaattgggagttacaaaactcaaaaaatagtgttattgaaattacaccaggcgacatgtcgccaggaatcaggcatcatgttatcttggtaaacgacgatgtgggccagtccacctttaatgattgtaaagagactttgtcgtgggagttggggtgtgggtagaggtagggtggggtgtcggggtatggctacatgaagaagatgaacaaggaaaaaaaaataaaaaataaaaaaataaatattttttttttatgattttaaataatttattttggtttttaaaatatttttattaaaacatgacttggaccaatgagatttcaacacatggcatttttttaagtaagtaaacaaatctattaaaataaggagtaacaaacttacaagaactatgaccttgtggactatcaccgccaatttttaaggttgaatttttttttgcatgaatataatcttttcggggaattttctggtaattttttccattacaaataaatggttatttatttattttttttatttttttagtgtaattttcaaaaatattcttattttatattttatttacaattttatgaaatatgcttgtaaagttttaaaattataaaaatacattttactcagtaaaaagtaagaaaaaacaaataaaaataacgagaaattaatattacgataactataaatcaactataaaacaacaataaacaataagaaatacaacctcatgacaactataataatagtataaaagaataaaaacaatttattatttttattcaggaagtatttttataaataaaaaatttattgctcacatatttttgatttttgatttttgattttttttttttaaattttgagtctatttttttaaggctaattaggat

SEQ ID NO: 26715 - DNA, 5443 bp, Cannabis sativa
  modified_base (72)..(89): a, c, t, g, unknown or other
  modified_base (2905)..(2912): a, c, t, g, unknown or other
  modified_base (3044)..(3045): a, c, t, g, unknown or other
tcttaaactttatacgtgtttatttcatcgttttagaaagttcatagttagggtgttaataaacatacttgnnnnnnnnnnnnnnnnnntggtaaaataatttccaacaatccgggaactctcttctagacttgactatcattccacaagaaaccttccaggatggccaagttagctattcgggaacgatgtctgggatacacctaactttccaagaatgatattggagaccttttcatttgatgaaactataccataaattccacctagttacttcaaattaaaagagtgacaatgataaaaaagaatgcagccatcgttggttggtgttctaggagtcttagtatactaacttctgagattgatcaagttcaagccatgcttgaacttgtttaaggttaagaccttagtcccaacatcagcaggattatcttcagttccgaccttctctaaatcaatcagtccttcttctatcttctctctaatccagtagaatcttatatctatatgtttgctcttttcatgataaactagattcttacaaagatggatggatgactgactatctgaatacacagtcactcctccattgatttgtttcaattcataaagtatttcgcgaagtcataacgcttccttaaaatcttccgtagtcgccatgaattctgcttccatggtggaaagagcaaccatagattgtaaccgagatttccaacttatacagttccagattgtcaagaaaatataagaaagggttaattttctagtatctctattcaaggcatagtttgcgttcacaaacccttttaactctaattctccatttgttttctcatagatcgaaccataatcccgagtgtctttcaaatatctcaataacaatttcagggctttccaatgttccatgcccgaattggacatgaattggcttaagatgcttaaagcgtgagctatatcctcgtgctcaccatcacgtacaataaacatcctagaaccacagcataggatgcatccttcatttcttctttttctttggtataagacattgatcctttgacaacacaaactgaccccctaacggaacagaggtactctttgcatcttccatgttgaacttctgaataattttcttgatgtacccagactgctttaagctaatagtcccttccttccggttctgtgagactttaataccgagtatcttttgatctggtttaagctctttcatctcaaattctcttttgagcttggctttgatacttttgatcacgaatttatctttgctcatgatgagcatatcatccacataaagcaaaaagaacacgaatgtagattgctccagattcttgaaatataagcagtgatcgtatgcaaaaggttgaacctgatttgatgcatatacaaactggaatttcttattccattgccttggggatagtttcagaccatatagggatttgttaagcttgcacaccaattcaactcctttcccttccacctcaaacccaggtagttgcttcaaatagatctcttcatcaaagaattcattcagaaaagcagtcttaacatcaagttgttcaactttgaactccaattgagctgccaaggacaaaattaaccttattgtcttgtattttaccacaagtgagaagattttcatgtagtctataccttccacctaagtaaaacccttagccactaacttggctttgaatctcactatttcattctcattaattccctctttcactttgagaattcctttacactccataatcttcttgttctccgacttcggtacaactacccaagtcttattctttcagagtgaatctatctcctcatccatggcctgaagccatttagccttgttttcacatgaaatcacctcttcatagctttcgaactcttcaattttaatatgtcgaactaccgccagtgtaaatgctttatgtttgcttctgcgaaccttgctagaggataaatctctcttcgggttctatcacaagccaactgataaccttccaaacctgtctattcgaattcttctagcacctttgtttggtcttcattatcttgttcttctagcttcgtagtagcttccgtttgcgcattatcttctcgttccatgctaactttcgcctatgagccttcttctaggagcttcgttctgtactccatttattcctacatcacacggagacacactacctttcttgaaggttaagtgaggatattccaactcattaaaaaaaaatatatttctagcaactacaacttttggtttacccttcttagaaatgtagattctatacccattggttcctaaggcataacctaagaaagctcccttcacggatctgttgggattttatgccctaaataaaatccatttcgatataatcatatttattaattaataaaagattaaaaatcattttatgctacatagttcatatgaatatatgtttaatgtataaattttattaaatccaaaatatatatttattcatgattataatgttatctacacagtgaaaaataatcatgattatatgtttaaagtttatgtccaattatttgacagtacataggatttacactgacgtgataatcaacgataaagtttacttacacttggattgtctatttcagagtattagtaaagtatactagtatcaaatgtatgcagtatacactggactggaccgatattgacattggataagatatcataaacttaacgttatatctttcgaaatcaatattggttagttggtcttaggtcaatagattttaattctgatatagttaggttcggtcttaaatgtattattcatgttctttgacttgttcgttaaagatgaccaagtagatcttttcaatacttacatcttgggaacannnnnnnncaattgagtgggagcactaattataaatatagaatctatagcttctataactattagatgtgaaacgatgattccttcaagcttggcttaacgcaataaatgattgagcgctcatttcagtaattatattannttactaaaatattatttacaagtatctaagtgttttaagaataaaatacattgaagggtagaacggttatccctactcaatagatcatctataaaggatctttaattatttggaatgaaaccatgagtaattcaaagcgcatctattgtttggtatatagagtgttctatgtaatcagaagtgcaattccaaatctatagcggagtcaagaagagctaataagttaagaaatttacttagtaaattttagatctacttattgggagcttgattacataggattatggtccccgcactaactgagataatattattttgtaatctcatttaattagttgtaatcaattagacttctaaataagactatgttttatttgtgaattttcactaaggccttatttgagaagagaataggatttagagtttatttgttgattaagagactttataaggtctaattaataaataaattaaatgacaattttatttgataattaattctttgattgtttgtacccaagacaggtggttcatgagatattcaactggctgggttttcaggcttggagcactcaattcagctgctggaggaatttttgactgcaacaagagactgttttaaggatagaattgtgatctttttgctggctgctactgtttattttatttggatgaataggaataaatgtatacatgatgatagtgcttacatggtgatttacattgtaaaagagattaaaaagattgcaaaatacaggttgtataacgataggcaaaggaagatagataccattagtcaaaggctaattaatagaatcttagcctgagtcaggtttgttgtttggctagttgccgagcctttttaggctttagcttgttgattaatgagcattttctcctttgatccaaaaaaaaaaattataattattaaatagatagaattgatatttatagagttagaataaaaatatggcatttgtgaaaagaaagatgagttaaataaatagcaaaattgaaacctatgggataacaaacatgaaactgtaatgcaacagttatatttactgtgagtcagctaatagtaaaccttaaaacaactaataatgtctttatgtgatacaaacaaaacttaccacaatcgagttctctttgtacgagtcgtgcattgccaattttgagccctattttttttttaaataataatattgtagtagcacaactattattcaactaatatacaacttaattgcaactagaaatagaaaatttgaataacattgtcatggaaaaaaaaaatcagatatttttttcactgatcaacaatcaattatacatcaataatattatgtggagaaacaactattacaattctattatccaactttatgacaaccaaataaatatattaataaaacttttcattttataattttttttaaagagctttgtgttggattgtcgatatgaaatacctgtaaatattataaaaattattgtatcattattagtttgtaattattgatatgtctagtttcagaacattagtaaaatattaatgcaactgcaatacaactaggtagaaacttaaaaattagaacgatgtttctatttacgtggctctaaatgaatttaaattttctttgttatttgtgatttaatatgaataaatctatcataaaaaaatctaaaaaaaaatattaatgcaacaggagaaatactagctagtatattgataattttttttagtttatacctaatttaatttgatcaagaactccaaatctatttatagatctatgttttatgaatatgaaaaatgatattaggaggatgaataaatctttgttattcgtgatttaatatgaataaatctatcataaataaatctagaaaaaaaacgttaatgcaacagaacaaatattagctagtgtattgataattttttttagtttacacctgatttaatttgatcaagaactccaaatctatttatagatctatgttttatgaatatgaaaaatgatattaggaggattagttttctgcgaattaaactggaattcaaggttgaattttagtttcgaaccaatttttctgcactttttttttttcatcaataaaaaacatgtgtttgaattgattccagtctttttctccggtgaagtcgccagaattaatggtggttctccgactgattgggtttcgtttcaattggcttgctaaattaatcaatcgaaacttgcttaagtaagttttttgcttcgtgcgattcaaggtttagaagaagtatttttgtgatttttagtttatgggttgtacatatgtttaaaacatcggcccactctactttggtaatataattgtcttttttgtatatatcttaaaaaaaaaaaaaaaa

SEQ ID NO: 26716 - DNA, 6223 bp, Cannabis sativa
ttctttgtcttcccactaatgaacaatgtcgatgttgtgttcttgcttcgattgagtttatatatactctcttcaactgtgtctttcacctaaaaccaagaaaacaagcacatagtaagtagttcatgcatttgaattgagaataagaggatgcatacatggaaaaaatctaaaccaggagtaaattagtttcaatttgttattagcttatgaatcaacagtagtaattgagcaaagcgtatgaaaggtacacatacaatgaaacggtgaactagtgtcctcttttcttgcccaattcggtgtacccgactgattgcttgtgcttctgctgctggattgagtagaggctcaacaagaacaacatgctgtgcttctaaaagattgaggccattggctccatgttgaattaacagcaataacacttggacagactgctcttctgggttttgtgaaggcttctttttcttcccttttgggctgcttttttgtcctctaaattcactgattgcaacatgtgatttcctgcatttttcagataattgaagtcagatgctcatatttattcactcctaacaatttttttaatgaaaagtgttggccaactatagaatgatacaattatgaagcttgataattatcttacctgcctcctttcatccgaatataggtgatagaattagcggtaaatgcatgttctattacgtcaaggacatcatgccaacttgaaaaaacaaggacttttgctcttggatctttagacttgatccacaatattcttcttgtcactgcttcaatcttcaaaagcataccacgtaatgtgaatgtatagcagagagggagagagagagaaagaaagagactggaatgtagatgttattactaaaaacttattgtgcatgaaaaacactagagcccaaattcacaagatcagggtgtatatggtacatgcccaatctggaaactaacatagtttatgcccccataactaaagcataggaataattaaataagtaaaaggtggaactatgcaaacacacttgtataatattggcacttaaatctagtatataagttttataaaaacttacaaaaccaggaaatataccttagttccatatgaaccttgaaccacgatggctgctgcactactttcaagaccttcaattgtatcaatcatagaagaattactagaatcactttgactatcatcaacataagcaatattcccgacatcggtatgctctcgacaagtagggcactttacccatttatcgtgaaccttgttatctcgaagtattctctgttcagtcattgcaaataaacctattggaatgaaattaaaaaaaaaagaattaaatcaaatttagcttagcatgtggagtagattctacaaattgaatacagaaattctcacttggtcaactgtataacatttattgccttttactataaaaatacatctcactgctaatgcaaacaattttaagaagagaaaaattaaaggatcgaaagaacatacatttacagcatgtaacatgcccacattggaaaaccatctttttagtgctcaaagtctcttgacaaactgggcatgattcatcaactttaagtatgctttcacttttctgttcagtgttagctgatgaagaagctgctgctgcctcttcagttagcgaggagctgtttggactttctaatggaaatttctgtttagcttgcactaaaccctggttttgttttgaagagaattaggaattagcatagccaatttgaaggaaattttgtatatagcaaagtaaatcagaataacggactaagtctattattgtttactattgctatgctagaggtagattaaagcgaaatattaggacacgagcactaattatatggaagcacaagaaatgtagaaattaggcacccacgattctatctacctttgagcctgacattaatcattaaaatgcccaatacttcataatggtaagctatactctaaatataaacagcagaaaatgaaattcggtgcatgtacctttaaataacgaagtttccctttaatacacgataacaagtgcaaggccatgaacttgtcactagagtactgcacgctagccgaaggtaactcttctttagttaaggcattcaaggatttatcatcttcatccacttgtaactgcaaccttgtagtagccatcttgatctcatcgtgagcttgcagaacttgtgcttgagaaattgccaaagccctcgcatgagcgtactcctttctcatgccctaaaccaggtacaagaataaaaacaattagatatgaataattgaatgcaataatataacttgagtatcctgtaaaatctgagatagagcaagcatccaaacaaaatgattgatgaaaaatgttaaaataaaaaaaaattctagtaaaatcagtcaaccaaagatgagactttgtcataagtaactgccactaacaaaaggattggtaatgcaatacctcaagaatgtgtaggtgtttacttgctgctgacaaaccatctcttcccaagtgagtcttgcaataactctttataactccaagaacaacctccaattcagacggagattttgaaacctacaaatccaaatccaaaaacaacaaggcagagaagatgagtttcaaataattggcacaattctgtccattaaaatgtcaggtttaatcagtagctggcagagttagcaaaagaaactgatcacattcttgctgatgcaaacacatgagaataaatcatcaataatgttcctttttttttttggttgcctgaagtcttgtgtgagcgaacgaagaaccttatattcaataaagaacagttactaatattgtttatgtttacaaggtttttccacctatgtaggttgttaattcattaacagaaacaacaaactaattctggtgaggtagagaaaattaaatcaacccttgagttatcgacaactttaacccctatatgtaagtacacacacaaaaaaaatatatattcttgtaacgtgtataatataaacaaaaatgaaggcttcacatgaaaaggagtgatagggaaaaaggtcagtagagaaaaatgatctccaaacttattagaaaagtaacgatcagattcttgaagtgatcagatgggtacaaaataaacatgctaaattactctgcttcaaaaatataggaaagataatatctgtcagggtaactgaccaccactttttctcgaacatctctttttcttgattcttcataatcattggaagctgattttaaagttttattttgctgtgacaagttccaatagaatcgattgagagcagagttctttttctgcagatctacagcctcttcagcagacgaaattatcccaccatgtgctttattgagacgaaaaagtcttgcttcataacgctattgaagagcataaataagttaatctggaaaaatgaacagcaaaaacttacataaatcaaacactaacagttcctttgttgcaaacctgaaacaattcgtctagttcacacataacacatgaaggtccatcgccattaatttggcagttttgacaatatcttacgcgttcaatatcctcctcccttggattgtccatagtatgatcaatttccaaaagttgatcgagtagaactttcctagaggattccagcaggtccaaaccactctgaatatgatacttaaggccacttatcgatcggaaactagatcaaaattatttgacattaatgaatgtccacacaaaaagctcgaaatccattaacaagttgcaatccaaaaaatattcttatcaggggtacatctatgcttcagaaagagttgtccaatttatgagttttaggaaattccatttagtgacactgagacttatggtacatgtccattatgtggagcttatggtgcatttctaacacctatcatagtaagtttcttaattctcagagattgccagattcagggggttgaaaaatatatattcatattaatttgaaaaaaaaaaaaaaatcgcttacccagatggcatcttcgatgatcttgaattgtttagagttcctgatatggcttcttcaatctttctgattaattcaaatgaaaaatctttgttctgctcggcatcaataagggcttccatccaccaatctgtgcgttgattttttctttcactaattccagaacaaaccttaaacagataacatttagttgaagattagaaatagcaaaaagaaataaacaggggacacttcaagtgaatcgacttggtatagttagactaataagaatgtactctaaattgattttacacatggatctctcacactgaatgagacatctgcaagaatctatcagttaacacatacgagaaaaatattgtgtgttgcatgccataaaatatgacatgaaatagtctgtttgtagtctgatatacagtgctacatattgttcttgtgaccatagtagaggctagataagatttacctgcttaaatgactttttaaattcttcttgagcactgtaaagccttgcactaaaagcagataagtatttctgtttcatattctcgcaggaagttctcaaaggttcatcaccagtggaactgcatgatgtgcgaggtacattatcaccttctaggttggcatttacgccattttctttaatgtcagaagtaatatcctgtgggttgccagcatcaattgctgagttgtctttcctacgaactttccgcctcttaaaaacaagctgctcacacttttcattgttctgtctcttgaagaccaccctgccagggcttaccggtagattctccccattcagggaacactgttccaagcactttgcttccagtgggagtatctcagcaagattatgaagaatgtgaatattcaacaaagggtccaagcgaaaatcttctgagtactcttcagctaaagccaaggattccttgtatagtgatacagcttcagtagacttttcctcaattacagctattcctgcaagcccatttaatgcaagaactaatctcctaagagcttcttctccttctactttggtcttatttatgagaacctacgaaacagacgactttcagcaggcagtacattaattataataagtgctgggaaatacactgaaatatataagaaaaaaaatgtaaaccaccattaatatttcctccatagtcatgggagactggtgcaaagagcgaagcccagaacttcccacttgaggatggcagcaggcttggcgtagcttcaggagtgtgttcagaagctttccagcctccgcatgggtgatgaaaggatcagatgaaccatcagatgctacagaacagcatgaaataacttttaaaatctgaaaatatcatctcctacttgtaatttttggttttcaaaaccaaatcttcactgatggaaaaacaaagaaagaaaagaaaaagaaacctgagacatttcttttgagaatttcatctttcaaacttgcaataacttcctgagcaacaattgcacaagtctcatgttgcctctggtaaaagtgttcttcaattggcgagaaagtgagccaagaggtgtattcctcctgaggaggaagttgcaactcatctgctacgtgtgcttttgatgaacgccacattatttgtttgaagaattggtgagtaaattcaatggccccagcatctctcctctgccatagacagtgatcaaaattgagaaactggtgtgatatatacaaacatggttctcatatcaagaaaagaaaaggacagccaaaatgcacatcattagaagaaagcagataaacacaggttacaggaaaataaattaagtgggcagtccatgggtctagcagcaatgtgagttactggctattgacagtacagtattaaaatatttttttcttgaggctcttttgcataaaaagatgtcaaatgaagcagaaagccattcgtctactgtgtttttaacacaatgagaaaattaaaagtgattatcatttgtttttattttttgactccagaactctataccatttgcatattaacatatcttgaagacatcatgtctgcttgtctcaagcagcttgaaagaaaatgttcaatgaccataagttcttacttccactatgtggtacacaatgaatttctcatacacgagtcaatcctaacattgaaaccttccactttttttttttttttttaa

SEQ ID NO: 26717 - DNA, 3946 bp, Cannabis sativa
  modified_base (3447)..(3451): a, c, t, g, unknown or other
agagagagagagagagagaagacggcaatatgggcttgtgattggggttctgggtctgggttcgatggtatggattctggttcggggttcaacacaggagaatgagcgagttagagagtgagagagttagaaagagattttttttaaaaaaaagttttatcttaaattttacacagttaacatggcactcagcaaggtgacacatgttgaacatgtttggacctaggcaggacatatctctttattgtaccgtcgagatcaagtctgatccttcagcaactatcatctgaacggattctaaacctcataacttgttgaatagacaagtgtgtcgagcagtgccatttgctgatcagaggcacccaataagtaaagatcttctaacgtaatttccttaattgcttccatcattatagctcaactaaatccctaattatgtgggatttgattaagcagtagagaaatttattcaatttcatatttgaattcccatgccactttgtttcctttaatattggaattcaaatttattatgaccaattatttagcaaacaatgtattcgtatttccctataaatagtgaagtcatcttactattcaaggaccttttttcgcattctaaaaagtgaaaacactcggcataaataatgttacttttttagagctattgagaaactcacctaacctgaccttgtgatcttgatagtttctcataagtaacacaactaaaaatggagtaagctattaccataatcaggggtcatcgaacctctataaatattgtgtgccatttattatttttatatcctcattgctttctttacaattactattaatttaaaactcagtgtcgttggctaaaagtgagatcaatattttggcactttcattaagagaagaagatcaacctacaatcttgaatccacctttgaatcaacaacatgattttgataagaagatcctctttaactgagtctcacgatcttatggtgacgaaacccaatgtccaaacacctactgacccagggcttgacaaccccaatgctcgactgccacctcgagggaaccaacctatggtccctgctaatgttaaccccaaggctataaggattacaacacctttcactagaatcacacccgatgtccaagaggcaaggactaccacttatgcatatgttagagaaactaggcctgacattggtcagcctattgtagcagaacattgagttgatctgggggataactctgatttagaaaacttgggggatgcattgggacaagtctaaacgcataccaacacactccaccacaagtaggaggaaacccatgccactgtgtgttgacaaaaagtcaatcactcacttattttgatgataaaaacatatgtgattattatttgttactaatcatctcttgaacattttgcaagaaaaatactaagtatcaatatttgctcggtaaaatcaaacataatcaaataagtgaattcaactagtatatcaactatttcatactttcataagaggaaaagtttcaacaagagatcgagaattcaagactctatccaaaagatgactttaaaagctcaaagtcaaaagtcaacttgaaagtcaaagtcatctttggatcaaatcatgcaaatcaagttaggaggttcatctaaatcaagactacacacaatcaaatggtataaatttactttagtcttgttaaagcgatatgcatactacattagagtttataagttaaaagtttagcttactaacttgtgcgacaagttactttttaaaatgacatataatttattataaattgaattttaagattatttatcttttaactaagataacgcaactagactatttgaaatcggataaacgagctaagagtcatgcgtgttttaagtcaaaaaaattacactttgccactgcctctttttcagcctaccatttttaaaactgcataccatttttcacagaaacagtagaccattttaaaaatggcagaccattattccaagtatttctttttgaaaaatgtgctaatggctataaacggctagtttttgttccctacactatataaactcatttttttactcaaaaattaaggttggttgagcttctattcatcttattatatcattctaagtgttctaagctaaagaattatcatcttttcataaatacaccaaccacacacacttgagtcaaacttgttcttatcttctctagtgtacttgcaattctctctaggattttacattgtatatcatcttattagagagagtatgttttgtatttcaaaattaaatattaattgtattgagaagtgaggttgacaccaagataaaaacaactcaattgtaggtgacattgacaccagttcttaaataacccgagaagagtgagattgtcactacaacaatctgagagtgagattgacacttcaacaattcggtgaggtcgatagtccttggaagaacactattgtgagaggttcgggaaaaccttggtgaaaaattctccggttgtaagggttagtcaagcccgttaagttgactcgataattgaactgaaagctaggtccatagctttgaagaccaaggacgtaggtgacttagttctaatgaaccttgtaaaaattgcgagtttgtaatttttatccctaaattctttatatttcaagtttattatttgcttatactagtgtttatctatgtgattgctttaaatttgaatatttttataaattgcatttagagttttaaatttccaatttactcccttttaaaaaattatcttgggctcacagttaatatcgaagaaaaggctcttgtttttgagtggatttcaaaatttatagagtttctaagtaattcacacaataatatgctagaagatttaagcacaagtagagcactatttttcgatggggtagactttccttattggaaaattagaatagaaacttatcttcaattcattgattatgatttttggtatattgtatgttatggtccttacactcttatgcattttgtagatggagtagaaattgttaagaaatatgatgcatataatgaaaatgataaaaagatgttatctaaaaatgctaaggctaagtatgctcttatatgtggtttagatagagatatttttataaatattgagcaagcctcttccgcttatgatatgtggaaaatggtagatgtaactcatcatggaactagtgctataaatgaaactaaaattcaacttttagttactcaattgaaaatttcaagatgctacaacatgaaaccattgctaacatgtatacccgtttcacaactattactaatgaattaaactctcttggcaaggtacttacataaaaggatatcgtgaccaagattttgagaagtctcaccaaatccttgatggcagtggaataatatgtctcctnnnnntcagatctctaatccttgttcttttctgtcgcggagtattatcaagatctgagctcgaatctccttcaagtgttggattcttcacaatcttacacactatgattgagtacttaacttgttatgggtgggcatgtactctttcactatagactcaaaaattatgaagaacaatagagagagattcaaaaataaaggaaggagggaggctcttaaaaaaaacaactctatctagctagttagttatctgacagaatgtaaactaggttattaggttggatgagaatgagagcatcctattccctttatactgtttcacctagagttaggatttaaattatgtggaataaaaaagataaaataatagcaaaataaaccatatagtggcagacccactacaagaataatggttaataccaacgccactattaccaacgcctaaaagtcctcattaaaaatgagggtatcaataacgacatttgcctgtcgttgggaaag

SEQ ID NO: 26718 - DNA, 3521 bp, Cannabis sativa
ataagtttatgtgatgatttattgttttggaatgtatttatattactaaatattagtttaattttatttaaaattacatacataaaaaaatacatatacaaaagggtccattttttcttagtttactaaaactgtcttgggcccgttttttttcaaggtcggctctggttatcttattagacaataataaaaatattgtcttattaggcaatgatatttagataccgaagggttaggtatcaaatgtcatgactataaacggaaattgtggttaggtttcctatttgtcggttgtcttactaggcaacaaaaaagacatatgggtgccaggttagggtactaacttgccttattagtcaatgttatatatgggtgccaagttagggcacttacttatctcattaggaaatgcgatatattggtgccaggttagggcactgacttatcttattaggcaatattacatatgaatgtcaggttagggcattgtcttgctttataaggtaatgagatttatgaatattggaggatgacttttaggttgtctaatttgacaacgatagtaacatttgattatcagttttaaatatcagggtgattttattaaataacgacaagtacgttagcatgccaggtgaggtattagaattacttttctaggaaaatatcgagaatgattattttataaagtaacagttatagttattatccttggactggtaattgtgtataactgtatacctttataattactttcattatgtttgaatatttgtattagcccaaatttaaatatataagtaacgtatgattatttgattctgataatatgagtttacttgctgatattgtgtggcgagttatatgattgttattattacttttcttgctgagtccttgtgactcatgagtgctatgtggtgcaggtaataggcagagacatttggacaaccatgactaaggaatcttttccatcaaatgtgcatatcagcttatccagcaagtggtatagagttgttaggaattgtatttcaaatgttctgaacttttaaaaatatttcttttatattaaaattgtaatggcatgtttagagtagatagtaaaattatattaaattacattttatctatattgctagtttattatcataaattagtttataaacgcacacacgtggcattcttaagggtcagggtgttacaaaaacaaagattcacatctaagaacaatgaacattcaaccaaaaatttacagaacacagatgcaaaatcataaaataaattcatgcaagaaatggatgaagaacttactgattactcggtgtgatgatttgaagaacaattcctgaagaaatggtccgcacaatgatcgatctgagacgaaagctcaagaacttgaagaaattcctctcgattttactctaaaaaattgaaacggtaaaagtcctaaatgaagtttctttgaagtatttataggaaaaatgagagtgtgggaaaggtttttggagattataatttgaaatgattggttttttcctttaaaaaatccaaaagcctcattttactcaaaaatccacatgggagaatgtgtaaccgtcagaaacggtctttgaggtgcaattttttaagaaaaagtaattaaggcaaaatattttaaagggcagagataggattcgcttcaagtcggcttattgctttggaaggcgaataacatggggatggacaggcgtcacatgactaagcaaagaatgaagtcaagaagtccacgtacaacctggagtttccatgcaaacttgggtggtaaatattatcccaaaatcaccctaatgatacagcacagaataatgtgacacgtggcaagtatagaaagggttgtacagatggaatataatcagagagcctgcctgaataggtgttgggcgaaatagttgtggaatagggcccttcagcattagacatcaatgggcgaagcatgctagctatcctgccgagcaaccaggaagacacctcacggacgaagtgtccgaccagcaaactaacagaggataatgtctagattcatcctaataacttaatcccttgcaaataggtcaatcaagacgcctttaagtgtgggattgcgagaattaggggaaattgaggattttgtgggattgactctatcaaatattaaatactttatcctgtaatttaatgtaaaattgttacatcctatccctataaatagtgaatcatattcactattcaggggactgaattttgcattcacaagagagctattacattgtcaaattatttgtaactttcaaagatagcaagaaactcacttgaccaggttcatgtgatcttattatttcttagataaatacaacaaaaaaaggagtaggtcattaccgattcaggggtcgaacctctataaatgttgtatcatatatagttctttattattttcatttttcattattcaaacacttatatttattgactctgtatcattgactagaattgagattaacaataattgatcaccatcaaattccatcgttaacgctcttaacttgacatccaatttcatattcgctgtagtcataaatggtctacccaacaacactggcattgcacatagaatagagtcatcttttatatctagaacataaaaatcagccgagaaaaacaaattcttcaccttaactagaacatcttccaccactccacgagggtaaacattagattgattaatcaattgaatgattactcctattttttctaatggcctaagatgcaatgaagcatatattgaatatgacaagacattgattgatgctcctaaatccaacatacaccgttcaaccaacttgtccacatagtacaaaggatcataaaattgtctggatcctcacacttgggagaaaatttcttttgaagaatcgcagatacattcaccccacccttactttttcattcacttttagtttccaattatttatacataatttccttaaaaaatttgcagaacaaagtgctttactaatagcataatataggcatatttacctcaaccttgcaaaatatttcaagaatttatttatcaatctaatctttctctgtctacctcaatctattagggaatggaggaataggtggcttaggcgttggtgcatctttaggagattgaaactcatcctattgtggtaatagtgtaggagaagatgggatggatgaggaaggtggagttggaggtacataaattgtgtcacttctcaacgttataacattaacattggctcttgaatttgcaattgattgagaatgtaatctttcaaaaagttgggcttccatcttgctcgtagatgtaactatttgtcttataatattctccaaactctttaaagatgcttgcagttcgctgctaaaattggactgtgttacctaccaaagccttgatcaagtattgcatggatgcaccttggctctaggcctgcacatgggttgggttgggcggtttttgggcggtttggcgg

SEQ ID NO: 26719 - DNA, 1895 bp, Cannabis sativa
  modified_base (96)..(97): a, c, t, g, unknown or other
atcacatgaaccaaataacacactaaataagtaatgaaaataaatctgtttctttattgataattgtatagaaaagattacattgaaatagagttnnatttagggcacaaagcccaatagtacttagatcacaaggctaaaattgagcaagaggtcgaggggactatacgctcccttcaagagaacttaagcaaggctagggaggagagagataaagctgaagcccgtatgatgcttcaatctgagaccatcaccacccaaatccaaaaagtcaacactctccaagaggatatccaacaaagggaccaactcatttagggcctttgtgacaaatataaacaacagaaggagagaaaagagtcttggatgacacaacatgacaatatgaacactcttctccacgcggctcatcataaaagtaaccttcggtaggagaccattgataagttgtagaggaaaaagtcaaccgtagtccaatgtgaatggtgtgaaggcatatattgccttagctgctatgcgtgaaatgagagaaagtgcccccagactattcaagatgtagtcatagcggcaggtaaagcagcaactaaggtggagaaatattgcctttattccttagagatggcctatgccatggtcctttataacttgtggaaggcagactctattatactctggctcattaatgaggaagatacaccaaacgttactaggagagttcttgccataaagcgcaacacacacctcgaggagtctcccctttctgttgatagcgatagcaataaagaaactggtgctgaggtctcaagttctcacggaagctggggcatcttctagcaaggctgaagaggagcttgtctgggacgtagttggacctaactcggatctagaggagccaaccaatgccccatcccaaattgacttagtagcaccttcccctgcccgagattaataggagccacctttgtttctcgttgtctatcttttttcttaagacaactttaattccttttgtcgtagagttgtgtttattttggcttggtccgcacgactgtatgtgacaattgccttcgggaacaacttggtttgcctttttgcaaggcaccatatttagactttaatttttcaagatgttttcactcttatctttatgcatcggcctgtgtagttattttaagggttgtcttcttaggccgtttagaagtctgtggttctaacgaccaccacttcaaacctttgatgtcaatcgaccttcgacccctctgctgacttaggaggtacttaaaaagaacctgtttcctattgctaggcataatggttttggtcttaacccctcaaaaataatttaagcttgggccaactaaaagtttctaaaaacatgaatggtctttaagattgttcccagattattgtatgatcacagagccttgacattcttcagctatttaagcttttttataatttaaggaggccagtttcacacgctacagactttagacgtgaagctgaagtctacaggagttcaagcaaggaccttttgatttattttttattattaatttttattttattttttgaaagtttttcaagaagagattgaggcgagcatttcctttttacgggaattttggctgaaaatgctttttctttcaaaacatgtgcttattttaaatttaagaaggaattcaattgatcttcctttttaaggaatttggttgaaaatgcatcttgtcttaagcaaaaattacgaattctaataaacaaaacaaacagaataacaaactatggcacacggtatgttttttgggggcacacacgactaggcttgataccccccaagttaggtgagaattgtggaagtctccaccttttggtcacttggtttaaacataacttgt

SEQ ID NO: 26720 - DNA, 2886 bp, Cannabis sativa
ccattggcgcttttggagctaaagtagctccgtctctgagtgtagctcatttgtataatcatttatcaattacacaattagaaatgaaaatttgactcgtggatatggggccttgcaggtacttgcctctaactgggcaagttttccccacctaaataggaaattgggtgggtacagcaccctgtcttgatagtactcgtttaatatttatttatttaaataaatatatgtatgcataactaaaagatttcttatattatttattaaatcaaagtttatgacacctaatattaaattgtaccaatagtaatgccacacttcttattgtgcctatccgcttaaggtctcttaacatttctcacatcacatgtgtggttaaaataaaatatataccttctcgcgcatgttaagaagaggaaaaccagcagcatcacgcatgaccctctttttctcgaaattatgagacgaaccattgacgtggaagtaaagatttccattagcatctaaagcttcgtattttgaatcaaacaaattgtggctttttttcttcactattagctccacagggtaagggacacagaaaaaatcccctacaacgctcaccaggggaacaccatatgcctcagccgctgctggtgctgctgcggttgccactggcttcatcattgtaaaatgcctaaacaaacttattccaactgatctactactacgtacttaatattagagctaaaatacttcttcgatcaattcaagatttatggtttaattagctttttatttggctttgccttaaatagtcatatttagagctctacttggggctgttcagttatggatcagttcccaatttcccggaaagtaaggttgattttggatgaataaattaatcaataacgcgctagtatagtcaaacaaggtaaagttttttattttatttttattttggtatattatattagcaatattttgaattttgcatgtttaaatacgtaagagaaatgtagatatgttttttaacattgatgattgtctagtttgcgtgttttttttcatcttaataaaatactttagcctttttgtatatatattggcattggacggtttggctcattgaatttgaaaaaagtcttgatcatcatgatattcatataacaatccccattccttttccaacaaccctaataggacctgtgacaattttctttgaattagtactgataaaataatttcacttcctggaacattacattatttttcacctaaatccatagaactttatggcattgcgttaaaaaaaaataaaaaataaaaaataaaaaataaaaagtgagctctctctctttatagctcttttatctttatagagggtcttcctctaatggggatttagtgtatactaatttatattaaatccttccagaaatttaaaagaaaacaaaaaatagaaccaaaatgagattttcttaacaagctcattaattaacgccttcatgatatgttgtttatattccatattggtagttgtattcctattccctcattttgaagattttcgacaatcctttcccaaaaatatgttgtaaacattgtaaaattaaactgagcaagtacctatgaagtcgccaacaattttttcaattgagaatgtacaatataaataaaattaaattaagaatcattaagtattaagggatcatgttcagagttggataaagtggttaaaaggttgttgtaagttagttagtgtgtgactttcttaatgttgttctccttctactttgttttgtgctgatataaatagaccacttcttgtactatgaacattgtaacaaacacaatagattcctttctctctcaatctgatctttatattctctttcttctctttccttttactccattgttattgttattgttcttgcactatgaatagaaggattaacaatcctaatatggtatcagagcttgattttccctcgttgagtgctaccatggcgactgttggaactcaaaatcaattaaaccaatcgaacctgggaaattcagcaaattcataccatgttcctcaaagaaatcgcaatcgagcgacagacgagtttgcccctgtatatttttctattagtctttcagtaaaatttaacgatcacaactttttactttggaaacagcaggtgcttactgcaattcgtgaaatcgcctactgaaactcagggctgcttcttcttcaggttgtccacattatcagctttgtcacaaaatagggcacacagttgttgactgctttacaggttcgataaaagcttcacaagtgtatcaccaaataatgttgcaccttctcctcaagccaatctgatgcataccttgaactagaatgacaccaattggtacccccagactcaggggccaccaaccattgcacctctgatgctcaaaacttggcttcatgctccacttatgaagggcctgaatggttgtttgttggggatggtactggtttgtccatcaagcatattagtcactcttttctctctaattcatctattttttatcctctcatactaaataatcatcttcatgttcttgcactaactaaaaacctgcttagtgtatccaaatttgctagagataataatgtattgtttgagtttcattctgatgtttgctttgtcaaagaccatgttcatcacaaggttttgttgactgggacataccataatggcttgtattcttttgactcttccaatctgcatttgatgcactctccccttaaacctgctatgtttggaaagtcttcatctcagtcacaaatgcagccacaaattatgactgatactacatctccctcttcatagtgtactaattctaccctaataaataccaaacatt

SEQ ID NO: 26721 - DNA, 2058 bp, Cannabis sativa
aagtatactttctacccagaaataatcgattaacaaacacagagatcatacaaacagtgggtaacactagttgacatgataaaaaacagcttacaagttacaacaaggacgaaaaaatggatgtatatgtcagaaaaagtgaagaacatagtgatgtgtcgttcaaaattggcagcatttaaatcggaatcacacaaaccttatcttgtaaccactgcatgcagagggcgccaagtttgtcatcaaaaaagcctacacccaattggctagctaataatggtatatactctataattgctagccggaccctccaatgtctatcctcagcaagctcaacaatcgctggtaataaggattgagacagcagatcaataccaataacctgcacaaaaaggaacaagtataatagaattagattgtacattgtgctttacaggtagaagatgttgaataataataataataaaataaaaaaaaagataaaaaacacttagaagtaacagatgaatttgaaaaccagacctgattcacttgatcaagcttgctaataatattaagacgcacatcaggaaattcatccttcagaagagagagaaaaattggaaggagctgttcaattgttgcatcctgcattgacaaccaaaaagatttcttaaaatcacatggcagtttataatatgacaaatgctaaaataacgttgaaagatcaattgcatattccagacttataaaatcaacacctatggaatttctttttttttttgtaaggaacacctatgagaaattgtagtatttattgaattgcaattttttttttttttcaaaatacatatattttaatgcaaggtaactccattgtgagttgcgaaaaagaaataagggcattgacatagataaaattactaatgatatatatacaaaatactttaaccagacccttccgcaacatctcagataatactttctctgtaatttgtatttgcataataagtttagaaggattgatgtgtcagactagaaagggtataggtgttaccatttggagagagaaaggagtaataatcttttaggatctcatatatggtatattagtcattatacacacatatatattgaggtaagttaaaaacctcccactaatggagtgacgaaaatagagaacacaagaggtttatactgcacttatcatttccacctacaatctttcttgccaaacaagaaactttttatcaaaatcccatctatttcccccacacccacttcttcctttgacaagcatagccttgacaactgaaggcaatcaaaccatcaaaagtaagtgtgctcaaacttatgtatgcaacaataatgctaatatccagagaagattcgcctataaacattgatgaagagtataatataagagcgtcacttaaaatggctcttagtttctacatccgtagaagacttgcggattatactaaccctaaaataaagatttaagttgctcaacctcatttaaaagcaggcaacatttggcagagggagacatagatcgatggaaacaagtagagggacaagaataggagtggcaaaattttccttgtttacaatgattgtaggataggagagaaaatctgagttagttcattaaacaagattggccatcagttcggatccatccacaactgaaagaactttttataccaaatgaaaaatatgttcatttaaaatcattaaaagataattaaaaggaatataataattttgcaaataaaattaaatctatcatttcaactctccaaccatttactacaaacaataacaatttaagggattgttactgttttctcactttatcctaaggcctcctccttcctcttattgtatgtaagaggaattgaaactctagactaacataaaaataaaaaaatagaaatagaaaaacctttcctctaatacaccaaccacaaccaaagaaaaaaaggaggaaacaacctaaaaggaaaatagtgaaagaattagactattactaaaactctaattactgtataattgtaaaacggcaaaagaatataa

SEQ ID NO: 26722 - DNA, 1397 bp, Cannabis sativa
atatatatatatatatatgctgaagtaataaggccactccaaagggccacaaacaaccataataatattaaagtttctagaggaattaagtgctttttcttcaatatttgcctctgtggacaccataacagccatatagagctatatagcttcaaccccattactgaaattgacaaatttgtttcttctctcttttgttctcttctattttttttttttaaagggtcatttaaattcaattgttaaaataaatcagaaagtggagattggacttctttttttattaatttctcaatagagtaaattcactagtgctaagaatcaaacaatatgatgtgagcacaatacaaagctgtaaaaaatttataattattattattagtatcattattattattatttaacacaatattattttattgctacaaatacgtgtgttatatatataaaatattcataacttttttaataatgttgtatatagtccaacagagattataatattcaagatctcaattataatgttatgatcccaacccaagccccactttatctgttaaatctttcaccaaatctaaaagaaaattgtgagagcaagtgagatagatcattattaataatatttgttgaatattgttggtaccgtcatattaataaaagcccacttatattaaatgcataaatatgtatatatatatatacacatattatacttgagatatttgctagtgattgaaatgtgaattggttttttttttttttttgcttgaaagttgaatgtttcaattttttgttaatactagtaaaattattaagacaaaaaaaagaaaagaaagaagcttacaattctatgatcagtatttaattttctttcaacaagaatggaattcatgccattgtgtaagaatcaatagggattgtatttcattcgaaaaaaaggaaaaatatgggtggtaacattctaaaataacaaaaattatcgatctcaaattgtatattttttttttctttttgtcgctgtaatgaaaagataaaaaatattatgtagtagtctaagaaataaaaaacattttaaattaacaaagaatagtttaatttacaaactaattaaattgaattcaaaatataacatgattagattattagttgaagagtattattagtaagcatcacaactactttaaaaatagatagcgatattctataaaagttattatattattttataagaataataataacaccttaagtaattatgttggacataattggtagcttttaacatttctttacttaaacagcctacaatgtaccgaacaatttgataataacattgacatgtagtctattaggattgatgattagccacattattatctaattaatcattaatgtaa

SEQ ID NO: 26723 - DNA, 1632 bp, Cannabis sativa
  modified_base (57)..(65): a, c, t, g, unknown or other
ttgcaaaacataaaatctaaaatagtatttatccttcttcttcttcttcttattatnnnnnnnnntattattattattattattgactactaattgtttagaaaaattttgcactagacccttactatatctaaagggtcgttttgatagatcttctatctatttcgacattaggagagcttttttagttcaattttttatttcatgatcacatatgttgtaattatttaagactacgtgtaaatttttaaaaaattctgaatagtttacagtttcaaaaataaagtttaaacattaccacatgtataagaaaaatagtcgtgtgtgcaacaaaatatgtaatttttatttttggccttgtaaactactcacaaatttttaaaatttacaggtagtcctaaataactataacatatacgatcataacaaaaattagactaaaaagttctcctgtatgtcgaagcagatagagagtcaactgaaacagtcctttaaagggtgtagagatttttatgatttagtagatgatatttttattcttctttcgtttccctaaagtaaaagtgtttcatgtaaaatgatatactaataaagtggtgcatggcttagcaaaatttgttatttaattagataaaaattgtaattgttggggaatctccaatctactatgttgttgtgagatattaatgtatttatgttgaacttatctctccatagttgtttgatgtatgctcgatatgtacttatctaaaaaaactataaaagtgaatataagttatccaaatatgttgggatacttttcaaaaatattgtatcatctaaaataaatttaggtatagtttgatttgttctaataaaaaaaaaatatactttctagtagaataagtccacacaccaactgttttcgaacaacaacatgttgacatctacatacatgccgcaatcaccactgcaatacacattgtttctaataacttgtatttcttaaatccttccttattttgtttaaatagaaaatgcatttgtaagttagttagtccaataaaatgctcactcattggaactaacaatttggaaagaatttgcatgcaaaacataataagaaaaaagtctaatttaaactgccaaaatttgtcaaacaacatcaaattctatcaaacaatattcgagcaaatcgaaaacaaaaataataatttaactagcaaacaaacatcaaacaacaatcaaacaaatcgggaactgaataaaaattcacaaacacaaataatcaaactaaattgagcactaatcgattaaattggaaacagaaacaataatttaaccaccaaatatgaccgtcagtattttcgtgatctgtaaggagaaataccaagtaagatgtgcaatcctacatcgcctagggaatgtctaggtatataactacgcagttgaagagagtttaaatggattgattggtactacctatatcagcaagatgtattttattttttggggtagcccatcacaaaagaactccaaagttaagcatgtttgatctggcacgtgcgagcgaggacaaagcacgctgaaaacacttgttgttctgtagggccagtcgtcagtccaggaagcagccaaagtgacatactcgtg

SEQ ID NO: 26724 - DNA, 2262 bp, Cannabis sativa
atctcttgtaacctcttgcgggatcaagaacacactcatggcatagcttgggagtgcttgtgcaaccgttttaatcaatatctccttaccagcccttgaaagaaactttgtaccatatcccaagagtctattcttcaccttgtttttcaaaaaggccagagcagcagatttatttcttcccatagagctaggcaaccccaagtataaacttccttcagtagccgtggtcatacccaaaatggtattgattctatctttcatggcatccaacgtgttagtactataaaagatagaagatttagagaagttaactttttaacccgaggcaagttcaaacttggataacacttcctgaatctgacgggcctcaatttcagtagccttgcagtatagataactatcatccgcaaaaagtatatgggacacctttggagcaccattagccactttgcacccatgaagccatcctttttgttcatatttccgcggtaaagctgtgaaaccttcagcccaaagaataaataggtacggcgatagtggatcaccctgtcttatacctcttgtggggatgattggaccaacttcattattgctacgcgtaacacaatatctggcagatttaacacatttcataacaagcagaatccaattctcaacaaagcctagctttcgaagcattgtctcaagaaagtcccattcaattcgatcgtacgctttactcatgtccagttttaatcccattcaattacttagtattctcattggtgttataatgttattgatgcaatttgaatcttatataattttaaaaaataacttttagtaaatattgttaatcaattgtgatgctattgaataaatacactgttgctcaataacaatattttttcttaaaattctcaaagactataaaccgtgtcaatagtattattttttttaagaatatcaataatcttcacatcatttaaaataataattaaaaaataaaaaaagagaagataacaaggatgttattattaaacatcaatactttacaatttttttactccaagtttagttaagtttctaattttacttgtaaagtaaattgaaatttatataaattattttaattttaaaaataacttttctaaaaataattttttaaaagtcttttagaaaaagctacatatcctaatttttttcaaaaaataatttttatattttttgtccaaatacccttaaaagttttttaaaaaaaaacacttataaatgataaatcaaatgagacaattatttattaaaagatgaatatatattatcaatcattctatagcattcccattggagttgttggcaccttcgaggatgatttgaagtaggtcaatattgttgttattactttcacatgctgatccttttctttccttcacaacttttaaaccagtcctcgaatctcattttctctaaacttcactaataatcttggtagaaatgtatctaaaaagtaatatcaccaatcacacaaacagaatacataacaattagatttaaattaagtttggagattggataaacaatagtatttatatattaaaaaagacactactaattactgatctatctaaaagctactttgccaaaaagcaagcaataagatcctgtttatattgatgtgccaaaatgccatgtacattattgaaatcatcctctaattattatgtctttaaaatatatattctttcaattaatgtatatcaacattagaatcaaacatgagtactttgagattaatttataaaataaagggaattaaattaatagcctcagaaatagaagtgtggtatatatggttttcttttagtaagttcccaaaacaagctcttgggattacatctacagaacaaatatacagatattaatagatatgattttgttttttgttaaagttattaatggatatgaatatcagcaactcctccctctttttcaatcaccctcgtccatgacctcacacaatcttactgtagattcactcatcacattcatcataatatcctcctcaactgcttatcataagtaattcgaacaaatgcttatcctccccaatctaatattatggtgtctgtaaaattatgtttttgacacaatagaataattagatttgagtgtaattaaaggtaattacataattgtattttacaattttcaattctcatactcatataattattgagtataattataatgtgtaattattaaaaacttttaattttaaatatt

SEQ ID NO: 26725 - DNA, 2177 bp, Cannabis sativa
aaatattacaaaatgatgacacataatatataatgtcatatgttacatattagtttgttacatgtatttaatctacacattatattattgataaataatataacagaaatattctaatagagttaacatgacttcacaatatcatattatgtctaacctaaatttataacttctatgtcatgatgtttgtgctccttgtttccaagcttgtactcaatttatattgtcaaaacatctggtctaacacgactcacaaatattgtattgtgtcagacctaaatttataatttttcttgttatgatattgtgctcgtaatttttaagcttgtactaaacttatattgtatcaaaaatcttggtccatatttatatgtttaattaatttgaaatatttctttcatttcttagaaggaatttattccaccagaatgagattataagattttaaattatatatagcaaaaaaaaaaaaaaatcaattatactctgttccattaatttcttttttaacataacatgacctattattgaaaaaaaaaaaaaaaagctgtgtaagtttattatatatatgtcaaaaaaaaaataataataattctaacgagaaatatgacaattatacgacgacagaacaggagtcatgcatgcaaattgggagacctacgagggtccaccacaaaaatggtgtggacgcatatgtagcaagctcttcatttgacacattaagaagtgattctcaacattagaaaatgattagttcacttttgaccaattagtagccacattaaatatatattaaaacatttaattggattctttgaattgaccaactaactaaattagtcatcaagactaatcactaagaaagtttaatgataagatttgttttgactgtattttttttttattttatgaacaacttaaatattttgtacataaaaccttttattgtattgactattaattacatagtatttcggaaaaaagttttttttttttttttggcaacagtctaattttcttttcctaatcaagtaaagtaatggtcaaaaagaaaacatttcaatttctctgttcatttgttgcagctttggtctgctctgctctcaaccaaaataaaccaataggatccaatccaagtggctccattgttcttacctattgaaactagccatcatcttgagtgcttgtatatttatttatttaatatatatatataaatatatgcatttatattatgtctcattgctttaaatacacaccaagtagtagctagtggctctaaatgaacaaaaaatgaaataaaatataatataaaaaaaaaagggacaaaaatactgagcattattttgtctctaataattggatacaagaatattattattgttcatgctttatcacaatgttgtttgaaaaaaagaaagagcacacagtaaaaactaatcaagtcattctacaaatagtactaattcatgtgattttttcattcatgttgtttaatactgttcggtgtgaggtttatgaaaaagaaatggaaaacaaaataattaaaataattaagagagtgctgggttttataacttaaaactagtaaacaactcttattttgtggcacgtgtttaaaaaaaataaaattatatatatgaaataaattaagaataattgagtaataaaatttattaaattttaaccataataatttttaatttatctatttcaaataatatgagaagtttttttttattaggaaaccttatgacatttttggtataagattagtattcgcttcgatgtttgttacataaatagattatgtaaatataaaattatcatagtataagtatttaaaaaaaatgaatcatttatctaaattcaaatctatatttagtatatataaattagttagatataattagttgatatttacattaatttaaaattttctaactaacaaaaacaaaaaatcatgattcttggtttattagaaatgtgttgaccataacaaatcacaaaatttatgttatgtaattaacaaaattaaaatataattgaagcaaacactatttagttatacaaattgaaagacaaaaaaaaattaaagttgttgtcattactgtatcttactttcaccactacattcaaagtcattgtcattatcgtattttacttatagttaccac

SEQ ID NO: 26726 - DNA, 2151 bp, Cannabis sativa
caatgtgatgtcatttacactaacctggactgaatcttcaaaaagttcgtttagagaggggtcagccattctcttgaactcctaacaagtcggactgcacacaactaatgaaatagagagctaaaaaaccatagcagaatactgggacaatggtgagctaatgaataagcactctagctcccatactcttccaacggaagttatactctagagagagcaaaagactgggttgtgtattctttttttttttttacccataacaagctgatatatagtagcaatgctctttagttataattatgtgatacttgacattaaagttatcatttaaaaaaaaaagacgcaaagtagatttttgttaaaaattaattaatattttaatgagaatttaaacgtggtaaaaaataattgaaatattatttcaagtatcacgtacaactgattattttttattattattattatcctattttttttttaaaaaaaaaaaaagtcaaaatcgtacacattagagttatcatttttatattattattatatattttttaaaaaaaaatccaaaaaattaagattatatattgtattattattactataatttgagttttatggagttatttttgtattttttatagaattaaaattaaaaaatgagagaattaaggagaaaagagaaaaatagttttaaaacaattttatatgaattaaaaattaaaaaatgagaaaattaaagagagaaaagaagcatagctttaaagcaattttagagtatcatgtcaccgctttatgtttctgctttatatatatatataaaaatttagattatatatattgcttgatattttatgtatgtacgtaatttacgattaattatatgatttaagttttaatatttttttagaatttattttttattttctaacttttataaaatattttatatttttatagaaaattaaaataatagtaaaatattagtttgtagatttatacttttttatagaaaaattattaaaaaaatagtaaaatattaatttgtagatttatgctttaataaaatattgaaattgagagaattaaggagagaagacaaaaataattttagagtgattttagaatgacatggacaactttatacttttccttaataatttttagctgtagttgttttaaaatgatttattttttattttttaaattaattatttttttatttgtttttagatatcaatttatatagattaatgaaattgtgtaacttatataatgtgtttacgtgcacaatccaccaaaaaaaaaatgagttttgagattagctgccagcttataaaacttttgaaaattttgcagaacttaactcttatatataaaatataaagttctgtaatattttttttaatattagtaggacttgtaattatactgctcgtgatgatgtggttaagtggactttcacacaccaaatgcttggtttatcctagtttcctccttattggcaacctattttgtaactgtcttttcaatttatgataagtatgctcttacttaaaaaaaataataataaaattttaaataatcatatattattaaacaatttgacttttcgaaaagaaaactattttatattttagaagaagaaaaactgctaaacgatatagagatgaaagaaaaacactttctttgtctacatttatgataactataaatggagatagaaatgaaagcgccattggccatgaaagcgttagtcttctagtttgggcttctttgatgcgctttgtggagagacggctggttgttgtttggagaggtagctaaagaggaaagcttgaaatttatcattataagagcgattttagagtggttatcaattcgatcaacggtttggatgttcgttggggaattgaaaattactttaatttttgtttaagactctctcggctgtttgatggttgtaatttttcttttgttagcaaaggttgtaactttatggttggccaaatggatttttacgaactaccggtttggtaggttgagtgaatcgtttatctcgaacaacattctatgtaacgacagggccagcccaagtattgaacagcttgggccattgcacaaggccctcatttttttaaggcccattttttttttttt

SEQ ID NO: 26727 - DNA, 1562 bp, Cannabis sativa
ctcaatttcttacagctcagtaactttataatattttattagttgctgaaaacctcggtcaacagtatagacttagagtcttagagagcttgtgattaggtggaaaatgttaattaaacccattacaagtcacctaagttttaatacaaataaattgagatatctggcccgagggcttacctcacggccaacactctcacaagagcctaataactatatacaatcacaagtaacatgagatgacattaatcgattctactctattaaagaccaaagcatatttaaattgttcagaccataaaagtactatgttttttttccttgtaggactaccacaagtcccaccattttttccttattatatggccatcttttgtgacattttcattcactccaaaccatatccatttgatcatattaatatttgattttcatgccttcatgtaggagaacacaaacctccaaatatatctcactaattactagtgtgtcttaatgaaatcatgcctgtaaatggcactataaaataatgtagcactgtattttttttcccaacaaaatgtacacacatccccatctagtactggcagacgtagttagcgctataaggacttttgaattagcctaacataattaagaaaatagaagggttgtttaaaactttatgtagcagacaaaatggcaaaatgctatgtttctcaattatgaggatagatacaaacacacagagccaatattgagtgtgggcgttcatgtgtatgtttagaagaaacaatagaatgaaagcaaaattaagttctccccattcacagccaaaacgaatacaacttctctatttgcaaccaaaaagaggaaatgatggccaaataattacacactaagagagagagagagagagagagagagagcaccatacgatcgagtacaaaccatataatgcaatgcaaaggtgagtcttatcgaaagctctctctatataaaaataaagaaaaatattgaatgacttccactatataatgttgggctaaagccaggtctaagagaatggtatttatataaaggaaaatatgctgttcaaatcacaagacattaaggcaaacatgggatctagttggtgggcttcatgtttgccacctaaatgtggagaattatcctctttatttagaggggtcctctttcctttctttatgtcgatttactctactttgaacttttcccgtatgttttcttcttcttttggtgatacttctatgttatatgtttcagttttgtaacctggccatttgatctcctaaaaacagctcaagtttctgcatggaatctagtatttgttctctaacatatataatatatagtctctctctgtggctgatagctctatacagatattgtcaaattagtcatgtcaaagacttttaaacttcatttgacatatcgtggaatgagttgaagatgttacactattgtcaagataataattatgatttacaaataaacaatgttagaaaaataaataacataaataacttagcattaggttagaatttgggaataaggtgaat

SEQ ID NO: 26728 - DNA, 1623 bp, Cannabis sativa
gcctggctcccccagtcttcttcttccccttaccgcccccagcagtggcggcggctgcggctgcggctgcggcggcgatcaagctgttattgttgttgttgataggtggcgaggaggcggcggcatctccgggcgtcgcgtgggtggtctgaggagacttcttgagacggcggcgagcgctggtccggcgaaaggagaaaggaccacccttgccgcccatcctcgcctttcttttcttcttgtatttctaatctcctcttcccaatccatatacgtccgtaggccagaatcgtgcttcctcttcttatgtccaaaagtaggaaaaatgtgttatttttcaaagttaatggatcaagttaacacttgagctagtgactacctcaagtagcgatgggtgagtgtatgttggaggtcctaggttcgagtacaagtaaaacatgataatatgattataaaatataaacgcttaaataaaaaaaaaatcataaaaataacaacaaattaataatattacaacataaaaatattatataatctgtaaataaaactataaaaaatcgtataaatatttagaattttgtacaaccatatttttataatttttttttattatttttgtgtacttgtaaaataattctaaaaaaagtactagaaaatatgttcataaaatatttgatataatccaattcacacgatttaatccaatttattttacgaagtacgaatatttgtatttatgtgaattaaataggattagaaaatttaaaatgtgcacttatactaattaaatgttgattagcatgtaaatgacttaatccaatttaagtatatttatgtacattttaaaatagaaatttttacaccaaaaatataaaatatatactttattacatatatattttaaactaacatttatactcatcaactttattttattacaattttaccacttgcacacacacttcatacacgtcattgattgatgacttatatcaattataccttacatcatttccttctttttttctctcctttttcttattattttcaatttcttttcagttttttttttaaaaaaaaaatcaaaacatccacaactgaactcttctccctccacgatctcaacccgttttccctcttctttctgttcttctattttttttttcaactcacattaaccgatttacataaccgttttccttctttttcgtttgctcgtaatccattcataaatatagctattactcattcttcatccacttatttccctgtgccaaagaaaagttctaaaatagggttgaaatctgtagctaataggaataagggcaaatgtcctgttgttcaagacgatgactccaattttgcttctcagttgtcgaaacgtgagcgagctcctcctaaaaagaaatcaaaggttgctgcccatgaaaaaatttctcatgctcctgctcaaaaaaaatgatcaggatggtgctcctcttcgatcacaggtttattttcggtttttctttagtttcaccccattttaaaaaaaatttcatattcaactttttgtgggttttgtgtttattgatttcattattttaggttttacattttagcaattcttttgtttgttttttt

SEQ ID NO: 26729 - DNA, 2657 bp, Cannabis sativa
  modified_base (2173)..(2173): a, c, t, g, unknown or other
  modified_base (2369)..(2376): a, c, t, g, unknown or other
  modified_base (2624)..(2626): a, c, t, g, unknown or other
ttgaccaatttctgattttcctgacttcctttctctatctcaacttgtaaagctgtatttgggaagaaatgcaatatatcagagcgagtcaagaatttagtagcaatgattgtaaattgtaatgtaatcatccaccatttatacagaaaaccaaaaatagtaaacaaattcagtgttttgaataaaagtaaggtaattcaaaaatgttgaaagtgaaaataataataagaaatacacacacagagtctaagacacaaattcatgatattctaagataagcagaagtcaatatatatggtcattacattattggaattttatactacaatattgcacaacagacaatgacatgaaaccatatttaaagatttggttcaataaatttatgcaaacaaatgaatgaaatccaaactgaaaaaaaaaaataaaaaaaataagcataaaggtggtaaattaagataagaactaatcaatgaacaataatgtaagaaattaccacaattgcaattatgaagatcttcaagaatttcttccacaaatgcctgcattgaattctttaacatactattcttcttatccaatctgcaaacttcattctcaataaactctttctccaaaagcaaagtcctcagatcatcattcttcccaacatcactctgaaactctatgcacttctttacaaactcatctctacacatcaaaatcaaatcaataataataagaaaatatcaactaatccctattttggtcaattcaattacttactgcttatcactgattctctgcagcgtgttatctcgcttcattctcaaactactcaattgcttctccaaagattccaaagagtttcttgaactatctacaaaccaaatcaaataaaaatcaaatgaatatatgcattttgatcaatagaatagaaagaaattgagaaaattgaaaatgattacgagcgagagcattcaagctggtgatctgaaactgagaaacgtaaagcgttttggtgagatcggattctctggcagccatagctttttcggattccgagcatttgacgatctcagattcgatctcacgagttatctggatattgtcctcaacttcttgattgatctggatatctccaaaattcgagtagttttcggaatgaaaattagagagaagaagaaaaggaagaaggagaagaaagttacttgatcgagcatgtccttgagaatagagatatggctgagcattgaactcgagtcctccattttcacgctcttcacctctgttcttctgctctttgctctaatcttcaaattttcccgctcttaattgttctgtatttatagccttgctttttcaattcatctaataatttaaggggagttttttttttttttttttgagaaaaggcgtctatatcatagattcaaataggttagacctctcggtagttacacaaaatatacaaccgaaatcgggatagacccaaatacgccacattatgagcggcaaaattacaggttctactaataaaagcaaaattacaactaataaagaagggagaagacttagaacaaaatgagatgtagttttcaagcgcctggcaagaatccttactattgagagcattgataaccacactcgagtcactctccacaatcacaaacttagatccaatatctaaggccaccgagtgagaatagaactccccttaacaaataataaatacatctctttattaaaaaaaatagggaaattctacaatgcacctcctcaaaatggatatattaatgcacccctatctgttttagcacccgaaataattttttagtcaaaatttttccgtatgttatagttatttaagacaacctgcaaaattttaagaaatttggaaaagtttaatacgctgaaaactacgttcaaactgtgtattgcacacgtgattattttattttatacgcatgtaaaataagctatttgaacattgttttctatattgtaaattattcgaaatttcttaaaattttgtaggttatcttaaatagttataacatacatgaatatgaaaaaaaaactagactaaaaatttttttggatgccgaaacaagtcaatggtgtatcagtacatcccttttaagggggtgtattgtagaatcacccaaaaatatataaacttaaataatttttnaaaattacttttaatatttttttaaaaaaaattttcctcacaatattttatattaattttaatatttgatttcatttttataattttttttaactcatgtatatatttttttatttttttttctaagaaaatttcatataattttttattttaattttttcatcataatatataaaatataatttatttttatttnnnnnnnntattttttaagaatatgaatgggaagaaaaaaattaaaaaaaaaatatagtacaattaaagatataaactttatataaaataaaaactactaaaatggtgtgtctttagaaattttttgggtgtaaataaaatttcccataattcaatgtttatgtttggttaggaggattaaaaacatactaataaataagaatgagaataaaaataaaatagaatcaaatttaaaatgtataaaaaaattgataannnaaattattaaattttttatcatagcatctct

SEQ ID NO: 26730 - DNA, 1810 bp, Cannabis sativa
  modified_base (1707)..(1718): a, c, t, g, unknown or other
cgtttaactaagcataacagttgaacgaatccaaaacaatagatagcgaggcatccatcttgtataggaaggcacactcatggtaccttcacaaatcaactcaagaaatctttcaatgagatccactactccatcgagttagctctctcaaatagaagctaacattcaaataatgttgactactgaagttcaccttgtcaccaagaactgcgattgtcagatggagcattatgtcttcaatagcataaacgacgagatttacattatcaacctcgaaaagacataagaaaaactctgactcgctactagggttattgttgctatgcatctagtgagatgtcccagaacgatacgctttacaacgtatttaatacatgtttgcattgacccggtaaaagcgaaccaatcacagtttgtgtgaatttttataataaccgcatttattttacgtaagacgcaatctaatcccacaaattcaagggattattgttgtaagatattagtctaatttttagttcactaccctcctatgtaactataaatagagcagttaatgaaaaagggacaaaaaattcattagagtaaaagccctagaattgtatcagaaatctaataacattgacttgtgaactatgcagaattttaactgcaaaaccacgcaaaaagctttgtgttcttattttttccttcactgcttttattttctgtgcaaattcctcacgatttaggctttaatatagttaacgaaaatctgcgttaacactagctttaatcctatacttcgtataaaggagagaaaaatgaaaagatagaaatgtatctttttttttctgttgtttggaaagaagaaaggaaagaaaaaaatataaaagtgtaattacataataacaaatacatataaataatatctaaataataactgttaaaaaaaacttaaaaacctaaaaactatataaaaataactacaaaatagcaaaaagacatgcatcaacctcatttaaatatgtaaattattcataaatcaactctaaaaaaattacaagacgtaaaaaaatattacttttattaatcaaatattaatcattctccccaaacctaaacaacaagcaaaatacatgtatacaacaaaagtaacaaaataaaaatgataaaacaacttaacatcaactcttcttaaaccctataactggtataaaagaaagaaaaaatgaaacataggacatacagaggagatagaaaattatgatgatagaaagagaatgtgtttctttttatcttgtttggaaagagagaaggaaaaaaaactgtaaatgtgttataataatttaataattttatataaattgttttaatagaaaaagctaattattaattttgtaagagttaaaataaaattaattaatattattcttttaaaaaatataattattttttcaaaaaaaatagtattggacaaatttgagtgtgactagtaaaaaaatataggaaaaattagaagtgcttctaaattttaaaaatataacaaattttgtgagagtgagaaaaataaataagagtgttaaaacttaaaaaaaaatggtaaaaatatgagaaataaagtatgtgaaagaaaaagagtgggtgagagtagaaagggctaaagaacaagaaagaaaaaaactaagaagaagctaacaaatataaatatatgggtgactattcaatggnnnnnnnnnnnntgtaaccatatggttacatttttccttaacctgtaataacaggtaattaataggtagactttccttttttagatttaattaattataattaa

SEQ ID NO: 26731 - DNA, 2732 bp, Cannabis sativa
  modified_base (1551)..(1551): a, c, t, g, unknown or other
gggcacaaaacccaacagacacaatttttgtgcttgaagacttgataggggcccctagatttaaagctggagatgatggttgttgatattcgctccaggaagcctgtctcttcttgcctttatctctgcctcccttggtgacttctcaaaccttgtcagaccgatatttgatgttgcccaggaacttgttcagtagccccatctgtaagataggtagttgatctgcacaaaacaaacaaaatatccatcaaccaaggccatataaaaagatcagatctttacaacaaattatcatacaagacatcaagaagatctaaaccattaattttagaataattgactttccccttagcaaaaagagaaatgtcttctcgacctaagttggtttcatgttggaagaaggctgggaagtaaattttactaaacacatcaactttgaaatgatggtggataggcaaaacgaagtggttgggaccctaatgatgcaatctactttatctatacacttaatgtatggatatttacaatgatctaaaatttaagaaatatggatcaaatcaacattgatcgacaatcccgaaatcagttagagtaggagccctaattatatggaaaggtgtctcacaatttccagaggtgctcgctcttagagcgccctcattcggcactatctccttgaatctaatagtaagttcttcagcctcgcttaggctttctaggaattatctcatccaatccgctagccattgctcatcgacttttactacttttaaagccacctcaacagtaataactacacactactacaaaaatgactttttgcttcagttgtaaaatgacacaaaaactttttgtgtcgattctgtaaaccgacgtaataacaatagacacaaatagtgaagttatttgcttcatttctaaaccgacgcaaactttttttttcttctgttgagaactaaagcaaaaagtacaaaatattagcgtcagttttggaatgaagcaaaaaacttagcttcaaattataactgaagctaattagattattgagtcggttagaacttgacacataattttacaatttttttttttactttttgtgtcggctataaagtgacgtattgttgtaggtagggaaaaattccaaatttctttgcaattttccccacctgcattttagatattaaaattggctttcataataatatttataagttataaaaaaataacatttatatgactaacaataacatttataatataataatgataagatttttcatctaatataatcaaaagtaacgatcataaaaattgtatcttacatgtcataataaaaaatttatataactatgaagtatatcaataaaactaagtatcaccaaaagtaacaatcatatagctaaaagttttatatcctacatgtatcataacaaaatgtaaaaactcgcatactcattcttttaatatataagatttcacaaaacttcctcattcatcccgtatttcgtttatctcctaattgatgtaaggcttgtcatctttgaactgtanaaccagagatagataatattaaatgtatttaaaataaaaagtaattatcaaataaaaatcatatatgtttaattacctcattcttcaaaaaagttgatggattgtgctgagtcatgaagctttttaataatcttcatgcagtagtatccacactgtacatcgtctgattgtcctcgacacttgtattgcctggtctttacttcaatcctgtttcgtatatttttttgaatcttgtaggtttccaaagcactacaccaaagagaagttacttagtgaccaaattagtaacaaaagttaaattaatgaaaaaataataaaacttacgttgtgacacattttctaatttcattctgaattggcatattctttgggtcaaggaatgccactgactgagtagcagcctaaatgattatcaccgtccaatgttcactacacataattaaaaagcttagtcaactccataattgatatatatatattcacatatattaaattacaaatttacttatagtggattctagggacaaatcaaccattgatcgggttgtatttccatcaatcgctcagtgagattccctgtacgtttcttaagatctttacaagctattgaggatactgaagcaagattcaaaaagacatatgtattgttcaatccactaatatttagtgaatgtaatcacaatattttattaatataattctacaaatataattattaacttaagtattaaccactatacctgcacaatatagtcataacataagttccaacccctcccaactcgcacacatccaagacatcttccttgttctatccaacattcatagtcaggtctaaacaagtcaggtttaagctcatattgtattgttttcttcttatgacaattatgcacaatccctaaaagcatcgtcatcaacaatgtattttcaaacgaagtgtaacgtgattcatgaaatgtcactggcctctttgggtgtatcaactcttgagtaggcggagctagagaatcttgggtagcttttatctttcctttccccaacaacaaaaataactttaattgaaaaaaatttaaatgttctacattaagtttaactaaagttacataaattacctaaactaaacaagcggaaggtatttttataagtttttttggccaaaagatgaaattttgcacagctaa

SEQ ID NO: 26732 - DNA, 8045 bp, Cannabis sativa
aaagatggttaggatttcagtaacaatatatgggtggaagaaatgttcaatttttcctaagttaaatggccaagaggattaataaagaaagaaacactatatcattaatcagaagtgttgtaagtgatgccttatatgagggatctaataatcttagagagtttaaatttaatgatcatttctaactttccaaatcaatctcttactcaagagttcccttccccaaataaggctttgccaagtagaagatggagagtgatccttctttgcttctaagaaacttgtatgggtatagtatttaactttaagcaactgggcaatgagggtattaggatttttgtaaactctcaaagcttgcttagcaagaatagcttggttaaaataagttgatctaatcccaacccactaaaaaatttaaaatgacagatgtttgactatatttttcaattaattttttagcccttaacaaaagatcccaacatgaattttgtgaaaagggactcaatcttaaagcatatgtgttacgtctatattttgagcagtaatatggtgctgacacgtgtaatatagttgtgttatctatattcccggatacctaatatgtggcaatcatggaagggtgccacattggactatttacaattagtgtgtaccttccgcttattagtatcatggaagaagttatattctatgagttagtcgaagtttctccatattagcaaggatagaatggactttggcacccccactattcatccgctattaagaaggatcagagtccttagaagctacaaatattctaggagggtagcaggttagtttgatccgaaaaagctatgacctggtggttgtggaattcatttggttgtatcttgtctagagctcaaggcaaaggctgcatatcttctgacaccaaatcatatcttgtccattgtgtcaaaccatgatagtgtgtgtacgtgcctctaaagccccctttttgtcccacggcttgtcaaagcaataacttttaaaggtaaaacctttaagcgatacgtgtcctcactcccacgaaattccttatagtagtcatgcaccacacaatgggaaagcttcatatcgaccaacggttagatcataatgttgtagtatcaacccttgtggcatgttgagtaagaaatcctaggtgggtaaagggtatgcccttattcacatgtgcctataaatacccttatttttttaatataaaaagggtgaacaatttcttacgtaccaaactgctgctaaaattcctactagctttcttcttcttcaagagaaataaaggaatatagggtttgggtttatgtcgtaaatacttgtaatattcaaacagtcactagcaaggctaatacaatagattcgtggactagggattatctacgctcaaaccacgtaaaaattatttatttataatttattatttcgtatctttcttaagctctaattaattagtttccaaaaatctcagtaaacattttggtgctttcattaagagctgaggaaagttttctagttgccgcaccacctcaaccattgtgaatacacaaaagaatgtaagcaagaaaactcaactagataccattatggaggatgtaggctttctcacctctagccttcagccaggcggtgtaagggaagaaggtacaaccattgttgaggatctaagagaggatgtcgagaacatgtttgacagcatcgatgatgaccagaaccctaaggatagggaagacgaggacgatgacaacggttacgtgaaggacgggtattgtaaagggttactactatgaccatgacctaaacttgatgcgagtgaccaaggaactagaggctactcagacagggttagcagaacaaaggaagctcactaaaagaatgaaacaaatgatggagcacctccaaaacaagtttgaggacttggcagagcccgatgatgacccttcggtggaagtgatgttcaaagatcgtgctcataaaaaaactgaggtcgaaaccttgaatccccgtaaggataaaggtttttgaatccctagatcatctcacagtttacgcatttctttacaatcaaattgcttttcgttgttagagattaatttgtaaggaatgccaaacctacaaataatagctcgattgacaaacaggcataactttacagctgttatggtcgctagagcctcaacttcagtccattttgtgaaatagtctactgcgaccactacatactttacccctcactttccttttggtagcttgccaattaagtctatgccccagactataaatggcaagggactaatgatagagtttaactggcttggtggtttgttgacataggtcacaattctttgacatttgtcacacttcttagcgaaactagttgcgtctgctcgtaaggtcagccagtaatatccttgttgcataattttcaaagcaagcaaattgcctccagtgtgattgccacaaattctaccatgtacctctcatactatataatcacactcatctccatcgatacatttaagcaaaggttgactaaaactcatgcgatacagcttgttgtcataaatgacatatcgagcagctcgatatcataattttttagcctcgactttgctttcaaggagtttactcgttgttaaataagtaacgattggagtcatctaagtgattttcttagttacatcgacttgcatcatctcctcgtgatgaatagtcagatggactaacacattaacagaaattacatcgagcaattgtgcttctcttgttgaggccaaacaggccaaaacatctgcatgagaattataagcacgaggtattatactaataataacttctttaaatttatttaataactcacaagtatatgaaaggtatttggctaagcgtcctcctctggccaaatattctccattcacttgacaaaccatttgcaaatcgttgaatgcctcgagattattcaaccttcatttcaagagcaagctttaatcctacaattagtgcctcatattcgacttcattatttgaggtagggaattcaaatcttaaggcagcgtgcactttgaatttgttagggcttattagtattattccaccacctgatcctttgttgtttgatgccccatcaacatacaaagtccacccttctcccaacgacattttagggtcgactcgctcttctataataatcgctacttcgtcgtttggaaaatcaagaatgaaatcagcgagggcttgtcctttgattgtcgatcgcagtttgtatttgatgtcaaattggcttagctctactgaccatttaagtaatcgtcctaacgcttctagttttgctaatacttgttgcaaaggatagtttgttagtacttcaataatgtgtgattgaaaatatggtcgcaacttttgagaagcaactacaagtgcaaatgctagtcattccatttgtggataacgagtttcaacatccaataggcataaactcacatagtacaccggatgctgcctaccttggtcttcgcgaattaccactgagctaatgacactgccaggtagatcgataacacttctgtaggcattagtttggatagtatcaggggctgccccaagtgtgtttttagtgcctgaaaaggctcttcgcatctatcagtccattgaaacattttcttaccttttagaatctaaaaaaattctttgcatttcttagaggaacgtgatataaagtgatttaatgcagcgactttacctgttaggctttggacctctttcggtttggtgggagatcacatctccactaatgcctttatctttgctggattggcctcgattcctccttgattcaccataaaactgagaaaatttccttagcctactccgaaaatgcacttcaaaggattaagtcgcattttataatgtcacaagattttgaacatggaatctaggtgaacgacatggtcttctatgcgttgagattttacgagcatatcgtcaacataaacttccattgtcttccttattaaatctacaaacatcattttaactaatctttgatatgttgctcttgtgtttatcaaaccaaaaggcattaccttataacagtacaaacatcgatcaatgatgaaggaggtatgcttctggtctagctcatacatcatgatttgattatatcctgagtatgcatccatgaaactaaggagctcatgacctacggtagcataaccgagttggtcaatgcttggtaaaggaaagtcgtccttgggacacgctttatttaaatctgtaaaatcgacgcatgtgcgccatgagccattaggcttttgtacaggaacagggtttgctaacaagtttgggtaaaatgactcccttatgaagctgcatgccaaaaggtgatcaacctcttctttgagtgcttagtacctcgcggggtccattttgcggcacttttgtcaaactcctcgcacttcaaggtcaatgttgttcaaacgatgactgacacatgaccgacctctggcgatattccgaccatgtctgaatgtttccatgcgaaaacatccaggttcttcttgagaaaagtgacgagattttctcactattgaagagttagtttggaaccaatttttaaaactttattattatcaaatgaatcgataggtaccttaattgtttcttctgtagcctatgctgtattggtatagtcgaggattctgggatccatgtcaggtttttccacatgcgagatctcctcaattctgaaaaacttcatgtcaaggaggaggagcttcaagtaaatatataatatttactgaccttttcttttctacgagtttcaatgtcgtgttatagcattcccttgagtttgattggactcctcgcactgatcccacacctgcgagggtggggaatttcatagtgagattgtagattgaagaaattaactttatttatttcaagattgggcgacctatgcctgcattgtattccgaatgttgattgattaccacaaaattggccatcgatttggcagtaacaggggcagttcctaaagttataggcagtttgatcattccctttaatacgattgtatctccagtaaaactgtagatacttgaatttaccggtcgcaagtctttctcgtgcaaacccatttgcttgaaagcctaaaagttaagaagattgatagaacttccattgtccactaagacccaatggacattgtccatagcgatgtttgcgactataacatgcatgtctgcgtgggggtgatgtacccatctgacatcactctccatgaaagttatgtcatcgcactccttcttgaataacttttctagtcgctcactcaaattgttcacattggtgagtgttttttctttttcctccttggcatagcgttcttatgccttcctagaatctccaccaatatatgggcctccgataatggtcaggatattgcgaggagctcaagagccactcacattatttgtagtgtcactttcatccgcttggggatgattttctctgttctttttatatttgctaaacttcacttgtctgattaattcctcgatttcatcctgaaggaaccaacactttagagttgtatggccgatatccttgtgatatttgctgaacttctttggatccctcttgtcatgatttcctatgattggtggaggctttataaataccttattttgttcctcaatcgcgtagatgtgatcacaaggaatttcatttctgtgtagttgacaaaccgaggacatccttttcttttcagagacatctccttcttggaaggggatttggcaagttttagacttcgtcacctttgtggactgcgtctccttgggcttcgtcctctaggattctttcctttcgagcttcgagagtgcgatcgtggcacatgtgactcgcgcttttcctttcctctttctaactcagcctaagagttctcaattctcttgtacgggtcaaccattgcaaagaattccaccaatgacttcggtctttgcgcttgcaactccttctagaagtcagttcttggcaagactcctgtaattaacatgcaaaccaatgaagacttgggggccttctccacttttgttattttagcgttaaaacatttaaaataatcttataaagactcaccgccttcttgtttagtatttgccaacgttgtgtacggcagtttgtacgtcatcgtggcctaaaactgcgttaagaacaaatccacgaaggtctcccaggttgatatggaggcttagggtagttggctgaactaatcatgggcatgttcctccaaggtttccacgagtatacgacactctgcttgctacggtacctggtctacttcaataattgtgttaaatttatctaaataatctatgggattagtagtacctttgtatttaagtgactcgaatagcctgaagcctttcgagagtcaagcttgtcgcacttcctcaataaaagaagaggtcccatggagtttgtaaatgggctttctctattgctcgatcatcctcaatgcacgtaggaggctctattggtctatccctcttggtagaacaggattggcttatgctaccgttggtatggcagcaacagagctatgttggctgggactactactttagttgttacagccggtgcgtaaggtgggttgactatattagtcgggttgtttatgttttgcatgccttgatcgcccattcggggatcaagaggctcgttattatgtcttggtgttcgggatcgcgccctgaaaatttcattgagatgatcacgaagatcacctctatgaacatgatatcttcctccacgttgcgcctcgacaaatcctgaactactataaacacttggagagcaattgttagtgtaagaagagtgagactcgacatcatttacctcaattctcagctgagctcagcttcgcgggttacctcacgtaggatattattcctgcggtacctcctttctaacgcggttggtggtacgagtgaccggttctcttttaggcaaagaattatgtgtaggctggttcaagtcgagaccttcctactcatcttcttgttccctgcgaacacgagtgttattaatatgttcagtttgccgcctagtagttgttacttgaggattgtttaaacgcgtgttaggaactcgaggtggacgtcgagtcctgactcttccatcaactttggcctgcaaggcccgcattttctcctgcaaggctgtatactgggccgtagttaattggataatttctttagacaccaaggctggtgtgataggtgggaagtgtcctatggtggccgctggtgttgaagtttcttcggcacgactggcggttttcggaaacaggttcaggggagtgacagtagttcatcccacacccctatttattgtgtcaacgggattcgctccattgcctaggagtggaacaatcattgttccaacgttgaaagaacttgtgttgttgtttctgttcgtctagtttccagccattttgattttcctccgaaatcaacagtaaaaatcgtttccacagacggtgccaaatgttgttagaggaatttagacaacactaaatatacactaaaaatataattatttaataaaaaagcgcgagtacttaacctataatggcaagttttcaaagagtaggcacacagacaaactggaaaactaataaacacaatgaacacaagagaactatagtggttcagtcagatcactgtctacttagtccactgttgcaaggattttttgtcttctttttttcatgttggatcactcctttatatacaaagcaagtgttttttggattacatagaagttaattgattatcaaacaattttacattgaatatcagtattaaattaagaaaaatgtaaatgaaataaatgaagaataatttaaatctattttactaaatacagcaatgtatgcaacttttatagtgcaagctgtctattcatctgctcgcacaagctcacaagctaagggtgcattcttgttaaaacgagactaatga

SEQ ID NO: 26733 - DNA, 3879 bp, Cannabis sativa
ttcatgtatacatgtgtataatttatatttaatttcatttgttacattaatttgattgtgtaaatttacctctatgctacaaagtatatatatacacattattttgtgtgtaaatacatttaaatatcatgaaaagatattgattttattttttaatttttttagaatgatttttcagacaagatgcaaacaaagatatcaactattttgataatgtccgtgtatgtttaacgtgtttagggtgtttgaaaataatcatattttataaatatgaattataataaaaaagttattttgtaacgtgatataaattaaaaaagaaaatggctattaattgcagtcctatttatttatttacatattacattgaataggtacaatttgagtatagaatatgttttttatactaaggaggttaagggtaaaacctcaaagagtgttaacaatagtaggtattaattaactctccaaaacaaggaaaacaagtgagattaaatcatttagcccaaataagccatagcattggctatgtcttttttatccttgggaattcaaaagaaattacaactaagaataaggccatttacgaccttcagtggcgctataaagctccttgcaataaaaaaaacatagggtttgtcaccccaagttggatgatcagattcacagctaaaatctttgcacaagtctcaacttcaagggttgatacagtcgtaaacactttcgttttaatcaaagacgcatgcccatgttcattatagtattgtttcgaaacaaagtgcaattaatagagtgttagtagaaaatccactaatagtatgaaatggaaggaaattagcattgaaaatccactcaaccaactcaaaagcagaaccaaactgaaatgaagtagtacaaataccccatttgcttaaaaaccacaaggcattaacaatattacactcccgaaaaagatgcagagagtgtccaactcaacattgatgcaacacctaaacgacgaacaaaaggacacactgaacttatcgcttgtaagaaggtagtcgactaccattttcgataggaagagcgttaacctctcggggatagaggcttgctaaattttcgaccataaagaagaagtgacggtgaacctatgtttgttcaaagcccaataagcagatttagtgctaaagtatccatttcgtgaacccttccataagagtacatcatcacattgtggagggagtttttgacttaccataatttgctccacatcctttggaaggaatgagaaggaaattttatttcgactccatagccctgtatccgttaacagctcaaaaactttagaagtgaactcaatagaacttggattgaaggccactattatcccaatcatcccaatgcaactgttggtaggtctatttttaggttattttagagtctagttttaggtttattttgaatgttttttatgttttattttttaattttacgcttgtttttacttttatgttaattttaggtttgagatgaagagagttttagtttttgatgaaaatgtggtgttcctcggatttcttagtgatgaaatgatgaacttttgcgaaaaggaacctcaggtttaaatttcttgacttggtacattctagaggatttaaaaagtcaaattttcaaaagccaggatcaaaggtcgcaacctttcattaaaggtcatgactctccaaaagttacagaatgtagtttttgtagaaacgtcaagagtcagcggcctttgatagaaggtcaagaatcttgaaaaatcacgcatttctaagaaaagtcaaatcaaaagttgtgaatcttgacttttttagcagcttttcaatttcgataaaatcacgaagtggggctacatcagtggggatcattcaatttttttggacattggaggctaaaagtgacaactgaaaatggaagaacaccattagaggttagatgcatatttgaatttaaaaagtagttaaagatatcttaagatggttgaaatattctctcaaagtagttgagatattgtctcaagtgattgagagatttcctcataaaaaatatcagtaactaaattcggctatagatatttatttaaataattaaatataatttaattcattgaaaattaactactataaataaaagcttgatttgagaaatcagatgatgcttttctacattgttatttttgaaataccagagagaaaatttaacaagaaaaaattatacactttgtcctagcagcccacactactctttgtgtgtcgtggatcgatttggaagaatacaatgtgagatttattggatctaaattacaagaagctttgaggatacccaaatagtcattaagaggtatttattttttcatgtaatttatgtttcatatttaatgtttatacatatggtgatcctcgaagctatggtacaatgataatcagattagaattattccactgcgaatctaattcagtactataaaattaacattaatgactggagtggttccattatgtatatacattaaatattgtgtggggtttatacatttgtgtatatatgtgatatgtatgtgaatggatagtaatattattatgaatgtatatgagatgagataaatcgttaattatattataaaattgggtgtacgttttgttattattttttttaggaaataatgtaagccatttatggggcataaatttttttatgtaaattttatttttctgaaattatttttatgtaaatttttttataatgtaatgcttaattcatgaagctcggtttcgtaacaaaacccaaccatgacaaaccatcccacctaacggagcttaggttcacggaggagccctggccgtgaactattgccagcagccgcttgctacgggttctatgcccatcgtccagtctagtagctgattgcaccgagggacttcagtccctgcgatcaacgttgttcaatgatagtaaggtggcctgaccaccatttaaggggcaaaggacattcgaggtccctgtgttgtcactgaggttgaagcattcaaagcatgcatagatgttggacgtccgttccttccaaacacgaaaagacccgatcaggtatgggtcttttggacctatttcgtgcgcctagcttcgatacctcttggaccgtggccttccatggccaccgtggccatagtggctccctggagccgccaaccacggtgggccatggtggccggtcccatatacccaaactccactatcatatatatgcatatatatatgtgtatatttcggtatatatgtatatactgttagaatttgtgtcctaaaagaaaataattagtggataatatattataaaatatatgaaatacaattaaaagataaataatcattaattataatagtataattattaaatatctgaaaatttcttatacatatggagaaggtatagtcttgtaaggatgtacaagataataaaaattatatgatatgaataaaataagtcggtagtgtattaaaataatgagaatctttgatatgaaaatgctaaatacaatttactatatacactataaatatatgaaattgagctcttaataattatagaattatagttactggattttactacagtgtccattgatataatcaattccactgattaacatttcttgtgtcggttcgtaattagttttgattaatttactattttacctttctaattatttctgtatcctttagttctgttaattcactagagaaagtataatttaaatccaatttaaatttgcacgtaactttttcagttccagaattaacacataaagagaactaacattcgatccattaggaaaatcaagattctataattgtagatca

SEQ ID NO: 26734 - DNA, 2032 bp, Cannabis sativa
aaaagcatattttgttaatgattggcagtcacattaactatttgaatgcctaatgcaatatgtgaagtagtgtggctacactcgatactacgagagctaagaatgaagcacgaaaaaccaactaatctatactagggtcgaccttatgttaatttgggtcttaggcaaaaataaaaattggggcccagtgaataagtgagactattggaatttgaactcccaacctcttaattgttaaactaatcaaattatcactaggctacaatacatatttagcattaaaagtattattatttattttattaccaaatatattttaatttttttttttgaaatagggtcttgagcggtgggggccctaagacggcgacctccttcgtcttagctcagggccagccctgatgtaataatcaagttgctcaatacattttaaccaacccaatttttcttcaaagaatggagcatatagagattgattatcacattatcaaaacaatgcacattgctacttaagatcaactacttagtacattttcacaaaaattttgtttgcaaaccagtttaaaaatctgaaaaacaaaatggaactacgaaagatttatagtccatcttgacgacgaggaagtattaacataattggttgattaggagattagataaatctgttactaacggtagtagcttttagttactaatttgttaccatttactgtagcttttctttactgtataaataatcattgcaattcattatacaaatcaatatactgagtattctctttctactcttctctatcattttactgataaaaagcattaattcactattattttaagtttaagctaggaccttctagcgtgggttataataagaaatgatcaaaagagatccaaatcaaaaaaaagtgagttttgtgtcggtttagttggaagtaaacgacaattttttatgatataatgtatgtatatatataatttaaaaagaaaaaggaaattattatatgtggttcttctacacttatatattctttagagttgtttttggattaatttattaatttatatgacattggaaagttagatttttgagtgtcaacaaataaataattgcagattctttcttagtctcaccttattattccctttcaaaacggaaaaaataatgagaaaaaataaaggtcactttcatggtaactttataatatataattaagctttacaggtgcaaccttggctccgatccatagaaattagaaataaaatttaaaatttaaaatttaaagtagttcatgactctagattccaatattatttaagtaaaacaattatattttagtcgatttgaggaacttgttaatttcagtactaggtagcctatattgtaataattatatattaaactacattattttttatagatcaacataaaataactgtttgactgtgtttttagtttttaatttataaaattgcattttataaaatgagaatagaatataatttattgtcattttaaaaatttaatagtatttggttcatattttttaaaactacttttagatttctttttacaaataaaaaaatcaatattctacatcataccatgacatgaactcatcctatcccggacccaaatccagacacgaacccagacctcggaccccagctcgaactcaacctagaccccaatccaaacctagactgcagaccccaaacccagacccgaactcgaaccccgacctggacctagacccctaagcatgacccaaactcgaaccttgaaccccggaccccaaacttagactgggaccctgaaccccgacccggacccttgacccgaacctagacccgaactcagacccaaacaccagacgttgaaccccgggtttaggtcggggttcaagtcctattccgggggctgggtccagggtctgagtccgaattcaggtcagggtccgagtttgggtcaggatacggggtacgggttcaggtctgagttcaggttcgggccaagttcgaggtccgggtgtag

SEQ ID NO: 26735 - DNA, 3055 bp, Cannabis sativa
tatgtatgtatggttacattattattactttaattactttcacacataacgctagcaatgtcacgtgaattccttcgacgcacgtgaattccctcaccttcaaatacaatgttccccaatcagatctctttctttcttgttctgtcaaatttaacaaggccctctaaatttttctttacagctgatgatctcacactttgtacatgttagtacatatcgtgtttgtttctcttgtcttaaatttactaagagttcatttagaacgttgtattaggccgtattgtattgtattatattgaattggattatatttttatataatactatattaaacttaatacaatacaatatgacctaataggacattccaaacgaaccctaaataaaaataaaatagagtgaggtgtagtaacataaataaaatttaatctcaaaattaaaattaattataaataagatgagtagtctatcaattttattattatagtttttatatatgtaatgtgagattttttaatattctcatcttaaataactcaattacgagcaatacttttttgctctcaacttatataaattttatgttgtatcgaacttataaaatctcctgtcatgttaacattatataagctaaattactatttttagtctcattgtgtcatcatgcttttgtcaagtttaaaaaattttcagtggctcatacatatatttgtattgtgtcaaataatcttgtgttgtttcatgtcaaaccaatgtatggtaacccaaattgtctcccctaatttttatcactcaagtttggtaggaaggagggaagtagaatatatgaagactaaagtggcatttgattgtgaggaataaaaatatataaatgagaataggaataagaatgaaatcaatagaataaattttaaacgcataaaaaaattgataaaaaaattattaagtttattctctcatatattggaatagtctttcctactaaaatagtggaattatcattctattggaatgtaatcgtgtatttttctttacaatttatagtttggtttgttctaataattttaagtaggttgttatgtaaattttagttacgatttaagttaccttattgattgatatgtgaatttttataaaaatataaaaaaaaattactttaaaatataaaaataaaaaaaaaaattaatatttattatttagtgaaatgataattttagtattgagtatcttaaaatccaatacttggtgataaaaacaagtgtcaaaataatggtgcatgcatttgggatgggaataagagaaatgaattgaaaagatgctgtacgcaattgggggcccatttcagatggttccaaatcctttactgggtgaggaagtaaaagggtccaccaatgaatagcccattccctatagttgggggcccagttgtagtccacgtgccatccaaatctacctttatttattttattttttttatgtaagaggaggattaggctctcaaatcaaatccaacaatgtaagttgtacaaggattagactacatttactgttcactcactacaacaaaaaaaaatatataaaaaactttaaataaatattaataaattattctcatcttcttcttggaaaacaagcagacatcccatcctcttgaaaattatctgactaaactctttattttattttatttaacataataattttccacattatttaagtagttgtataattttttcaatacaataataatagtaataataataactctattatggcattttcttcgactactttattaaaatgggtccatcatcatttttcaagagaaagagtataaagtaagaattttgagtgtcccacaagtcctcgtagcttaaatgatgcaagtatgtaaaaaggctactttgaccttggtgtataaatggtgtgcacattaaaatttcaaggacaactaggacattttagctatctaaataataataataataataataggagttttttaaatatatattttattataattttacggtctaaaatttttatttacaaaaatataattttttcaataaaagataaaaaaataatgaccaatctcatgataactataagtaaattataaaataacaaaaaaagtttactaaagtatatattttgtaaataaaaatgtttaaatcgtaaaaataaaaatttatccttatcaacatacttttgtaattttttttaaaaaattttaaaaatttcataataatattagtgaaaattgcacattttataatgtgtacaaaaacataatttttttttaaaaagaaaaaagttattttaaagaaaaaattcgaaaaatatgaaaaaaaaaacagtttaattaggtcaccagttaccttatcttcttaggatacccaaccagttatttttccatgaattatattttttatttttccagcaaaatagttttttgtttacaaaaaatcatatttttattaacttttgacatgaaagctataaaataaaatttttccataatactatgttaagtaaagaaaattaagaaatggtaaaaaaattgaaatgataaaaaaatatatctctttaatttgacttaagtgagaaaatatacaagaaaatttataattctatgtacattatagttatatgtgcataaaaatctcagtagcaattcatataatattttgtatatacttaatatacatcttttaatattaatatttgagaataaatttaattaaaatattaatatagacttatgataataatattttattgttatttatatattataaatttattaaaagtaaaataaaattaccaaagaaattaataatcattgtaaaaaaaaaatagatcaattacaaaatacaaattatagttttgaatcacaccaatccgattttgagtggaatagtttggtttggtttaattaattttaaatttttaaaaaattgaccaaaatcatagtcagtgtaatttaatattaaaccaaacatattttaataataatatatataattggataataaattactacaataccact

SEQ ID NO: 26736 - DNA, 1998 bp, Cannabis sativa
caatatttattatatacatatttattagacacgatataattatataagcacgatacaatattattattatatgatgagatggttctttgaattgtcacgttcgtgaatcctgttggtgttgtatcattatatgtccttcaactattatcgttttaacaatatactatgtcgtttcttataaaatgcatttgtgcatgcatgtttccgttttttaaaaaaaaataaaataaaataaataaaagtagatatatcatcgatatgaacctgcacaatatataataatatatatacagcaggtaactcacgactaattatgaatgaagatgatagatatattaatatattaattcataatgatagataatacgatcgttgataaaagtacataattaataagtaaataaaaatatgcagatacaattaatttaccatagactaaacacatatatatatggccattaattaaaacaataataatatgatgatgatagaataattataagacatgtcagttgctgggtttactgcgaaacgatcccaatgctttaatggttgatgctctcaacacatattggtgatataatgctgcagccaatgctccaatgaatggtccaacccagaaaatccactactcaccacaaaaacaaattaaactcaatatatcatacaaaaaatattatacatatcatttattaattagagtaaatatatatatatatatatatataataacctgatcattccaagctttttcattgttgaaaatcactgcagcgccaaagctcctagcagggttgatgccagtaccagtaatagggatggtggccaagtgaaccataaacacagcaaacccaattggtaagggagccaaaacctgtggtcatgaacatgaacacataatgcaatgtgaacatttgtccaaaattgagattaatttgaatttggagagagtacttacagggacgtgggagtcacgtgcgcttctctttgggtcggtggctgagaaaacggtgtaaacaagcacaaaagtaccaagtatttcagcgctcaaagcagtcccatttgagtagccagtggcaacggtattggccccacctccgaaggtattgtactcgtgcttcatgaaccctttcactaatcccacgccgcatatggctcccaagcactgcgcaaccatgtacgccacagctctcgcaagcgacacctttctcgccacgaacagccccagtgttacggctgggttgatatgaccacctattcattacacaaaaaaaaaatgttatataggtctgattagtcgactgttttatcgatgtgggactttcggtttgtttatataatataatgctatttatgttaccagaaattccagcagtgcagtaaacaagaacaaagatcatgcccccaaaggcccaagcaatgccaagaaggccaacaccatcacattcgttggaactggattgtttcttgtggccaatgactgtggctactgagacataaaggaaaagaagtgtagctatgaactcagctataagagctctgtaaaacgaccaccgttttagctcatccacgtctattagagcaactggggctggttctacgtagtctctcctctcctctatcacttcttctgcctttgacatttttttccaaatatattttgtactgtgcctttttcttttttatgtctctctctacttaattaggaaatgagggtttatatagaagactaattaattaagaaacagaggtatataatggattattattattgttaattactaaataaaaggggcatgtaatgtatatatacagcaagaccatgtgatatctatgttgtcattggttgtgagcttgctgtccaatcaaacattaacatagcattataaacgtatctctaataagaactaattttattttattttgtttattcttcattattccaaattcatggaattcatatatggtcatttcaatattattaaaataataataata

SEQ ID NO: 26737 - DNA, 4944 bp, Cannabis sativa
tattgcttgaaccctaatgttaacccaaatatagttcaacctaaaaattactaaaaccaaatgagatggcaacgatacaaacaaatgatgcagtaattaaactcagaaatgcaatataacaagcatataagatatcaagaagaaaagctacttactgttcaaagtcaggatttgaggcgatagacagctcttcctacgaatttttgaatgcaatgaggatctcttcgagaagatgaagtcggaggtaactcgcagagaaaatatcaaggacagggatgtcatgcaaaaactcaatgctatttcctaacaaagaagcttaagagtttctcgaaatttctaaaatggaggaaatagtgcaaaggtggttcctttttcttactgtatactcttgacaccagtttcgtcggatcaaagaaatttttgatcctatggacagaattcgaagtagaagtggaaaagatagttatttaatgctgatgtacctcgaaaccgcaaaactgccaaaatcagaggacttgcattttttcaaaagggattatgacaaaaataccctttgtaatcattaaaaagtacttttttattaattttgtttaaggggcaattattatacccgaaatttggctagcacatcagagaaagatacgtgtcaagctaggaaaaatataaatccagacatgtaattataattacatttgaagaggaataactcgttaaaaacataactaacagagtgtgtttataactcgagtgacagaatagtcttctggaagataaagatatacaaattgtcgccttgtgcattaacgagaaaccatgtaacttcaggtgtacaagacgaggcactaaccttgttacgtggagaggatataacagccgtgaaaacacttagcgtataatttacagtatacaagctaagtatgtcagacgggtgaaccgaagcaactgacagcgaggtggccaccttgccataggaagatatgctcatgctaaagatcacctcctcaccaaaagctgcgattgtcagatcaggtattaagcttccatagtaaaagcgataagatttacattatcaaccttggaaagaaatatgataaagctctagctcgctatttgctttattcccagcgagaccttccaaaatgatacggtttacagcgtatttaatacacgtttattttgacccagtaaaagcggactattcacagctgtgtgatattcaaataataatcgcatttatttaacgtgatatgtaatcagaccctatgattttaggggataatcattatataaatatcagccaaccctctaattagttgcctactatgtgactataaatagaggcaagttggactaaaaaaggggggataaaaaatgataagagaaaaagtccctgaaaaactatcagaaatctaataagattgactcgtggactatgtagaattttaactgccaaaaccacgtaaaaaatcctatgtgttcatattttccttttctttaccgtctttatttttttgtgcaagtttaccattcagactcaaattttggttaaagaaaatccgcgttaacaaaaggtttagatgacaaaatgcaagaatttccaatagcaaaaataggaagagaagcaccattacctacagtaagtttgcctttgcctttgtagtcaactttgtctgtgagactttgtgcattggacactatatggtgtgaagctccactatcgaggaaccactgtggatcaacaactgttgaagcagtagtacgcaatgctataggctcatctgtggggttttcagtagaggcagagttgttttcaccttgatagctcaggtcaaacctgtgatagcacttgagtgctgtgtgtccaacacgaccacacacttgacaaattgggcaattagcagcacgattgttaaggtttcgacctccttatcctctggtggaactacgacatccacgactattaggaccattggtggatgtagaggaggggtttttcttgtttgcagctgcataatttgcagttggattatgaagatccaaggttgcaatcgatgtctgttgatcgattctcatttcctgagtttgaagtaagaattgaacatcttgcaaagtgactgattctttggaggtgagagtgactatagcaaggtcatactcattgccaagaccgccaagaatgtacaagataagctcatcatctgttatttgttggccagcagccattgatgcgtctccaagacaacgcatcttgagaatgtactcctcaattgtggttgatcctttctttgtcgattgaagtaatccacgaaggtgtagaatttgtgctcgataagtgtttgtaaaatgttgaatgagaacattccagagtttagtagaggaagcacatctagtaacatgtccaagcattctttcggagatggagttgaataaccagctcatgagaaattgatcaaggcttaaccagtcggccaattctggatttggaatggatcgtgattcatctgagggatcaataatggtagctggaggtcttgcgcgtgcaccagtgagaaattcttccaattgatgagcacgaactgtggacagcacctgacattgccaatacagatagttactccgatcaagacgaagattaaggggaactatgtgatttggaatcacttgagcagcagcagcagaaggtagattcaatgttgtagaagaagatgaagcctcaggtctgaaaccagcagctgaagaagatgccatggatgaaaacttcaagattaatatcgagaaagaaatgaaaaaaaagaaccaagaaactctgataccaagttgagaaaagagaatgaagatgagcttgtgtgttaagtaacacagctcttgatattcattatatatagacagaaaagcaagattacaatataactgaaaaataattagagtagctgacaccagctgtaagtgtaacaaactcactaactaactctgactaactatatttctcttcactaatacatatactattatagtgaccaaggtagaaatataagttggtatgaaagtgtaccagtaataattagactaaaataaaatattataaattaatgtatatttttaaggagtaataattatgacactcaaaaagtgtctctctcctctttgtttctctctcagcttttaattggaactatggtacaaggtggcacgaggaagaaagggagaccaaggaatgttgccgctctaatagtgaaaaagaagggcatacctcactgtgggggaagaagatgaaatccatggaggagttacttggaggggctctgattgacttctcatatccagactcagaagatgaaaacatgaataatgcacatgataatatactttctcctcgttcatctcttagactgattcaaaagtaagaagagatcaagaaggatttctcttattttctcagtgcaacaaagagatgcgagcaagctatcaacttaggtaaaattccttccccctattctcagatattaaaatgtgtttcagaatttggatgacaaatttgagaagtccttagtagaggataggaagaaaggaaatattgtcaaaattgagatagaagatattgaggaagagatccaattttggaacttagtaatgatgtgctacgttctaggatctaatcttccaatgggggggtttttgaagggtttgttcaaagactttggaaagagaaggtagataaggtggggctgattacttatggggtgtttattgttagacttttaaatgaggaaataaaaaacaatatactatctaatggtttcattttctttgataagaaaccagtagttatgaaggcttgggaccccttggtggattttaagaaaagagtgggttggttgctccaatttgagtttaaattcatgatttgaatttcaagtattagagtgaacgtgttttattcaagatcatcagacaagttgaaaaaccattgatgttggatgatttcacaaaaaataaggtgagactaaactttgcaagagttatgattgaagtagaattggcccaagagtttcctgagcggataaagtttttcgataaatgggatgaggaacaaactattactttacactttgaatggaagccaattttatgttcctattgtaaaggatagggacacgaaactgaagaatgttgaaagaggaatgtagtgaagccttcaaccaaagctgaatgagtattgaagaaataggggaaagcaccaaagatagaaattccaccagataaagatggttttcgagtggtcaagaaaggggggaaagtccctaagttttatctagttcctactgtggttactaataattttgacgtgcttggtgaagctggggaaagctcaacagtcatggaaattatggcagaacaagggaggaaagataacactagtggagggggagatcctccattagtgaatggatagaatcatgaattggaacgtctgagggctcaacaagtctaaaaagcaaatggaagttaaaagaatgactgggaaaatgagagtggggcttgtgggtctcttggaaacaagggtaaggcctcaaaatttggggtccttataccttaggatgttctcagattggtgtttttatacctatagtgcttggcataaaggtggtcgtatcttgattagttggaatttgaatatgttctaaatcaatattcgttattactctagtcaaatgattcactaagaggttaaagctagaggtagaggtaatacgttcttgattacctttgtctacgattttaacaagtcatagggagggaaccattatggcaagatttaaaagagctagctaagggaattactattccttggatagttttagatgattttaatgatgtgttgagccctgaagaaagagccacttgtgatccattatgagcccaaagtgccattggtccaaaaag

SEQ ID NO: 26738 - DNA, 3005 bp, Cannabis sativa
tacactgagttgaatgaaactcgtgagaatatcttcctcgctaatgaaaatagggttgcatttcgcaaacccgagccaatgaggcatgcgagacacaagcgagattcaacaaaatactgtcgattccgcaaggatataggacataccaccgaggaatgtcgacaattgaaagatgagatagaaagtttgatctcgcaaggatactttaggcaatatgtgagaaatcaaggaaatgaacctaatcaagctaacaatccgagattacaacctccccccattgagggcaaggatatcttggttatttttggagggccacatctcgtgggaaagagtaacaatgcccaaaagaggtatataaatgaagtgaaaaatgaacagccatcatttgctccaaaaccattgaagaaagaaatgtcgaatgaaccaccaatcattttctctgaggaagatacaaaagatgtgtgatacccacatgttgatcccttcgtgataatagtccagctcgccaataaatgagtgaaaagagtacttgtagacaatggaagttctgttaatatcctctacaaagacacattgaaaaagatgggactagaggaagcaaagttaagaccatacatggtaagcctatgtggttttacttgcgatagtgttgcgagcttgggcattatcgagcttccattaactatgggagaactgccactatcagtgacgcaaatgcaagaatttttggttgttgacatcccttctgtgtataatgtactaatgggtcgtccaactctacccccaacaccaaaagattcatggacctcgcatcccaaagcaaaaggaggctagggaatgctacaacgtctccctgcgcctcgctaccaagacaaagaacccagtaacaaaggcagttttggaagggccaagcgaggatggaggtgtgaatgcagcaagaaagtagggaaaggccagctacgagaagcattatgtatcatttttttagtacaaaaggcaagaattaaggagagacccttaggtagctccagtagtataacttctttcattttctttatttttatttctcttaaatggtaaaatgtaatagaagatcttttatatgaatgaatgttacatttaaactatcatattgatagatcgaaagttgataattcttttcccctaaaaataagtaggtaactcaagtacacagccccataaatggcgatgtacacttggggggcaaggagatgagtgaaaagtgtatgttcctaaatcatcaaggattagctaccctttgattgacaacaggaaacacgctctttcgcgcagaaagcaactaagccaaaagaggtcctcacggacactcatggcataacactgaaacgaggtggacgtctcttaggagtaagcaaacatttttcaatcaagagggtagcgcagtcaagtagtgtaagctccctcccatccaagtaaaaggatggatttacaataagagggagactgctcaaagagccaaactcccccaaagtaaaacccgctgaccacaacaataaaagatgcatgaccaaagagtgatcccaagagatgctcgaccagtatcacaaaagaaaaaagaacagaagaaagaatacaaaggaaacgattcactcaacaaagtaaggaaaaccactcagccaaagagacagagccacttgaccaaggttaattctcaatgtcacacatacatgaaataaagatagaagttttataatcattcagaaatataaaagaagataacaaagtccctaaagtcttcgtggataagaccacaagaaggagagcctactagttgcaactgctaaagggacttgcatcacgccgacgcttgccctagcacgccgcgaccgcatcgccacactcggccttgaaggattcaaccatttgtgctgcaaaggaaccaaggatactatagttgatgtcagggttttgtatccaaaccgcgtatagcagacgctcaatcttgtcttctaactcttccttgttccttgccttaatggtgcagaggcgatgttgcaacttatcaatcctagctctaagcctctttgttcggacgtacgagtgcaaaagatacctctggcgaatggagagggactcctcaagctgctcggtaagactagccactgaggactgctcattggatagcaaaacttggaggcggtccacctccttttgaagaggttcacactagcggcgggactcctctaagtcactcagagcctgttggaggcgcgaaaggtccccctcgtccagagggtcagggctaggagtatattgttgtaagatggatgcctataaacaatggtcacagttaaaaaaaaaagaaggaaagcaggaacaagtgatgaagatagagataatgacaacatgtactaacccatatgttgcacttgagagcagcttcttggtgtccctcccccgaggagttgcgcagccaagtaagtcagaaggggtaaactcacccaagtgctggttataccactagaacattggttcatctgggattatgaccacactaactcgtcggagccatacgatagatgtgaaggacctttagacgggccaaactggttctggaaaagctgttgaatattaaaagcatcaaatgacactaaggaggtacaagctctgcgacacatccctccccctcatcatgggggtgaaagttgaaaaggtgccaaatcaaaatatgccaagacttcgacaaagagtgggtggaggggcaaagtggtgccagcctccatgatgtgctcgctgaaagcaactcccctaccatgggggcagaagcaaactcgtcctgctcggcactacgaagaacaagaccactcgtggcctgcaccttgaaggtatccattatcttatggatgttgtctgtaggtaaagtactacggatatctgaatacacgaagtcaaattctgtaggtaacggtgggatatgtcgctttggtaagtatgaggaaacacacttacggggcgcgctggat

SEQ ID NO: 26739 - DNA, 3039 bp, Cannabis sativa
  modified_base (1862)..(1864): a, c, t, g, unknown or other
aatagttcaggagtatttttaacttaaaattcaggacatgatttgttatatgtcaaagtttaggtagcaaaattcctaattagctaattttttttaaacctttttcttccaatttatattcttaaaaaatatatttattaaaaaaataaattatattttaaatgatatgacaaaaaaattaaaataaaaaaaatatgaaatatttttagaaaaataaatatacataattaaaaaaattaaaataaaatcaaaataagtaataaaattaacataaaataatattaaaaaaaattagaaaaatattaaaagtaatttttaaaattatataaatttattttgttaataataaaatgtatttatcgggtgcaaataaaattttctattatttatttttttaataaaaatttactgttgggtccatgtttatctatttgaaaattcatgaaaggtaatataagaagacaatctttattggtagcggtaggagtaggaagtatgagaatgagtaacacgtttaataaataaataaataagcaattgcatgtgacgcacagtttaaataaaaaggaagacagtagacacagccaagggaagtagttgaggcttgagaatttgattgttttatttatatgaaaaaaaattgattattttgtgttaagtaaggtagacgttgagactagtagtctagttagtactactagttaatgctttcttaaatggcatggcaggtttttcgtacactttctttgttttttttttttttttgctttacactaaatgcatttaatgattcacgtgaagttaaaaatgctctttcggaatattaacattttaatcgtcatttatactactgccacctaattttttcaaaagagaataatggtatagtaaataatttgagtagagccaccactaacttttcagttaatttttgtgatgaaaaatacgtatcagaattcacaatatttttttcaaaaaaacaaaaatataacagtatttattataattataacattatttgatatgtatttataattatttagggtgttaaaattaaagatactttaaaattatttaaaattttgttgtaattgataatttttctaccacctaaaggagagtagataccaatagaggatgattttacaattcattatcttaaaaaaagtatactgatacattaaaatttcaataaatttaaaataattaataatataaaataatatttaaataatttattttacacgtataaaatataaaggttatacgtgtaataaattatttaaaatttgtttctgtgtgttaaatttttttaattttttcaaaattttatacgatgttgtaaataattacaacgtacatgaataaaaaataattagactaaaatattcttcatgctaaaataaataaaaatacataagtatatctttcttaaaaaaagtgcattataatatttttctaccaacacatttcttttagtagttctcccacagaatttttaattattatataattttaattttcaaatatataaattttaatttttttcagttttgagagaatttatgtgattatgtacgtagctatgtatatctatatattgggtggctgatttttttagtggttatgtatttgacatatgtaatggattataccttcttattacattggataaattttcaaaggtcatttttgttttttcaaaatacacattattttatattactattattatattctatccaacatattgtccttttcgataagaacgtacgcgaaaatctaaatcccataacattatttcgattaccgaaacgctgctccatcgttttgtctttgtgtttattattattattattatnnntattattattattatctttttttaatccattattatcattatcttcaaatcatattcactaaaaataaatcatatatgtttatactttgttaaaaaactattttaatagtgtattaaattgtaatataaatatattatataataaaaaattatgtaaatttagatcacaatatatcatagtgtaaaatttatatcacaataaatactatatttttaattttactattgtgctactttttaatattttattatgcattttagttaacatgcacttgcattaaataacttgtattattattattattctcttatcaaattttatatttacttttgtattattactattattttatattttttaataaattgttaagtgagcattaaaggatatatttaattttacatcaatagtaaaaattgatgtaaaaatattataaaactattttttgtatcaaatatagttcaaacttttatttcttccattagaaatagtctaagaacgaacctataaataaaattcaggtgagttgataatgtactcaaaaggaatagtgcctatcactcgtatgacttatgagatgttatattattattgatatattttaatacaaaatcccatttattttcttttaataacatttataaaaaattactaatcaggatgtcaccgcataaggcaccatagtgcctaatcactaaccatgcttatttatatattgtaataattgtatggaatagtaaataaatagtcaacatcttacactatcgtaaattgtttgtagtgatatattcatattatttgtattaatgtctataatttaagtaacatttaaaattaatcagtgaatcagtgagatttacctttctagtttgcgataggtgcatgtgtacttataatattattatattccttataaaaaaattattttcttaatggtacgtactgggtgtgaaattactatgatatatttattttataaaaagagaggtcttgagtgctttcttagttgattgagttctgaccctacgtacctagtttgctataaataccacataacctcttccattcttcttcatccctactagcctattacatatatatatttattgcttattagtccttgaagagttgtttaattacataattaaagatgttgcttgggaaaattggggac

SEQ ID NO: 26740 - DNA, 2590 bp, Cannabis sativa
taaagtttaacttttcttttttcactagatatttcttttgtaacaatcacataatgttttgcactatattttcaattttaactttattttattttctaatcatcaaaaaaaaaatatatatatatattttctaaaggcattaatggaaaatttttattttactgtgcgtttaataagattttagtttttttttttttcttcattttgattaaattcaattttgtataattgctttctagtatattaaatattttgagtatttattcgtcaagaaaatatattttgagtattccttttgtttttgttttatgttttatatacaaaaaaaacttttatttaaaaatactctattcaagaataacctctaatttgttataaaaaaaatcaagttccaatttgggccagttataaataagagtaacctctaaattgtaattagttatacattttctaagtcccgtattaacaatatatacctctatataagaataattatatcgtaataaaatatatacatatattttgtaaatttatttatgtaaaattaataattttaatctaaattataatacatgcataaacattgtatttactctaaaataattctattatgatatagtattaatgattgtttattgttattattgatacattaatattttttggtattttaattttttttttctaatgtaactctatttagttataagttataacctctcaattaaaatataatttacttggtcctaagtatattcttcgatagagcttttactgtaacctctatttagttatatggatgactatttaatgattatatttttatagtaattattatggttatatttttttttttatctgtgatgggaggttactaagtaaattttttttttaagaattaaataattataattaactattttcttaaaataattaatataataaacaactaaaatagaaataaatgtattaattaaaattttggcatttaattttaatcgatagttattccattttagaaacttacttattacttgcttttttcttttttcttatttcttgtttttttttttttccttttcttgctcaatgaaataaagggaatttaataattatgatattcattaaatttaatcctcattaatatcattttatactattaaattagaatttcagttactatagtgtatttttttttttttttgtcaatcgatatatatctttctcaatacataaattacaattagtataactttcctaatttttgaagagagaatttgacaggaattattgtatttcaacaattaataattctttatttatgtcattttatttgatatctatcaattaaattgtgatagttcctgtgtgtacataatataattaggttgatagtacgtgcaattagtttttttttaattaagtttaattaagtgatattaagtgcaatgtatatgtttaatttttttttaattaaataatgtattttttaaaaatttttgaaattagatttgagattttgattttagagaatttttttaagctaattaggatttttgctccctgaacttttaagttcgttaaaaatgccccatgaactattgagattgttggatttaaaattttttgtctaatttcattcaattttactatttcagtgattgtttaagtataaaaccatgctctctagattttgatatctaccaaacatgcccctcgaactttgacatgttttaaattatggcttctgaattttcattcatgttagatttttttacaaaaattgaaaaaaaaaatccttaaccaattaatataaattagaaattaagaatgcttgtaaatgatccgcttaattaatttgatttgtaaacaacgacaatagaaataaagtgtattgattgaaattttgctatttaattttagtactccacgttaaaaacttattattattttttatttttttctgaaaaaaataaaggaaatttggtaattattatattcataattaataccattttatctgataattactattcttcgcaccactaatttaatattgttttaatacgataataaaaatataattccaatgtatagtaacagtaaaattatattatctaattctatattattgatttttattttttattaagaagtttaaaacttatacatatatatagaattttgaattgttttatttttttttaaaaaattattattataaaataagtaaatatgatgatgtagggaaaattgaagtgttcttcataatgtattatttttatatctcgatccttttaagttattgtaattattaaatcttattcgttatcatcatcatatttcacctgttgtctcaccgtatcttcccgttgttatcaccgtaactcacttggcccatattttgtgcacccctactcatcacctttgttcatgcattgcaaacttttgtatgcattttgcttattatatggtttttcaattaataaatatcaggtttttttttttgtatatttaatattatttaagactcaaataaaccacactaatagtattatgaattacgaaaattcataaaaatgaaaaataa

SEQ ID NO: 26741 - DNA, 2653 bp, Cannabis sativa
taaattcaaaagtgaattataaattacataatttcactataaaaattgggagagcataatcgagtgataatagttcttgaattaatttattcatgaataaataaataaaataggcaagaggattagagacaaaaaggtcaagttcgtatctaaatggagtgtcgtcttctttttttttttaaaaaaaaaattaaattaagtgaggtgtcgactatagacgacagctacaaattattaatcaaaattcagccaatcaccgatgtacacgtcgaaatagtagtacctccaacacctctgacgtgtcaaactgtgattagctagataaacatcgattattggtatattattttcttccaatataaaattattgtccgccaatttctttagtcacagcgggaatgtttttcggttgtcttttcattttcaccttaagtaagtaactggttccgcgccaaacataaaatgtggcgcaatttagctcaccaaactgagtatgagttaaaatacgccgcttctaatcgaataaagatgtcacgtcgacctactgcgtatattagcgttagcgagagccactactagtagtacaagaagaagaagaagtaatataaaaaatttgcagacttggccgattaaagctccaatccatcctgtaatggcagctgcgccaaggacccgcaaaagggttcgagcgattcctcgtgcttctgatgggagtgccttccaaaattggtacttttttgttccagtcatcgaaatacattctctgtttttcttttgttgtttggagattttgatagcgattatatatatatatataaatatatatttattgcagccatgcgtgtggcgtgtcagtggcgattgctttggcagatatgcatgactgtcaaaccacccagaaggtgaaaaggttcaaaggcataggagcgaacccaagtgtgaaagaagagttcttctgggaccaacccagatcggccttttgttttttcatgtacattttctttgtttctccatcatctctatctcttgattgctacaactttacaatattatatcaaatgatgctaaaaataaaaaataaaagctaaagcttctttttatcttttatttatttcttatttatcccacaaagttttgtttttcactttgttaatacttactagttagagtttgaagttttatattgcagtttgacaccaaatgaggaattaacttaacttttaggatcagatattcagatagttgtatctcttaatatttaatagcttttgattgtgacattaattattggagaagatgtctgtttcagggaggagttcaaggaaaacaatgaaagtaaaggttcaattgattcaattgagattgatcgtaaagggtttgaaacttggaagaacatgtcaaaggaggtaatttttttttcaatgaaaatcttctaatgcctatttttatgtaatgatgaagagtgtttcatcatattttgttatggtcttttgttaggagaggcaaccatacgttcgtgaagcttgttatgtggactttgttcacgggaaagctttgcgtaaagaagcatgcataatgtcaaaggtaagtggagatatgtattacatttacatgtctcttacgccacctaattccattttctctatgctaacatgatgcctaatctggcacttgggttttcagtaaagttctttgccagagcaaatgctcttaccttttaagttgaattaatgaagacttagtttagaggaaccatcataaagttgagtttccactatgttttcagcacgttttatcctaatgactgttaattgtaatatagatgtagttatcatgaagccattattgcatctcgattgtacatgtttacttttatttattcacttttattctaagtttggtgtagtaaatgcttggttgtttgcataacaaagtttattcaaagataattaggcagttttgtttgtcatggggaccatgtctactttcaggagctcagcagcatatgtagttctctagtgctctaatattaatcaattgattatttcctaatattttgctctatatatcagggtgatgcattctatgaaagctctaaacactctgatgattctgatggttggcatacttataaggtacattactctcacgctgtgatgtcttaaatctgacatattcatttatgtgaccaaaccaaaccaaagccaatgcttatgatgcgtctttattttctacttcattcaatgtcaccttgattaatccattgtctgcatggtgttctctatctgcattgttctgatgagttcttcatttgcagagtgaagatgagaaagatcaggcagcagctgagtcgtctgagcctgtttgttttctttgcactacttggttttgctatacattctctagtctaccaatgttaatatttcataactattttattattgttggcaatgtaaatcacaggattgttgggaagattgttcaggttcaggatggcacacttatgtggtactgcattgcttaatatatataatataactctacattatcatttacatgaaagatcaaattcaaagccaatttcttttactgtttagtctttctactttgagttggctggtatcatttctttttatttattgtgcttttcatt

SEQ ID NO: 26742 - DNA, 5268 bp, Cannabis sativa
  modified_base (2475)..(2476): a, c, t, g, unknown or other
  modified_base (2502)..(2504): a, c, t, g, unknown or other
agtatattttgcatgatgcaaaatatgctagcatatttttagtggataaattaattttaagcatataatatcaaatttcccttttaaattacatatgaaaagattattgttaacaaatttttttgttaacaataatgaagtctttttaaataaaactaaaatactaattatgattgaatatagataaaataaaaaagaattttacgtggttttgtagttaaatctacatactccacgagtcaatattatttttgataatatttttataatgtttctgaatacaagggaatatctctagatattttcttaatctctcagagtttttcttccgaaaaactggattccttacttcgtaggtttttgtccttatttataggtttcttccaaatggcagttattccctcttgatcttacctgagtatctgcttatgaagtgtgaacaatcccctcgtttcatatttacaacatgtgggataaataaaataactgctaataaaagttttttaatcttatctaaaagtaacgggtctttgctgaagtggtgtgttcagagttgtctagcacccttttgtaacattgcaagacaactttatgcttccaccgtcatatcattaagaagcggtctaaagcgagtttctcttgattggttttctcgcatgtgatggagaatgtcgaggtaggttctatctagatcatggcctttagtctttcaacatactcatgagtatgtggatcaatgagttgcaagcttttaaagagctcgttatctacctttctctttaactcatcctttagtgttttatgcaagtctcatttacctcgattaagttccgagattaactcatgatactgttattcttgctagtaactatatgtataattttatctcttttaattgatagccataatataatacaacgagagaaaataccttattgattgtagcacatcccgagataagataacctttgtatttgtaagttccctatttttgagactaatacccacgtgtcatttctatatatatggctcaaaatataggcataataattgccccctaaaaagctctttctagaattgaagggttttttttaagtaattcttggtaggtcactttggtcttttctttgacagttttatttttctcgagaaaggttatttgatcattaattaaatatcctttcatctgacgagcttttcacccgtgttttcgtattccctagacagatcactaaccgttgaactagatcaacgattccttacctttttgatataaatgattttttaccatcatttttctcattacttcatttgaaataccaaaccaaagaaaaaatctatttttacttcaaaatttttgcatgcccaattttatttacatactttcttagcgtctcaacaccattttttttccaacgtcgttctcattatattccagacccttggtgtaggagattttcggtaagaaatcatcaacgtcttcataaaacccataattcgataagtcttcaatttttactcctatttttcttttcgttatttttattgatttttggtatgttcttgtatgatttttgccctgaattgataaggtagttagagttttagtaatctccttctctgaattatcttcaaaatttctgaatacctaagatattttcttttatgtggagaagaatgtttatatcaaatttaaaactctggtttccagagttttagaacgggaaacccgaaattgcatgatttacccttcaaaacgcgacttggacaactatttttttttaaaaaataaacgatgagagaattaggttattcaataaaaaactcaactgagaggatgcctcagctcgctctaaatgttttattgacaaagttatcaatgggaagcaccgcttcttccgagatgaggctcagcctgaaacccctattttataaaatatcctttggcaagaccattatttttaccattgttttttccccaggtaaattaaacttcaacatcatgtctctaaaagagcgcaagtctaaattaccccagaaccctacaatccaattcgaggctcagtttattgaatctagggttaggtcaatcactccatatgtgggttcgtttctaaggccttatggtatcaataacgaggaaggttatcaaattcgcttagttgcataaggtgaattcagttgttttcctcaaacttgcttgtcgaatgaagagaattgtggcactagtggttcttcaaggataggtacttggactgttgagcatattaaacttgggactatcattactctcaaacattactttaaggacttttgtaattatttcgaggttgcgcctttcaactcgtcctgaatagatacatgatcctagcctgcttaaagtctctttaccacatcttagggtgggagtgtaacaccctactagtttaggcatgttcacgtaatttttaactaactgtgcagctcgttgctaannaacgagtttattgaaaatcgtgattnnntaaaattttacttaattaattataaacactaaaataatatacttatattaaactggggtcccgttatgtgaaataatatttttattacaataatttttccaaaattagcataataatttgatgaataaattttagatttataacttgaaatatattttcaaagcaagattgactattgaattaagtacataagcttaatttttattcacatttcctataagctatttttaatgtgcaatttttgagaacatttttgatatcaccaaataaaaaaaatatgtatttttcattttttttttgcttgagaactagcaaaaatttaagtttggggttatgataactctagaaattagagttatttttcacattttttaaactataattggtttagttcttaaatttttaattaatttgttaagcttttaattatttttaaatttattagctatatgtttattttataatttattatgtgtttttatgattattttttgtaattgtattttaaattttctaattaattttatgtatttttaggtgtgtttgtgagataaagtgtgggattaaagtgaaaaaaatattgaagaaaagagccaaaaatgcaatttcaaaaagcaatctaatcagcccttctgcaaggcccactttcggtcaaagtcaactacccatagcagccgttcatttcctgatccaatagcccatcacgcgcattcgctccacctcaaacaggagcaagtgaagactccaatccgcctgcttctccttccacgcacggtccctatcagcgtcaccgcacacccaattgtagatcgccacgtgtgcgcccatcagctcctcctgcaactagcgcgcgtcacgtgtacctactaaagaagaaaatgagaagtcaacaagtgtattttgcttcagccaaaattacgcacacaaagtccaaaaattatatttctcctacaacttacacctaaatattcattttatcttctcaatttatttcacctaagtaaacattccttatttatttttaccctatcatttcataattttttcatccaaacaaatatttatttttccaacactcttacacatactctatttatcccttatcttcccaacactaattaaattaatcaatttttatttattttattttgattaatttaatcctccaattttgcgtataaatatggtgttagaagactattttccatacatctctttatctcatacatctcttcatctcatacacctcttcatttcacaccatttcattccacactcttcataatattaccatttccttcttaccattttctttccaccatttttatattttgaagagcatgtcaagtatgtttctcttttgttatttttatttcaatctagttatgagcttctaatctttttttaagattattaagatgatgatgaagcaaattgtaataagatagtgtttatttttgtatgttgattccccatttgttctataaagctcatggatctttctatcaaaattgtctttttcatcttcaatatcatgtatttttgattattagagcatgttacacttggttcttcactatgcaaaaatatgatgttctttgattaaatgtttttcattaaatagtttacatctaattcttagaacataagtatcatattttgcctaaacatagtttctttaattttgtgtagtttcaataaattgtaacacatttaatgcttaaaaattatacattttgtaagtgaagaaaaatcctaccttcttgaaaataacttgtgcttaaattaaaaatatattttgaaaaatatagtgtgatttatttcaactatatatgaacttgggaatcaatatacttataaatactattgaacttgcattttgtggattctaatatgttaataatcttattttacacacctcatttgaaaattattttcatattcactcatctctatcttaaactttttactacttgtcttttattttatttttttctaaatcaaaatcatatcaaatatttggaactaggttagaatattctcattttatttgaatagtttctgttgatgttagtcaactcccatgggttcgacatcgtacttacatgaacattatattttgaaacgattcgtgcacttgcgagtataaatattaaaactctctttggtacaaaaaaacttcaagcttaggtggtagatggatcttaccacctttagaccgcacagggctagtcaacctatcatggcattgacagctgatggcacgtcgattactaaaaattgtgctatcaacgttcttgttgtcggattctctccaactgtcaggggtagttaggcgtaccccatgggtgcaatgccttggccatagaggccatacattacttgggtgcaaggtgctaagtctgtcagttagactcccatcttttcatatgttgatttaaaaagaatattggaagaggcttcattgtccaccatgcacttagcaactatcatgttcctgatgtgctcaataatgaccaggggtcattgtgtgggaaatcgacttgggaagcatctccctctgtaaaggaaatggcaggcaccctaagcttgagctgcttacagcccctttctttaacggccaggatgtcgcttttaggctcgtgaaagagagtccaagcagaacgttccctagccttactggtctcccctgtaatgtgaggtccgccaattatgacccctaaatgacccgccactggaggtggcatagggtctctattctggc

SEQ ID NO: 26743 - DNA, 1865 bp, Cannabis sativa
  modified_base (222)..(228): a, c, t, g, unknown or other
tatatttatatgtgtgttaggaagaacatagaatcacttacccgtattttagcaaatggtagaaaactaaacacgtacgtagtgatcgggacataatacgactgaaacacttggccgtacgctcctatacagggacggacccaagtgtattagtttgggggctatagccccactagcaaaaatattaccttttaaaaaattaaatgtaattttttaaatttnnnnnnnatagatcaaaatcgtaaaaaaagttcctataaaattaaataaatctagtaagaatgattataatataggtataaatatttttgaatgataaataagccctcacaaagtaaaaattctaggtcagtgttcctatatatacatatttgttacttaattattaataaaatattctcatgcaagtggatatatatcgcattgttaaattatattatatgcttttaattaacagacgttgagaagattaatgtctctgctgtgatataagtgtacattaatattttatcttttaacttaagatagaagcaaatcatacgtgattcgacaatgggtaacaacaaacaagcttcactgaatttgagaaagctttttctgacaactagtactgatgataagaagttagagacaaaattcatgtgacgtgtctttcatatacacaccttattgaagcacaaaaacaaaaaacaatgtctgaaatattgtcgaccacccccacaatatgtatgagtgagagagtttattttcatgaggctttggattcctccttgagaaattgtgaaaccatgttcaatacagcttatttacaatttattatgtattgcatacaaaattaataatattggcacgtactcttctcgatggttgagagttctattaactttagttaaattctgtagaaattagattggtcggccatcttaaagaacctttgcacgtgcgaaataatcacgtccatgtcatgtcatcttaagaaaattttcatcctggcccttatgattttatatagtgatgatagccttgtgtgtcctatgcattataattcatcatattatttgactcatttcacatggctatatgtatgagtgtgactgagtttcaaattaattatcaaagactttaggtatatgaaatttattgttctgcacttctagtgctattcatgacaagatgtgcattactaatctcattatatttgcacctatatttctataattgacttaaagaatctaggaagtaaataacctaactttgtacgtacttattaaatcaatataaatgtatgtatacatatatattattatcacttctaataaacaaataaatttaattgctcttaattaacgagttaaacaaaatatataatattaaacagtttcctgtcactcgtatcaacacgtacgcatgcatatatgccagtacatgtttggagtctgcagaggacataatcccttaaagctcaaacgttctctgtcttattattcatttatattaaggttaacttagttgtaagaagtaaaattaattattataatgataacgatttttctttctaattttaacattgatggatcgttcatcgttatgtatattttattatccattaatatataaatatatgtatataatttgcatacttttacagtcttattaacagagcacatgtgatggccctagaactcacgtgcgcgcaatgcacccctgattaagcaatatcaagaattaatggggatccattatcgtcatcataatgtttgatagctttttttaataattcaatttatttaatgccactcttcatatcttccaacaagaatatgaattaattaattttaatattaatatctggaaatcattatgag

SEQ ID NO: 26744 - DNA, 2787 bp, Cannabis sativa
  modified_base (1073)..(1076): a, c, t, g, unknown or other
aatggacgaaaacccattttcttggtctgaagccttcccactgaccgcctctctttctctctaccatttcaagtttaatttttgagttttgaagggaaatcaagctattttgttggattttgatgtggaaactttgaggaaggcaattgaggcagtgttattctcttattgcttagtttaatctttgaaaataatcttatttctaagctgaatttgcatgttcaagttatgatgaagttttgttggtcttgaatttagattttggtggtatcaccttgcttgaaagtttaggaagtatagagtgtgagtttgaaattaaattttaggtttaattctttttcgttgtttctaataaggttgtgcagagttggttttgtataaaccttgtatatttgaacattgagttggtttttaaagcttgagtatgtgatttatgtggagtttgggtttaagtgtttttgtgtgttaaacatgcaataattgtggtgattaaacatgtaaaaattcacctcattaccatttctttcttgagtatcaaaagttggaatgtttggtttctgagtgtgaattagtcttaaggctactttggtctatttgaaatcatagaaatagaatcttgtatgggaagcatacatataatgctaagaatatttatgattgactattttcatatttggatgattataaaattgtacaagaacatgtgaacttcgaaggtaaccaatgtcagcttgcaaatagagaactgttttgggggcatgatactaacttaaagaaaataagttttggtgcaattataagaaatgaaaatagagaagttgtggcatagtgtagtgttcccaaatcccatgaatgtagtctttagtcctattatgtatgagggcttctccaacaagacttgtaaaatcctaaaaatagtagagttttcacacaatattattccaattaaacactaaacattaccctatatatgtaggagtcttagtctacagtcactgacggatctactgctatcaatgtgggggttatagcccccactaacaaaagtattgtcttttaaaaaattaaatgtnnnntttttaatttgataattatagaccaaaataataaaaaagcctcaacaaaattaaataaatctagtaagagtaattataatattagtataaatatattttttaatgataaataagcccccacaaaataaaaattctaattttttttttactttttaataatttaataatcactttatacaataaaacaaataattaaataatttatttataatcaaaatttatattatattaataaaattatataataatcaatactatattttgtagtattgtggttggaatctaaaaaaaattagcgttaaaatagtacaattttagtgttaatttaacactaaatataaattttaccattagagttgccttgaagctttatctttgaggcattctttatttctccgtagaataatagagttgccattaacaaatgttgaatctgattgtaagaacttagttgataaagtcttgcataattataataatttttccactttatttgatgtaatcaaaggcataatttactctttatcctttttctcggatgtagaagtctcttattgtcctaggcaggctaatattttagcacataggattagaaaaggctttaaggctggatagagagatggtatggaatggttgtgtgccaaatttctaagttgtaatttggttgtacttcttatttaattgaaaattacaactctcaaaaaaaaaatattacaaaaatacaattttatcaccaaaaagtgaggaaactattaaaaacaaagagaaatcaactatacaacaattacatttgtcaataaattataaaacaactaaaaataactagaagattaaactcatgataaatataaataaattataaaacaacaaaaaaaaaatatcgacctgtttattaaagtctgtaattttgttgtgattataaaaatttaaattgtaaaattaaaaaaatttcgtattaactttttttttgtaattttttttaagattgtggtagtttatgtaaaaatttctgtatattttactaataatttataatatttcaaaaatatatatataaaaaaaaaaaaattacgcgtcatatagtgagacatatgaatgcattattattttttttttttttttggtttgagagtttgatcaattttgaaattgaaagtataattttaggtaaaaaaaacaggtaaaaggagaattttaagtagcgaaaaggcagtatccacaatccaatagataaggagtcctaaattccagacggaaaatggggagagaaaaaaaagagaagagagagtagagtactcacacagaaaaggaaaaagaaaagaaaataaaagaaaataaaagaaaaagaagcaaagacttattattattattattattattaaaataaaggataggacccagtactgtctttactggtctgctctgctctgccgaacccctctctctctctccatcttccctattccacacatcatctagatcacgccacactgaaccacccatccccatggcaccacaccacccaaattctaatgccggcggcggctgctcttaggaaccatcgaaaccccttttgctctttttggttgatttttttttttttttttgaggtttgtttgttcactcctcaaaacgcaaacgctcttttttatctcgtcactaacggaaaatcttacatttttatacgattgggagtgagatctatgctaaa

SEQ ID NO: 26745 - DNA, 3084 bp, Cannabis sativa
gtgcaaccagaagacatgctttcactgcggcatggtagggcatttcaagaaagattgccctcaagcaaagaaaatctttgaagaggaaaagcttaaggtatggtttaatttcgttcaaagctaaaaacgattagtttttaatattggctttgtgatttagattagttattgagattctgactttatagaattgttctttggtagctacaggactagcttcgatatttacttgttaaatttgaggtgattttgagttagaaatcaagtttggaactttttaaagcttagtctgaacgctaatggtaattttcatttaagagctcaattttaatttctgtcacgtaaggatggtaatatttatggtatatatgtgcattgtgaagtttggagtgatttggataagttttggtagtgttttgatgagtgtaaaatttgggattttcgagtttaaccgtttgtagaaattcctaggagatcagaaattgtatttttattatagcttttcactcgggtgtctgttttggacgttctatatactgtttcgaagcttgcaacgagctctacaatatggtgtatgttttagagataaaatataagttttattttagtgtatttatagcgcaaaatttagtagaaaaccctagattatcttatgtgaatattaagcaatgttttgggataaacacttattggtttactattgttgtgacctagggccaagatcattggggatagttctccacttgggttggtcgacatgtatgaacctggattaaaggtaagaaaagtatattatattgcatagtacgctgtattgtaatataattgatattgttatgaattgattaatattgagatcaaaatatgattacgattgttatataataaaaagattgattggtaaagcagtgataatgtgatgatactgtggacatattatatgggctcacctaattaggtgatgcgatatacttggcgacgtaccaggcataggtataggcgtcagtgacatatgatgagtaccgagcgtaggtatgagctcacctaattaggtgatgcgatattcctagcgacgtatcggacgttggtacgagcattagtgatagaaaattacctatttatagcatagattgaaatcattgttgggtttcttcctggccaggtattgagcgtaggtacgggcgtccgtgatatatgataagtaccaggcgtaggtacgggcttgtctgattagacaatgcagtatattggagccaagttgtggcacgggctcacctgattaggtggtgcaataatattgtatatgatattacattatgacacgggcttgcctgattaggcaatgcaaatatatgagcatatttatttctatgcatatggctggttatatgatctactatcaaatgttatggttatgatattgtattatgatacggacttgtctgattaggcaatgcaaatatatgagcatacctatttctatgcatatggttgattatattacctactgttgaatgttatggttttgtattaccagatatctatatactaatgcttattcatcgcaaataccatagtgatttagattttatcttatgaacaatgcgtaatgattatgtataaatgataatattcaaataataaactatatgatgactcacgagtgctatggggtgcaggtaagggcaaggaaaagttagagttgtcatgaggtgactaccttctccagcaatgtacatattgacctcacaggcatgtgtgctgagttgccagaagttgttttgggcaggctatatttgctgtatattttgattttgtgtttaaatagtatatatttttttagtaaatctttttataatagggatccccggaatacgctttttatgttgttataatgtctatttttagtgttttattttagtcaagtttttaatattatcacagttttttaataattaattattctattagtattaaactattttataaaatcacacacgtggtgtccctatagattagggcgttatagttgttgagggtcatttctctatcagttgaggctttggatagcccttgtccaagaaaactttgtcatgggcttgtctaaagctcagtcatgaccgagtgacaccctctccgcgcgcaagtccacctacaccctaggctagatattttttcaaacttcaaaacagtataagtaattcaatttacatccaaattgagtttgtaaaagcaaaagttcattaattttccatctactttctagaaaaaatacttccagtatgaaaataaaatatttttcgtcaaaaattcgtaatttacaaacattcttcaattaagcacataaaccaacatgaacacaaccaaatcataaaaacgtcattttaaatccatatttcatgaaagtaaattatcaccatgattctaaggccagttgttggaagttattttaccagaatctagatttactaacatgtatattgattataattgtataatctaacaccctaaatatgtattttctaatacaatgaaataaacacataagagattataaaattcttacattgatggtagctgaataataatgactccttctgttcagatctctaacccttattcctttatatcgtagagtaataataagatctgaacctggatctccttcaggtgtttgattcttcacaatcttctacactatgattgagtacttgacttgatatgagtgggcatgtactcttcactatggttcaaattgaatgaagaagaagaaggaatgaatttcgaaatagcaatagaaggaggctctcaatttcgagttgtctaataaagaatgaaaactaggttataatagattagaatgagattcatctcattctttttatagtatttcaattagtgtttatgatttaaattatagagaataaaaaagataaaataatagcaaaaaatagcttaagtggctggcctacatagtggattccactagttacaattttaccattttattcaataatttatcttttctttcactaatgtcatattttccaatttcaatcctataaatattaaaactatttattt

SEQ ID NO: 26746 - DNA, 2238 bp, Cannabis sativa
tctataaaattcatgtgtcttattattgctttatcgtatatctattactacatatcgtttatcacttgtaaaatagactcattgtcattggctaaaaacgaagtcaacacttttaatattaaaaaaacttaatcttagtgttttgttaattttagtagtcgaaagagttatatattatatcgatcaacattgattgtacccaaatattgtaatttatgcttaccttgactacttatgaagtatttccaacctaattaatagtgtaatcaccacccataatattataatatcaataattacactagttgttagtgtttagttggtatcaatcagcattgatctcacctaaatatctcaatatatacttacactgactaattaaaagatattttagactcaattaacagtccgatcgctactcgagatgttctaatgtcaataattacactaatcagtagtgtcttgttgactttgagatgtaaggcttagatttgtattgatcgacattgatctcacccaaatgtcaagtttatgggactatttatataaatatagtaaaataaaaattagtttatataaatataacaagaaaacttaatacaagaaaatatgacatttaaactaaaacactcagcaaaaatgggacatgccacttgtattaccataagaaacattaaaattcccttcagattttattttaaaaaaatagaaacaaataaaaaaacaaagaatgtcagaaaagtcgtcagggttgctactatcgtcagcccaataaaaaatccttaccaacttcttgccacatttctcccgtgcccacctactttttttttattttccacatgctcacctatttcttctctattttccacaccctaaaacgaaaaatcttaactctctaaaaccccaccaacgcatccgcaccattgccctcctctctcgacgtctttttccctctctaaatcaattatgaggtgatagtcttctcaagcaatgtacatattgaccccatcggcctatgtgtcgagttaccaagagttattttgggttgtatatgttgtgtattttgattttgtgttttaaattattgtcgtatgtaatcttttgtaaaccttttataatagggatccccaaaatacgcttttttatgctgttataatgtttatttctagtattttaatttagtcaagtttttaatattatcacccaatagtttatgcttatattgactaactacaggttatttcagacctaatcaacagtctgatcggcgccttagatgttctaagatcaacaattacaataatcagtagtgttcttattgactttagtagtcaaaagacttagattggtatcgattaccgttgatctcactcagatttaatattttaagcttacgttgactaattacagagtatttaggacctaatcaatggcttgatcgccacccgagatgttctaagatcaattattacaataatcgataatattcttgttgactttcttagtcaaaagacttagatttgtaacgatcaccgttcatatcacctaaatttcatagtttatgcttacaataactatctacagggtatttcgaccctaatcaatggtctgatcgcaattcaaaatattctaagatcaacaattatactaatcaatagtgttcttgttgactttagtatttaaaaggcttagattagtatggatcatcattgatctcaccgagattttatattttacgcatacatagactaatacatggtatttttaacctattcaacggtctaattgccacccgagatgatctaagatcaacaattacactaatcaatattgttcttcttaactttagtagtcaaaatgcttagattagtatcgatcaccattgatctcacctagatttcatattctaagcttacattcactaattatagagtatttcaaacctaatcaacgatccaatcaccactcgagatgttcaaacgattattttttttaatattattagcgatgggactcgccgctaatagtgttagtggtagagtctatcgctaatagttttttttaaaaaaaaaaataagtagaattagctgcaaattctagtttcaccgctaatggtaccactattaggggcagattttgcccatcgctaataatattatggctattgataaattttattgtagtaatagtatataataagacgacgtctaacttaactataaaatattagcacgtgag

SEQ ID NO: 26747 - DNA, 5571 bp, Cannabis sativa
ctatatgtataatgtactaaaaaaatctaattattataagaactctaaggtggcgtttggttgggaggaatgaaaacatagaaatggaaatgggaatgagaatgtaatggaataaaatttaaattgtataaaaaaaattgataaaaaaattattaatttttttctcattatgcattggaatggtctttccttccattttaaaatagaattgtcaatattctacggaaaggccattctattggaatgccattctaacactataatatgtaactaaataaaagaatagaatgaaaattgtttcttttccttttcattccatttcattacctctaatcaaacatgtacatgccaaaaacaaagacactctcctactcaaatgcaaaataataccaatttttccctccaatatacttattgtcttagattatttttaaaaaaaacaaaaaatgtgtaaaattaaggacacatgaatcacgttcatactcattttaaattagacacaatatattgggtgattcaatgaacccttaccaatgcactattgtttcgacattgaagagaatttttatgtttaattttttttatagtcatttatatttaaatatttaagatattttgtaatattttaaaaaaattaaaaaaattaacacgtcaaaactagagctcaaagaatttgttattcgcaagagtcttatattttatacacatatgaaacaggctgtgtgaatcctattttcggagttttaatttttttttaatttttcaaaattttatataatttctaaacaactatattaatatagacaattataaaaaaattgaattaaaaaattcatttaaataccaaaaagaataaaaagtatatcaataaacccctcttacaaaagtaatggtagaatttttcaaatatatatgtatcaaataattatgataaaagataaaacagtatagtagctatagtttgtgtattgtataaatattagtagcaatgaatacataaaaagctaatttttctatatagagatgtgaaagatgaatcttttccaactaatattacaaaactatatatatattaattgtaaaccctattctctctcctcattccactgttcaactacagtactagagatagaaataagacagacatcatagatagagaaatcagatatgaccagtcaaactatattaattattattattattagctagctcagctgcatgggaattaatattgttatttatattttatttttagcattattattttagtactcaagtgtatttaatattaatacttttatatcttcctttttcttctctctataaatatatataaagcctcatatagtttgtcacaacacacacccactttattactttactactattttcacttatattctaaatctcatatctctcaaactcaaccaaaaaaaaaacccttttgagatcatcattcatggcagctttttcatcatcatcaatccttcttgactctgtttatttgcccattattaataatcacaacatgttcatgaccaataagaacatgtgtagtgaattaataatggaataataataataataatcatttctactcatcatcatcatcatctgatcatcataatcataatcataatcctgatcatgatgatgatgagcctaattcatcagtgacctgtaaaaaacagagcaatactactgaaagtagtattagtggtgagcaagtcacacaaaaaattctcccaaacaagagaaaaatcagaaataataataatgcttcattctcaaattccactactcattccaaggtaattaacccttttttattttaattttttgtttgtgttttttctaattttttttattatattaatgttgtaattattattgtttatatgtaggataataataataataataataataatgatcatggaagaagtggtactagaggaaaaaggcagaaaaattgcagtggtgattctgggaaattattaggaaaaaaagaagaaaattctaataataataataataataataagaagaagaaaaaatgtgaagagaagaagaaaaaatgtgaagagcaagaaactcctccaagtggctacattcatgttagagcaaggaggggccaagcaactgatagccacagccttgcagaaagggtatatatatataatttttatataatattctcattttgtcctttacaaaaattaaaataatttcattttaattttttattaatatatattactgggtatttttttcaggttagaagagagaaaattagtgagaggatgaagatgttgcaaaagcttgttcctggctgtgaaaaggtaataataataataataaacataaaaggtaattttaatatttttattattattatttatttatttttggtgacaagttcatgtgattatgttcaattataggtaactggaaaggcccttatgttggatgaaattatcaattatgttcagtccctacagaatcaagtagaggtatatatatacataaatgttataaatatatatatagtttttaacataaattttattactgtacatatgtatataaatatactactaattaattaccaatatattaataatgttttgtttgtcactatatttttcagttcctttcaatgaaacttgcttctttaaatcccatgttctatgattttggaatggacctcgaaacatttctggtcagaccagaggtaataataataacaataataataattcttttctattattattattatttttcataatatttgtggtttttaattaaattttggttatatatagggattgaacagcaataataataacaatatgggttcagagattccttctgtgcctccaccaccatgcaaccaatcacaactcacagccttttcattatctgataacatcaccgccacaaccaccaactttcccatcacagccaataataactatcctcttattatggattacaacaaccttcaacaagcccatcacaggcccactaatactttcatcaattctcatgtaagtactcttctactcttccccacattttttttttaattaaatatttttattgtataataatttattttgaataaaaaaaataaaaaccccatttttctaaacatgacaaacacatcattttcaggacaatattgggacagtcttgtgggatatggaagatcaaagacaaagctttcttaatccatctgagttcaacaacctgtgttccttcaattaattaattatataattaataataataatacaagcttaatatatatagtaagctctctctctcaaagccttgtgattattattcactagagtatatactaataatgttacccttttcttttcaggttaattgaaatatatattaataaggtgagagatatatattccatgatgaagggagaggcaatactatatagtggagcatcatgaataaattaaagggcaagatatataatgaatgaagctgagaaaaaaagcatcatgatgaatatggattttttatatatatatatatatatattgatcgatggtgatgaaaaattgagatgaagaacataaaggacagatataattaaccgaccaaataagaccaaagatcttttttagatcctttgttcttgtctatcttggctactactactactactctctctcaagtcttaccaatgcacaaattccaagacaatatatctctcccctacatatatatgtatatttatttatttagaagtaggattgttaataataaattcccatatatattattcttgtatatggtcacaaattgttattctgttattacagttatttttaccgttatggcacattattagtagtagagaaacttggagtaaatgattctcttgttttttttttttgtctatgtagttgacatgactatctatatttatatacatatataaatgcattgttggaattagttgtatgagaatctttttgtatagttttggactctttggtgttctgatctcagatgaatcccccctttacccatctaagactattcaattctgacaatgtttgccatgtcttttttatatttaataacacaaaacctatatacatatatatatatatccaatatatattgatcaatatcttaaggatgggataataataaaagggtatatattttaagtcaaatgcatttcttgtaaggaaggaagagaagaagtgtccaatttatcaaaaaatatatatagggggagacatgaaacaccactaataagtgacaacaaattaatagccctacatagggcacaagattccaatatgtataataatatgaacaagattagagtaggaacaccctagtagagacttctatcattttcgatgacaatttatattataattatagtacgtatctcatttgtttaatttttaaaaaattatgaataatttataatctcaaaagagagttaaaaaaaattagttgtgcgtgtactttattctttttgtacgtatatatactactgaatatttaaattttatttttcaacgtaatcaatcattctaatttaattttttgaaaacaatagaataatgtatataatcattaaaaaaaaaaaaagcttagttataatttgttaagataaaaacattcctacattgataggataaaaatcatattaattcctaagataaattgtttgtatatacttaaaagtttaaacattatttattaattacaatattaaaattttgctcttgttttgctgagagtactacgggccagtttaacacggtttttgaaaattttaaaagctactttttaaaaaagctatgataaaaaagtatttggtaagcagtttaaaaacaacttattaaataatttatgaagaagttacagctaaaagctaaaactggtacaacccaatttttagaaaaaactgttttgattaaaagactataataaattattttttttttttactaaaaacatatatatatatttaattatttattatatattataaaaaataaaaatatcttttttgaaggaaaatatatttaataaataatatttataatatttaaattttttattttttattttattttaaaaagaacttcatatttatattttttatttttattattaacaaaccacatcaacttaaagtttcctataaactacaagttataaaaatataatttaaattattataaattatttttatcaaatgtgtattaatttatactttgagaaaaaataattaaaaatatatataaaaaaaaaaagaaaaattgtatacaacataattttttatatagatttatgattataatattctcattattatagtagaatcttaaaaattcacagcacttaaaaatttatatttaccaaacactcaactcagttttatctacagttctgctatagcttctttttctcacaacacaactataattgttttttcccgcagcacagctgtgctaaactaagcctacatcatttactacatctctattaaaagcaatgtccacaacatga

SEQ ID NO: 26748 - DNA, 1674 bp, Cannabis sativa
tgtggcaatttacaaggtctgcaagtagctcgtggtgccccttcagtcacacacctattttttgccgatgatagcctagttctaagcaaagctaacaagaaatctattactgctgtcaagcgttccttggattactattgtcgagcttcaggacaacgattgaatgctgagaagtcggttctatccttctctcctaacaccactgcggctattcagaatactgtccaacatattattcaaatgcccatcaagccttgtcatgagcgttaccttggcctaccctcttactcgggcagagataagaaaattttatttggagacatcaaagaaaagctttggaatcacctttcggcttggcaagagcaacttttttctgttggaggcaaagaagttcttctcaaagctgtggcacaagctatccccacttatgcgatgagttgttttcgcttatccaagtctctaattcaccaaattgaagttatgatgaataaattttggtggggttctaattccacatcttccggaattaattggaaaacttggaatgctctttgtaagtccaaagttgaaggaggtatgggattcaaaagctttgttcatttcaatcaagccttgttagccaaacaagcttggttaattttggacaatccttcttcattgctgcacaaaattctcaaaccaagatacttcaaatataattcttttcttgaagctgaagttggtacttatccttcactcacatggcgaagtattgtttggggaaaagaacttcttaaacaaggtctgcgttggaaagtggggaatggacatctaatttcatgtgtttcagatccttggcttcctggcttcacttcattcaaaccattgatattcaaaagccccaacatatatatgaaagtctcagatctaatcaccaatcaaaggcaatggaatcacactcttctccaacaatgcttcttggaatctgatgttgcaaaaattcagagtattccccttactctttgtgatcaagatgaccatctaatctggaattttgaaacaaatggaatgtattctgttaaatctggatattcccttgccacaagccttgaggaacaacaacctacagctagtacaaacaattctcttcattggtggaaacttttttggtctttatcattgccatctaaaattaaaatttttttatggcgtgctatgcatgattgcttgccggttgcagaagttcttcactacaggcacattagtgattcagtcacttgctctttatgttgtcaagagaacgaatctaccattcatgccttgtttcgatgcaaaagggccaggagaatatggcaactatcatctttttcggttcaagattatttaactcataatatgtctctaatggatcttatggaaaaaatgtcccaggttttgtcttcaaaacaacttcaacagtttatttgtatcctttggagcatctggaatgagagaaataaagaaaggcatggatccaaaacaaagcctcctgaaatggctttgtattttgctttggattatatcgaagaatatctttctgctcgtggccacaacaccactgcaggttctgtcacggctgcttctacaaggcttcgacaacatgatatgtcgtggatgaatcctccatctggccggctgaaattgaacacagatgca

SEQ ID NO: 26749 - DNA, 3876 bp, Cannabis sativa
gcagtgggtaccaaatactaccaaagcaaaatgccaaataaatggttataaatatagtgaaggtactgctctcgttctctaacctctgcaaatcatcccactgagtaaaattataaacgacttacaagaaaactctagcttagacatttcaatcaccatgtttagctactctttcgtttctaatgtgcaccagcacattgatggcgaagacgaagtcattagcgtcttcaccatgtctgataagactatcaaagatctgatctttgccactcacgtccattctgaccataaatcttttgatgaggactctcttttcttagtcgtagaaaacgttgttatgcgttcttcccaaattatagacgagattatacaggtacaaagtagaagtactattatctgatattcatcaaagtttatttaatgtagattttgtagtggcatagtctagagaatactatctagaaatgttttacttaacaagtagttgtgactaattacagggagttactgttcatgtcgacaatattgaggaattcaccgaagctaaactcagtgttcccttgtgcacgctcaaggccattaataaagaggtaattaaatgtgacaacctactaattataatgattaaaatgactgagactgatttttgtctatttttctttaacaagacttcaagctttttcatttcatttatttatttatttttgtaactgcacggggataaacagagatatatactttattatttttatttatttattaattttttgaaatggtgggattttgttaaccttggctaaatattaaacttgtgcaaaagatcaagttgttctcaaagtagaaactaggtatttatgtgagagagtttgatttttgtagtttctatctatagctaaaactgaatgttgcatcttggaccaaaaacaattatatttgttgttgttgatggctgtcaaatctttacaactgtctactattttgttgatctgtttgagtttggggttgtaatgaaggatttacaacatccttttagagaaccaaaatttgtcttaacaaaatgaattacagctttcattcaaggctccgaacgagcaaactgcgcacaaaacaacaatggcgattctgggaaagttgtcgaactattcatgggaagcaaaggctgttttggcacttgcggcattcgcttttgagtttggggatctctggctcatggctcagctttatcattcggaccctttggcccaacatttggctgtcctaaaacgagtgcctgccctcatcaaaaccacttctgaactccaaaaacgccggcaagcagttttcgagctcagcagcctcatcatggtggccatgcgagtcatcgcaatctttgacgagttcgagagactcactgctggttatgatgttaaaggcattcctgggttgtcatctgccttggaccatatgccagtagatgtctattgggctattctaactattgcagcttgtgctaccaagctcagtatcctcaccagtgatgagtaagtaaatgttattcatttccatttaagataatgaacaaagaatttcatttccttacactaagtgactaatataaatctttgtatataccagtccggatcaagatcatgatttgtccccatatgctcaaaaaatcagctacattctcaatcgcctcactatgcagctgaatgtgatcagaagacaactgggtaaacgggttcttctataatcactcacaagtgacaacttttcttcatttcctttgttttgtttttcctactgggtgtgtgtttgtatatgcagctgaggcagagtcttaccagagaccttgcaaccgtatctgtgctcgacctgttattaatgtattactatctttatttattttagtatgtcttatgagatatatatatatatatatataattaagttcctctagaaatataaacttttgttgcttgactaattgagtgatgctatttgggaatttctatgcttctattctgtgtgctagtttattttcctctcgttagtcgcaggactcgtatattagtcttaatgaaatattaataacaatatataacagaacagcatgaacacattgtatgagtaaaataatatgatttacatgtttaaagagacagtatgtgtatttaatttttatggtagataatcacatataggaattatgttgggtagttgagataatttttatattcctagatcacacttaatcaggagtgttcatctaatttaattcggattttatatttaaatcatattcaacctcacaatagcctaaatccaaaaaaaaaaatgctgattgggtaaattattttagattaattattttttaatattaaattatttaatatttattaaaaaatattattattttcacataattaacaataaaataaaataaattattgttattttatttttctaacaacaaattaaaataaatagggataattgcgtcaaaaatctctaaaaatatagagttgatgcactttagtctccaattccgaaaattggccgtaatagtttccaatgtgaccttggggactaaataaaatatgatatgttagtcttcttttctaacagatcggtttactaaataaaaagttcacgtgttgataatttattaatccaaattatatttttaaagtaaaataaaaaaaaaactaaaataaattaattataaacaaacaatttaaataattaaaagatcaaaaaaactttaataattttttattttctcttttcttttattaaaattaaaaataaaaaatcttatccaaaaaataaaactaaaacatataatttccaaacccacccacccaattttctttctctttcttcttcttcttcaaaccatagctttcttcttctgctacaatttttctttaacaagaaccacgtacatctatggtctgcattctaaccaccataaaattctcccaaccacaatgaaccttccaagctacatcaattttcctcgctcaaaatgactacgcatgcttcgctctcgatctccaaggccacagcagttccgacatttttatagccttcatctcctccttgatctagtcgtggaagattgccactaatttttcaatctcataaaagcatacacgtacaattttatatctattagaaaacatataaatatatattgattatgtataaagtatatgtacatgtatttataaatatatatacttaaaatcgattgatgagatcactacagggagtgactttgtaacgatttaacttgagctctctcttcaggagtgcctgctttttcatcaaactcaaatctgtgccttcccaaaaactatttgtactatacaaataaggatcttcaacacctccacttctaaatttaattttccacattattattagaaaacatcaaaatcaaaaacctcaattttataaattagggtttcgaaaaatccctaattttttctgcagagaatccatgcgaggagtaatttgtctcttaatccacctccccaattcaaagggcttcgatggtgctgctttggtcgcacccatgtgtagaatttgcgagaaattgaaacctagatgaccgattcctcaaacattaactcactttgctaaaaaaagtccaaccctaactgtagtaccgactgaggatcgatgcccaaatcagttaggattgaggagaagaaattactggttgatcaaaatcggatgaggtatagagaaaagcctaggcttgggactgtgtgtggagcttttgagagtgattgagtatttaagtgagaaattgaaggatgtgaaggtgctcggtggtgctctctgtggctggctggggtcatgaagaagatgaaaaaaaaaaaaaaa

SEQ ID NO: 26750 - DNA, 3832 bp, Cannabis sativa
  modified_base (3800)..(3806): a, c, t, g, unknown or other
tacccctccctttcctgttggcaaagacccaatgagatctatcccccataccgcgaagggccacgggctagtcattagggtaatctcgttgggagggctctaggtatgttcgtgaacctttggcacgagtcacatttcaggacatagtctacacaatctttcttcattgttggccagaagtatccttgtctcagtattttctttgagaaacttggacctctggtatgatctccgcagaactcctcatggacctcttgcatgatttgtttagcttcagggtccgatacacaccttaagtacggcatgttgagtcctcttcggtatagaatattatccatcatcacatatcgatgtgcctgatactgtagcctcctggatatggccctttcctgaggcaagtcaccttttgttatgtatctgatgatgggatccatccaacttggttcctgctcgattgcagccaccatttctttaattctgatgctcgactccatgaggtactcgacaagcactacccccaatttctctatctcgctgtctgatgccaacttggccaaacagtctgcatgagcattattctctctgagaattctttccactttgtactctgtgaactcatggagcagttcccggacaatagctacgtacgtggccattttctctccacgcgtttggtattctcttgagacttggttgaccaccagttgtgaatcggtgaggacttctactcttacagcccctatagcttttgccaacttcaaccccacaattagagcttcatactcagcttcgttgttagaagctgggaatgcaaaacgtagggctacctggagccgaagtccatctggcgatatcattgctatcccagcactggatccattttcatttgacgcttcgtcaacgaataccttccgcactaggcttcgccgtactggcacgcttgaactatcttctgcttcattacactctgttatgaaatctgctagggcttgtccttttatggaaatgcgtggtatgtagtgtatgtcgaactgccttaattccatggcccatttgaggagtcttcctgacgcttccagcttctgtaagacttgccgaagcgggtatttgtaagtaccttaatgggatgagcctggaagtagggtctcaactttcttgaagccattagaaggcaaaaaactaacgtctagatcaaaggataccgtatctcagcccctatcatgcgcttgctgatgtagtacaccagatgttggactttatcctcttcccggactagggctgcgctcacaacgttctcggagacaactaagtatagtaacaagtcttatccgtgaattggctttgatagaatgagtggtttagccatgtgttcttttagtttcctaaattcttcctcgcattcttcagtccattcaaatttttgacatttctttaagatgttgaaaaaaaggatgcacttgtcgattgatcgagaaatgaatcggcttaaggcagcaaccttttccggtcaagttttgcacatctttgtgcttcttgggggaaggcatgttcaataaaggttgaattttttcagggttttcctctatccccctttggctgacgatgaatcctaaaaatttccctgacttgactctgaaagtgcatttctttgggttaagtttcattccatacctccggactacttcaaagcattctgtgaggtcgtccgcatggctcatgcatgctttggatttgacttacatgtcatccacgtagacctccatatttcttcctaggaggcctttaaacatccagttcaccattctctgatatgttgcaccagcatttttttatccgaagggcataaagaagtagcagtatacctcattgtcgatcctgaagctagtgcactcttgatctacaatgtgcatcttaatctggttgtatccgaagtaggcgtccatgaaagacagtagcttgaacccagaggtggcatctaccatctggtcaatctgaggtaaagggaagcagtcttttgggcaagccttgttaaggtcggtgaagtctatacatactcgccatgtcccatttggctttggcaccagtatcggattagctagccattgcgggtagtacacgtcccggattaggccgttggttagcagcttgtctctccttttccagggcatccgcttttacgggatcaagtggatgccgcttctgttgtacttgcggcatgtctaggttaacgttcaagacatgggtaatcacatgcgggcttatgctggacatgtctccttggcaccatgcgaaaacgtctatggctgcccttaatgcttcaataatcttgtttctttcctccggctctaggttttttcccaggcggaggatcttggtagggtcgaggtcgcacactcgtacttctttgatgtcctccataggctctatagttttttcggatcccatgcggggatccaactcatcttcttccatcgaccctggttcaatgccctcatggaccaccagcaccgacaaatgtgttgtaacattatagcactgcctggcctctccctaattgcccctcactgtccccactccagcttcctgagtagggaatttaaggcacaactgtcgaatggatgtgattgcaccaaaatcgaccaggaccggtcgaccaaggatggcgttgtatgcagttgggcaatctaccaccacgaaggtgcagtacttaaaagtactctgaggggtatccgagcacagggtgactggcagtctcacttttcccattgggataagggtggtcccattgaatcctgtgagttgggagccgctaggcgacaaatccctgtccgtgaggcctatggctgtgaaggcttctttgaataacaagttcacggaactcccattttcgaccaatatccttgccacaattttattggcgataggggtctctatgaccaacgggtgatggtgagggaaacgcaccagtttgacgtcctcttccgtgaaagtaatgggatggtccataagtcggggcctttgtgccagaagttgggtgatttcccacacctcatcatgttttatagctccagcatagtgctttcgctctttcctggtggttcccccaatatggggcccacctgagatcatggccactctcccattgggtcttggcaggagcccagtggcctgctgagggatcgctcctccagggggtgcaaggggtgctggtgctccgggtacacttcctggcgctccttgaggtaacgggccctctattggaaccgggttgagatggggtagccggttcttaatccattagtataaatggctcaatcggattaagttttcgatctcgtccttcaagtttttgcactcattggtactgtggccaatgtcgttgtggtattcgcatctcttgctgggatcccttcgggaactgtccctatacaggggaagaggcttccggtaatgtgtatattgccttgtggcaaaatatacccgttcctacgtgtctgtgagctccgtgtattgagtatattgaggggtgtaccccctccgttgtcgcttttcctccatccggttgctaccctttgaggacctcttgctccgggagcattgaggcggtcctgtcaggcttgcgctaggaggggactgagacggagcttgaccactcatccctgaggggttacttatggaattcccaaaatgtgataatgcgggagccaaggctaggctttgattatatcctggtgtagcggagaattgtatgtcgctcatttaaggagtggccaggggcatggtgttgggttttatgcccnnnnnnnaactccatttcaatgtaatctatttt

SEQ ID NO: 26751 - DNA, 4522 bp, Cannabis sativa
ctctcttttctttgctctgtttctctgttcattcttttctttactttgcaacaatgtcacggagatacaaatctcctcacatggtatcagagctggagtttccaccattaatggctaatatggcaacaacaggtcctggatcaaccgtgaatggtggaattccgatcaatgcctcaaatcgaaatcaaaacagagcatcagatgagaacgctcctattcatttcaatcattcgatctccattagacttaacgatcataactttcttctttggaaacagcaggtcctagcagctatacgaggaaatcgattgatgaaattcatccaagattctgctcctcctccacagttcttgaatgatgcagatcaagctaatggaaatcacaatcctgctttcactaattgggaggtgcaagatcaacttctggtatcgtggctcctgtcatcgatgaccgagagtcttctaactcggatggtaggatgcaattcagctcgccagatctggaatgccttggagaaatactttgctctgcgtgtttcatcaaaaatactggagtttcgaaccaagcttcaaaaccttcgcaaaggatcaatgtcgcttaacgagtatctgctaaaagtaaaacagacagtagatcttcttgcgagtgttggagaagaaatcaatgaccgtgatcatatctctgccattttcaaaggccttccgagtgaatatgacacgttcataatatcctcaaacaccagaattgaaggatatacagtagctgaaattgaagctttgcttctatcatctgaatcaagaattgagaaaactgaattggaaccagaaatgagtgttaatcttgttaagactgatactgagtactctcttgagcaagaaccgagtattgaagcatactacactcaattcaatcgaaatatgaggcctcctgcaccaaatcgaaatttctcacagtcgtacttcagttttcctagaagtggatatagtgctggaactcccaggggcactggttctcagtcatctcaacaaggctatggtactcgaggaggaatatctgcagcaagaggaaccagatttccccctccaccttctaggattcaatgtcagctgtgtcatagacttggtcatgttgctatagactgcttttatcgctttgacaaaagctttacaggtgtcaacaccaatgtctcacagcagccacaagctaatttggctcaaaactcagcaactgcctctcaagatcctacctggtacccggattctggtgcaacaaaccattgcacacctgatgtgcaaaatctgatgcatagagctgactacaatggccaagacaatctctttgttggagatggtacaggtttgtccatttctcatgttggtacttcttccattcttacacaatctaatcagtctcttgtccttaataacctgcttcatgtgccaaaaatcacaaaaaatctgcttagtgtctcaaagtttgctagagataataaagtattctttgaatttcaccctgatttttgttttgttaaggaccaggtgactcgcaccattctcctgactggtattcacaggaatggcctgtattcttttgaccatattcagcttcagccctctcccaattcagtgtctacaacagatgacagtgaccacaacctgccttcttcttctcttcaagccaataacattacttctgtttcttctcaatgtaataagcctagcaattccttgtacactttatggcacaataggctaggtcatcctagtgaaaaagttgttaaaaatgttcttcaatcttgtaatatttctatcaataataaagaacacttttcaacttgctctgcctgctgtctaggaaaaatacacaagcttccattcccaaaattttccacaactgaatataatcagccactgcaacttgttgtcacagatttgtggggaccctctcacacaacatctctcaatggatatacatattatatccatttcctagatgcctatactaggttcacttggctttatttactcaaaaacaagtctgatgcactaaagacttttcaattattcaaagccgaagctgaacttcagttaggcaccaaaataaaagtccttcagagtgactggggaggtgaatataggtccttcacttcatatctaaaccaatgtggcataatccataggcatccttgtcccacaacccatgagcaaaatggtttggctgaacgaaagcacagacatattgttgagaacggcctcaccttacttgctcaagcttccatgccattaaaattttgggatgaagcatttagaacagctgtctacatccacaataggttacctacacctgttcttggaaacaaatctccaatagaagtgttgtttaatatcacacctgattacacaaccttcaaaacctttggatgtcagtgctttcccaacattagaccctacaacaaacacaaattacagtttagatcttcaccctgcacctttcttggatatagcatcaatcataaaggatataagtgtttagattctaatagtcgtgtctacatctctagggatgttatctttgatgagttagtgtttccccatgcacacaaaacctctgctgcctcagctaaacctatcagttacttaccatctgcattaatacctgtgccacctaactcatcaactactgtgactgaccaatccatatctactcactctcatccttccagttctgaagcaggtgagtcttctagctctgtgtctcagtttccaaccgagtctaatgaacctcctaattccccactcaattctcattccatacctgcctctgtttccatccctataccagaaaataatccctccaatacaagtgagcctacccctgttgaatctattccagccaccaatactcattccatgaccacaagagccaaagctggcattcgcaaaccaaaagtctacctctctgaaaagataccaacaagttttaaaacagcattacaatatgagaaatggagacaagctatgtctgatgaaattcttgctcttgtgagaaacaaaacatacacattggttcctttgcctgctggaagggaacctattggatgtaaatgggtgcttcgaatcaaggaaaacagtgatggctctcttgacaggtacaaagctcggttggttgccaaaggctttcatcaacaacctggctttgattacactgagacattcagtccagttgtcaaacctgtcaccataagagttgttcttacattggccatatcaaagggatggaacataaggcaattggatgttaacaatgcctttttaaatggggatttgactgaagaagtatacatgacacagccacctgggtttgaggatccaacacaaccacatcttgtttgcaaattgcataaagccctttatggcttaaaacaggcgcctcgggcctggtttgacaaactcaatcactgcctcttgtcctttggtttcatctcatcaaaatctgatcattcattgttcattcatcatactacaacttcggttaccttagttttagtatatgtggatgatattttgattacaggcagtgattctcaagccatatcctctctaattcagaatctgcatcagaatttctcacttaaggatcttggcacacttaaatattttcttggaatcgaggtattgcctacaactactggtttactgctgtgtcaaaacgagtatgcaaaagacttgctatctcgtgctcagatgcaagatgcaaaaccaatcaatacacccatgatcagtggccaaaagctctctgcacatggcagtgaagcctttgacaatcctcaaatgtatagatcgatcgtgggggctttacaataccttactatcacaagacctgagctttcatatagtgtaaataaggtatgtcaattcatgcaaaagcccctccaatctcactggcttgcagtaaaaagaatccttcgatatgttgctggcactacacactttggattacatctacaaaggtcttctagccttgaaatcaaagccttttgtgatgctgattgggccactgacattgatgatcgtcgatctacttcaggttttgcaatattctttggctcgaatttaattgcctggaagtcacaaaaacaacacacaatttctcgttcaagtacagaggctgaatatcgcagcctagccaatgttgtagctgagttaacttggcttcagtcactgttctttgaattacatgttcagctgctacaaccaccaattgtttggtgtgataatctcagtacagtcatgctcactgcgaacccggttcttcatgctcgtaccaagcacattgagcttgacttgtacttcgtgcgagaaaaggttcagcaacaccaggttgctgttaaacacgttcctgctgttgatcagttagcagatggctttaccaaggcaatttccagccaacactttcctcattttcgatccaaactcaacattgtcgattgctccaatactgagtttgcggggaggtgttaagg

SEQ ID NO: 26752 - DNA, 2085 bp, Cannabis sativa
tttataaataaaatcaccaatttttcataaatcaagaattcagttatataagcacactttatatagaatagatatgtgatattaagtttacatacattatttattaatatgaaactctttaaaatatatatgggaatcattttcaaattctttgtttcttagttatctaattcatgcttgaggtatttgagaaaatttaaattggggttgaagaaacctataattttacacaatcactttttttttggtaatgactatataattgaacatgaaaattaagagagtattaataatttaataattatttataattaaatgtgcattaatagaaaataaaatctactgtcagaaataagcattaaagaaataatttcttaattataaagattctattagattctaaaatgcaagtcatttttaaattttggcatgtttatattttatgctcaacaacagtagaatcgacgttttggccaacagtgtcacctagatacggtttagttctttagtatcttagaaatagcaggacaagatttatagatagttataatattaggatattttgggtaattagttatgattattttatccctaaatttagagtttacttaatagtgaagtaagggctttcagacatttgctaattaaaattttgttttattatctttaattagtggattaagatgaaaaataattagtaacaagctaattttttagaagataattccagaattgagatagactcaaaaattaagtttctctctcctctctttctctcggcctggtaggaaccaaagaaccaagttgatttttagagcaaactttagcaatttagtttcagcttgtttttggggaaggattggaaggaagcctaaggtaaagccctagactcttttatgttgttagtttaaaaaagaaaacttagttttggagaatttgtttttgtatgaatatgggctagatatagattgttttttaagttcttttatgattgtttaaggttgaatttggaggcttgtggcagttgttgtagttggaaccaagttttgagttttggaaattcaaagtttggtctccaatagtgattttcttttaggaggtttattgttgcgtttaagctttgaaatatgtttataacttgattttaatgtgttctagaaagattgagaaaatttaaggtagaattgaagaagataagtttgagtttgggatttttgctacgaaaaactgtttccgtaaaaatggtgaacagtttcctcagacaagaccccaagaaatggtgaactgtttggggatctagtccaccgattacggtggttttcaggtacctcaatttttatgttttcttgatattcagggtattgccacaatatttattgatagaaaaatttttagttttgactttaaatccccgacagtgttagcgaaatacttaccaattttatgtgaatgtgacttagggtctctgatcatcgagaagtttcttccacttagtttgactaacacacttgattacaaaattgaggtaagattagcataatggacacacatatgtaaatgtttagcatgcatattccagttgtcattagagtaacatatcagggtattggtaaagtgtacatagagttacactgagatacagatatacatatgcttagcaaaatataaagccatcagattagtatataagggtattggtgaagtgtacattgagttgcaatgagatacatgttggggttttctgccctaaataaaactcgtttcaatatgatcgaattgctatcaatagaagattagaagttatttaagttaacatgttattttcatgtttatgttttaatatacattttttgataaattcataacgtattattattcacaattacagtgatgtcatcacagtgaaaagtaattgtgattatatgcttcaaagcataatcccatgatttattagtacattagatttatcctgacatgataatcaactataaagtttactaacaccttggataagtggtatgtcatttccaggacattggtaaatattgcccctgattttgtccaaaatgcgtggaccaaccggat

SEQ ID NO: 26753 - DNA, 2346 bp, Cannabis sativa
acctaataaaatttaggtttctattcattgtattgtcctggccaaattcccaaattactacaaatatgcaggcaaaattttcccttctttatgttgaacccttatggttccagatgatgtttgagtcttcctttcacatcatttgcattgttctccaccaggttatttggagttattattctttgagaatttttattccaaatgctaggtccattggggacctctctaggcaattattggggaggatttcccaattcccttactatcttagtttaagtaattaactggttggtttttttttctttttccagaattaatcatgtctgaaggagaccaccattaagatgttgaggtggtggacgaagacttttttatggaggtggttgctgctccaaaattggtactaaattattctccctgggtaatggatcagtattgtaataaattctagatttataataatctccacaagtatgagacacaacgagggcttcaaagtgttcttgggttattcgggaatatattctctattcttggagaaaggcctagttaattcgttgaaggaggtttcaacatttggagctggggccacgtggagatgggagcacatattccgttaagatgttactttgtgaaattttgcgttgtggttggagtggctccatatcaacttatccgacaagtatattgtttgcttgtccgatggtatgtcttgtgtaagtagaagaagagggtggtccctactcaagaagagatcttgtatttcaacaaaaccaaggcacaaaacatgagaaaccacaaggagaaggtgggtttttttataggttggagacgtattccaaaagcttagtgttcccagtcagttctgttaagtatacttacgacattcaggattactagttctatacctctggcttttccttaaagagagtgccaactctcagtgttaaatttaatattgcaagtaagtataataagttacatggattttcttttgtttcttttcattctaggaacatatctaattctgccctcgtattcttttgagattccattccttgctcccctttaacttagagttagaggcgaggcaaatcatttaccactctctatcaacaaaagaattacaagtagggtagcttgaaaagataaagaatcttcaggaagctggcatattgacttcccaccaaagtattgaccctctaatagtgaaggatccactcagagatcttcatcatggtgattcgattgaagtgaaataagccattgctgctatctttgctgaagaggccttgagcattattaaggctgatcaggcatggttggcatattggagccaaaagttcccaaaagctctgagtgaggaggaagaaccctaaattttgtttagagacgctatctggaaagaaggtactgttggagcaagtacattcgtaagtggtaagatgcccttccatctagttaatgctttgtccttggcttacctaaatcatttcatccaaggcaaatttgaccctaatatctttgtatagacgatcattaggtatgaagtgattaaatatatagatagagcaaaagtaatcattcttccaatatggaagctctttagaccgggaagacatcttccaatttgctagaaggaacgcccagtttgccagagtaaatggtttaaattgtatttgtgtgtcatttcctactctatcgtgtaatgcttctatgggattaacatttatctgctttgttttgcaaagaaaccactaacattcctgatgggtctggtagacaaattcttgggcatcattgcccaaagattagatgaggttagggagatcgcaaaggacagttgaggtaaagggaaggttgggaagccttctagttcttgaactgtgaagtcagcacttctgactaaaggctaggaagttgttcctaaggctctggccttagaatttgttgcccatccctaaacctctttttctgtagtggattcttcttcttaggacgtagtaaatgaaaatatgttggcaatagttcctctctagcaaagaccaatggtcgtggatgatgaagaggaggatgatggtgaggcactcgtgttccttctaagaaaaaattctggctctgaacttggtggagacagcaaaagaactagagttgaggctaaagaaaagcttcagcaattagctgccaccatgaagcaagatttggaatcttctggaagaagaggagaaaaatttcatggaaatgagaggccaaataggtagagcactcattccaacaaggagactactagctctcaaccattgtcagctcaaccaattcatgctccttctgcccagttgccaagga

SEQ ID NO: 26754 - DNA, 2181 bp, Cannabis sativa
  modified_base (407)..(409): a, c, t, g, unknown or other
tgttggactcgatatttaattacaagataatattttattgtaatgttgaatacttctcatatccttcagtattattagtgcaatttaatattgaaaaacataatttaatttaataagtaatttaaataagagtaaattgcggcataaatacttaatgtttcagattttatacatttaaatacttaatatttatttttagaggtaaaaatacctaatggcaaaaaaacaagtaacatttagtttctgatattaaaaattttaagtcttaaaataaaataaaaataaatataatgcatctgaactcttcacgtgttcatatttatgagttaggggaagtggtagtaacagtgtaagagaattgtaacattatgtatttttgcctttaaaaataaacattaggtatttannngtataaaatctgaaacattaagtatttatgccgcaatttaccctttaaataatgcgcctttttttggtattgaacaccttatgtgcttaatagcaatgtgatagcacaataaatgtaaatatatgagtaaaccaattacaattgatgggagactttaagcccccaaagattttactcaatacattacatacccattctcattctattctattacttacctatttatactattctattcttcactcaatgaccatctcaatgctccttcactttaattactacctatcttaaaatgaattttgattgattagaaaaagttaccacatgaatgtgtgtagtgtcactagatttggagttgattacctcactaactttatagtaagttttgaaattaatgaaagtgacaatatttatgtttgattttttgaggttaatagtggggtgctgcttataagattaccaagaaggaagagcaagaaattgcattaacggtaagacttttaaatcatatatacaaaagtatgaatgaattttgtatgtgttttattccacattgtttttgaagagcttttcaccttgcctaaaggctataaatatccttagtttgtttaacaccatttcaaaagagttatatatatttttcaatgatgtgcttggattttttagtgagtatttagaaataatgaataaaatatttccctagttaagatgaaaataccataataacattaagaattttcaaataaatatataaataactatgaagttgttgtaatttttaattttgtcacagtttgaaaaatctttcacatatttcccatttacttgaccttgacttaaaccatattgatgtttactaattattctaatctactatttattgcagtaatgttatcttaacaaaattctcttttttggtaattattattatacacagcatttagaagtgagagagaaacagtatgacaagaaggcctatgttgattttttcactgtaagttatcatgagatattttaacatattcataggtatgtatgttttgttatgttacttaatattttctcattattcaatcttcaggagcctttggctactactccaactgtttcaggagtaatggtgtaagaactcagtagatttttcactcatgttgggtttgggttgaaccaaaaaagaaaaaaacagttgaaaactgacagtttctctatttagatatattgcttctccagacaagaaagccaatgtgaactacttgggcccagcttccattcaagatattgccaagtatgtatctttaatctctgcattaccaattttttgatctttaatcttctaaaataaccaatttcagagatgatgatttttttggtgttgggcaacattgtctattgctcatcttttggtaaactgaacaacaatgaaaatgtttagcttgttcagtttagtacctttgctaaactaactgcatgaaaaatgtgaaatatggaataattttattgaatataactttaggcgatcctacccgagaagggtaactaaaatggtcaggcatgtggtttgttctcgtaatgtctgaggttcgagtcctttttaggtacctacatagcaatgattattgtttctccattctcaaatattagtggggatactagtttcaaattttttgcagataaatattttcattatagtttattttacaatacattcagaaaaaactcaatcctaacatgttcatcttctattttgcaggcaaattgttcaagccgaaggc

SEQ ID NO: 26755 - DNA, 2305 bp, Cannabis sativa
  modified_base (1143)..(1154): a, c, t, g, unknown or other
  modified_base (1577)..(1578): a, c, t, g, unknown or other
  modified_base (2263)..(2265): a, c, t, g, unknown or other
actcttactaaatttatttaatttcgtgggggcttttttattattttagtctataattatcaaattaaaaataattaaatttaatttttaaaagacaatatttttattagtgggggctatctgggtccgtccctgcatagaggctcaaacacatgtttagtctctagatattaaaaattaaggtaagttttttcaggaaaaattaatggagtttacttttatatcccataaataaataacataaaaagatatagaattaaaaaataatcaatgtttaaaatatgagaaattaaaaatatacaataaataaatttgataaaatttttaataataaatttcaacggaaaagttatcggtaccaaaaaaattattgtcgccaggaaatttactgaaaaagttgctggaaaagtcactgtcgttggagaagtcattgaaaaagtcagcagaagtaaatgtctcaaatataaataaaaatagaatcggttttattacataataaataaaaacaaataatacagaataacttaaactggttataaattaaaatagaaccaatcctataacattatgaataaaacaagtaacgcgcaataatttaaaccgattatatttaaaaatagaactaatttttataacataatgaataaaaacaaataacacataataacacaaagcggttattaaaatagaatcagttataattaaagagaaaattagttcctaaaatattggaacctaaattgaaaaaaaaaaaacaaaaaacaaattccacaacaaatacctcatgacacataatgcctcatgaaactggttataattttattttttaaaaaaaaaaaaaaaggggggaaagaatcaattttgaaaaatattgaggtataaatatgatataaaatttcacattcataatccttgactaactctaaccaccatttgccttatattcaaatctccattgttggttctacatagttcttattttagcgtgattcatccctagtagatgtttctttcattagcaatttaacgccgtagaatctcgaaagataagtattattataagtcttttattcttagtaacgtccactctaatagtggctactaagagtagggcttataaagtatgaaataatggtggaagcnnnnnnnnnnnnatgaccttgactctcgcctaaacatgacaatgctggattcttatcttgatcgaataaaaggttgctagaatgatatccattttaaatgagttgactactctattcaattaatgatatctttgactcttgcctaaactggatattgtatcagtttattggaaaccttagaaattatataagatatgtttgttttgtattttcacatgtctttattacatgctaaatgtatgataatttctgaatatgtatgaatttatatttaatcttgttattttctattaatattgttgtagtataaatttcgaatcttcattgttggtctaacttagtttgttgtttttaatgggacaaatctcaaaggattgtcatttgtaagacaaacataatagtgttagatctcgacagataagtatttgtaaatgnnacatctagttgtacatccaaagatgacaacatagactagtgtttacaatatgaaacaatgaagaaatttataaaataagaataactttagctctcgcttaaacgggacatcattggaattttattttaatcgaaattatcctttatgtttcctcttagctttttcattaagaaattgcttagaaagtatatcattggataaatggtttataaatcatcttttgatgatgtcactctattttctcctatgaaattgaatgacgcaaatgactatattccatacattctatcccgaattgatataaattctcaatcttagagaatctcctacttgtatatgtttactaagggaaatttagacttagagttagattagtagtggttgttcaagaaagaataataactcattgtatatttggtataaatttatgtctttgactttaaattttagattccaaattgaaattttaaatttcagtttccataatgcattgaacatttagtgtaactttcacaagtttatatccattttctgtcaatggatccaaactgtatgttaatgtatagattaaattttttattctgtgaccaagatccacttggactattctaagaattctttgctgtaactagacctgagtcatcaaaagacaacaactgcatattatatatctatggcatttgtnnnttgttcatagtagttttgacaagatcattctctgcaaaga

SEQ ID NO: 26756 - DNA, 1505 bp, Cannabis sativa
ttattattttaatacttatattatagttatttacatagtgtacttgctttcttacgaacaattattaccagttgtagttttatataatgatataaattagatagcacaatcttttattttataaaaacaaaattggccttcttggtcagcaaattttggttatgttattggatggcgccatgcaattgattaataataattttaaaaaattattatattaaattatataaaacttaatacttaattatactatatataaggcattgaacttgctaggtactaatacctttcaccgttactcttgtttaaccgcaatattactaattctcaagagcaatgcgtaatagttatgctttggtgctttgcattctgcatgtattttccttaatatcgatctctcaatctgtcaataggctactaaactttatttctaatccaaaaactttatcaacgttgtaatctaattatgtcaagcagaaaatgagtcacaccccacacaccaaaatataaccagtttcacaatttactctcatatctaattgtaattttgttaaaagattattagaaaagacaaaagttaattaatagtaaaaatagagaaatatctgttcagcgagagaaagatctgaatgaaaatatttttaatactacatatatttgtaattatttatcttttttaacatttgaatattatatatttctaattatcgaaaatggttgaaatattatatcaaaacttctaccaaattttaattaatgtcatcaaaaaattggaaatagatccaaaattaagtaagaattagtcagcaatatcttaactgattgagaacgctgctgaaacctgaacctgaaattagtatttttattttaaattaggcaaaaattaaaagaagactgaatttattggatttccacactttttttttctggactaggttctgtgagtttgtggaaaatacaaaagagtggggacctaatttccaatattccagatatttccacacatggcaacccaccattactatcaagccacgagcctgccacgctcctatctccaggattcaatctcaaccatccagttgtcacttcatccaacggttcaccacctccctctaccacctcatatagacttttccatctcaatctttatcctcacctcttaagccacacgccctccattttcaaccttgaattttcctctcctctcctctccaccatgcttctcaaggcttcttctcttttgggttctcatggggaagctctggttcccttgttttcctctgcatctccttctccctcatcttcttcccctctttcgtactcgttttctcctctgaattctcccaattctctcttctcgactctccgttactcgtcagccaagaatggaggtggtttttctgtctcggcctcaaagggtgccaacagtcgtcctcttactggcgtcgtattcgagccatttgaagaggtcaagaaggagctcgatcttgtcccagctggggatc

SEQ ID NO: 26757 - DNA, 1643 bp, Cannabis sativa
aagaggactatcaccatatattgacattgacttgactaattctcctacatatactgctttttgtatagaattttctttttaggtacttacaacgttgatcacttgacataattaagatttgaaagaaagcttcaagaaaattattattattatttaaaaaagaaattgcttttttttatggtggataaagttgttttgacttaatgataactacaaacttaaaaatataatattacttagcacaataaaacaaaagtttccaagagacatactctttctcgttaactttataaaagaatggtgtacaaatttattgtagaataacatatgtaaagttatataagggagagaaagttatccaaaactcttactaaccaggtaaggcaataaaggcatctgaatgcctagccatctcagccttcctttggtgcatgtctgcaactgccttcacctctcctaccgtttcaccagttaactgcaaaagtgaccgaaaacacataagatattaaagaaattaaaatttaaaaaaaaaatggacagagagagagagagagtcagttttggagctttatgcaggaaagtaatgatgagtattgcagaagtggtggacttaatccaaagttttcagtccggttataccccagccagtaattttgtagcatagcagatgatataataagaatatatagaaaaagccaatgaagaaaatcacaaaaaaggaaaagaaaaactttttgggtcaagtgatcatatgaggttgctgcagtgaaaaagaaaacagagtaactagcagaacccagaacaacatgatgataggtggtgccagctacactcgagtatcaagtgttattatggataaggccaccaagggaccagccaaccatatcctttgaaacataaatttgatacaaacaagtagaacatatataatgatttcaaaaggaaagtatttataattaagaaaaaattacaattaagaaaattcaactataacaagactagagtgaaaatattcataataaagcaactaagagaaaaacaaaacaaaaagccaaaagtgaagaaaacaaagtgtttgaaaagaaacaaggaaagaatgaggttgaaagaaaggaatacaagcacaaatacataactgaatacgtggtcaaatatatagatatgtttatgactacatgtatatgtattttataaattttccaataagaaaagttgagaggcttgcagacatacctctcgaggcatgagcgtcttgggaataactctgtagagagagagagagagagagagagagagagagggacagtaacatgacaaaatcagttgttataatgaagaacaaaaaccagtatctcgaaattacctattttaatgattttatttctaaatatgtttgtcacttggttatatatacatacatacatataaatgtattatatattatattttgagactggagaagggaatgaaactaaagactcacccaataacatgcctgccaccatcatgaaccgcttgtgaaaccaagcccatcagaccaatgctaccgcctccataaaccaaatcaatattccttgaaaccttcaatagacaaaaataaaattaactaaacaactgtaaatgagaagagtgtgagtttttgt

SEQ ID NO: 26758 - DNA, 4129 bp, Cannabis sativa
tagggcataaaacccaacattagacatgtcatgaacatatttgaggcatcaaaatcaaattcagatcactttcatttttgagcacctagcacccaggttgacatggggcacttccaagcatcaaactgaagaactatcacaagaattttctttgtcttcatcgaaaatgaggaaacaaatgctttcaggaaagaaacagatcaacttggaggctgaaagagggacctagcacctaggttgacacctaggtgctaggcccagcgcccaagttgacattttgtcaacctaggccatttctaaggagtttttctgagaatcattctgggaatattctctatttttttcaaatattaagaaataagtgtttcaggaatcaaacggagtcatctagtggccagaaaatggacccaacgcccaggttaacatttagtcaacttgagttatttccaatcatattctcgagaaactattctgggcattttttttctgtcatttaagataatgaagatataagtaaagtcgatgagaaaacgagaatcccatggcatgaaagctgagcccagcgcccatgttgacaatcaatctggtgcactattttcgatcatccaaatgtaaattctactctgagcattctctttggcatggtcaaaaacggggtaggagacctcgtccttgatttcaaaaaccttagaagtatcaaaataacatctcggaagctccagaatgagcactcattgcccaagttgacatatgacttggtgctctccgagaatcggtgaataacttcacaagaacacaaaaactagctaagtgatgtcaaaatatcacctaggcatcaaaaaatacatcctcagcatgattttcccttggcctagcatctaggttgacatcacatgttaacctgggcgctggatgtcaacctaggcactggtatcaaagcagcctttagtaaaatggccataactcactcaatctgattgatgcgattcaacttgcattttgaagctatttaaatgctctatcaagttatgtatcacaatccaattgtaattttgaagttatcaagtccaaattttgccctcaaaagagttacgaatttaagctataacttactagaagtggatcccataaacgcgactcaagttctggaaattgaagacccccctgtaatgaccacatacttagaacatagattagtaggataattaacattaattatttacattttatgattatatataaatatcttatattgtgggtcctatttttaaaaataggcattagttataatttctcagtttcagagatcttattaaactctaagtgtattatgccatatgtgaaatttattatttcattgatttttgcctggtaacaatggacatgcgatggatggtcgttagagtcacatgggttggtttagaacctttgttttaatggtgttatcctaatttttgtcctcatgacgtgtcatgcttacgtggacagaacatgtgtcacatggcaatacagctcattaaaaagaaggccaagttagcacccaagcaaacgaagaccccgacactcaaacagggatcaagtgacagactagctcactctcaggagctggccagtcacccctggccagccccatggccggccagcctagagacagcaccttggttggccagcctggctagcacaggggcctggtcggccaaaggatgctctacaggccccacaggacactcttgcacatggacatcaatgataggcagtgaactgggccccaaaagctcaacttaatagcttaatagtatctagaatcaagggcatttcagtcttttataaatatctaactaactatacgatttccaagggatttgaattgtaaatctagggtttaatgcttcctatataaaggccttaacctttgactgaaaacgtaagttgcctaagttgcctataagctagaaacctgatcttaagtgtctgataaactctctctcttcctcattctctcccacacgcctacctaaggttgtccaacaccctaggctatccaacacttgagttttgccagacattggttcatacattgtaatcctaagggtactataacagatcccacctatagtgatctggatagtgattcccttggtataatacaatctaaaaggggagtaggtcattaagcgctatcacaagggcgtcgaacctctataacaaatcctattatctactgcttttcattcttatctgtgcacacacgtggcaagcatcagatcttcacgaacccgttgtgagttgatcactttttgaggtcaacagtttggtgctttcattgagagtgtggatagtagttgatcactttttaaggtcaacagtttggtgctttcattgagagtgtggatatcgtgatttgatcaaattccatggtgaacacaagaagaactcctgtcacaccgtctgcatctttaagtctccttcaagacccacagatcgcaaatccaggcattcaggttctagtcacaattggaatccccatgaatactgcagatgtggtgaatcccgtcaccacaacaggtgcaactagtctagccaccacagctggccaacccaacaagagcatcccaatggatccaattggcaggcccacgcctccacgagtagatccaccatttgcgcctcccattgaaggaaggacccaggggcgatagccccttagaacaacaactggacctcaactctggttctacgctggagagacatgcccgggagtgggcgagccaacaattggcaagcgtcacctggacctaggagaagaccttgagttggccaaactcaaggacgctataggccgtgtaggcttcactaaagaaccacgacctactgattgcgatgcatacgctcaacaaagacgcaaattcttgagatggatggatgaccaggagtacatccttcgatgtcaccaagcataattagatcaccgcaaatgggaggccaacgatctaataagacagttcaatcagagaaccgacagaaaaggccaagatctccttagggatccacttcaaggaagattgtcgccaagttcctcaagaactatgaccgatcttcccctaccagagagaggacaaacttttcttcaaaggtcaaacggtgagaacacccagattctggtaaccagcggcttagggggttggccagggatccctggctcaacaacatcccccattgtgcaaccactggctggccagccatccgcgggagtacccatgatcggccagggtataacacttcctccccaaggggagcgaggtgcacagagatcgatatttgaccgacgaggaccgagagtgggtggaaacacccaaatggcaattgaagaagtgaaaccaatcactttaggcatcttgatccaccaaactttagcaattggtttgatttaccctcgatcaacacacaaccaacacagtcgatcgcggagtcacgggcggccagaccctgccgaacacaggtctgaccagccaaggaggcatcacgggcggccagtccctgccctttgcaggccaggccagccataaaggagtattgggtgaccaaaccctgcccaatgcaggtctggccggacaagcacaacaatcgggtgtaagcctggccggcttaggccaacttctatacttggaaatggctggccagggtctgcagggcatggttgatctttaccatacactctcctagggtatggccagtcaacccctatctctttaaaatctgtagcctcccaaaggaggaccagtaaatcaggtccccatagcagcagatccttctatgcaagcacagtggaccaactcagggacgtgatccagggaatagctggcccgaagccttcagaccttaaacgtgatcagtttaggggatcatcattctcgacatacataaatgccctacctctactgaagttcaagatgcatgtatggaagatgtatatcagacgagaggacccgctagctcacatcaaatatttcgagatgcaacttgaaccagaaggtaactggtgatgtgcgtcgtcgcatattcacagccacacagtcgaagaaagcccaagatttgtactttaacgtcaccccagggagattcaactctt

SEQ ID NO: 26759 - DNA, 5799 bp, Cannabis sativa
aactgatttttgtagattgtcaagagtcactaaatttacactttgcaggcacaatataatgtgtatgttaacaaacctgagtcatgttaggtgcaaaaatcatggcaatgtttcgtgcattcattttgttgtgcttttcatgttgaacaacatctgtcatcaaattgatggcccaatcgagcaacgaagcttcagttgtagggagttggtttacaagcttagtacagtcatcttctgtgttgcagtgtacaacctgttctggtgtgagtgaatcaagtactcctgttgggagttccctaaaccatgcctgcaaaaacagttaaatactcaattgttattttttttttttgacatgaacactcaattgttattaggaaaaagaaaataagaaaaaagttaattgatacgaagactgactaatccagatgattgtgagataccacttttctggtcattccttaagataaatgaataccttttttgcaataaaggcaaagagagcttttgtataacagaaacttgcattttgaaaaagaagagaagtaatttactagatgtattacttgtaccttaatcaaacctgctaagcaatgaacttcaattccatgtggcactatgcctttgttcaatttgtcccggactagctcttcctggctattctccccagctatccgaaaaatcccttctgccttcaaccacaccaggaacaaataacatctacatcttttattttattaataagaaacatttgatgcagctattagtttagattgtaatttaacttacttgaagtcctccaccgccatataatctcttctgcatcattagaagaattgttgggacactgtttcctctaccatcgtaggtacattgcattgacttgggggacaccccaaatacgcttacactgatgataaatacagaaactttagaaaaataaacacactcatacatataattctagctaaatccatgcctacaatctcagtcacctcaacataatacacttcttatgaaaagaacataatagagttactataatagtgaagattggttccttaaacatcacatctcacaacacaatatctattcaaaactacatcacatcttaaaggattatctttatcaatatttatcaaatcttacataaacaaaaccctgccaaaacttagatgatatatcataataagtttttatctgaagacctgccattttctttctttatagtcatcttgtaattcttctactctgtttttttatccttcctattttcactaatcatttggtttttatgccgaaacaattcaatatcaaattcacatttccacccagccccatgcagaaaacaataaacgattagtatggactgactgatgagttatgccaaaaaaaaaaaatacataccgatgcaatatatataaataaaaatactacatagctgttcaaagtttgaagagtatttggccatttgaaggtgataaaagagggttttttcaatagagctaattttatctgctaccatataattattgtcaaggctaaatttttacaaaagtttttgacttaattatttatcatcttaaattggattctctaattctaatgactttaacaatctataacaacagagaattttgcttggccaggggagtaaatacaatcaatacactcatttataaaagttgataagactttatgacttagtaaagtaggtaaaaagcctgcatattgaactagaagaaaaccttgataaagaaacccattttgcctagttcagaagaaaagcctacaaagacctgcaatcgtactattcaagacgaacattaattaattttgttcagatgatactcataaattccaaaaaaaaaaaaaaaatttgaagaagttgagtcctttagccagtctttcattaattaagaaaaaaaaaactatacatttaggccagtaatccaaattccaatcacccaaatcttcaaattcattgacaccaaactaatttccgaaactgtagtaaaaaggccagtaatccaaacatcaaagccaatttcatgctcgaccgaattgtaaaaagaaaaaggctcacctggcgctagggacctttcttggaacttctggctcgagttcagtgggcaaacccagaaacccattgaacctatcgaaggtcacgtgcgatacatgcctcacctcagtcggccagctgatgtccaaggacgaatgaacgtcttctctctcgacactgcacgtgactatggactttctcagagccgctgccagaatattaagtatggcaaattggttctgctgataatgtcgaccttgattattagctttggaaccttgttttatgaatggggtcgatattcgattacatggagactcctcctcattactaccttgtttcttaaagtcttcttcttcaccatcattgtcctcctcctcctcttcgtcttcgtcttcctcgtcgttattacaattgaagaaaggactcggtggggttgtgttgaactcggccagccccaccagaccacaagatttggatcggaaaagccgggtcatttggtttctgaatcaagaaccagaacccagaaaagaaaaaaaaaaacagagagagtacactatacaaagatgcgatgtagctttacatatatatgaaaagggtgtatatgacaaagaagaatgatgaatatttagaggtaaagaaacgagagctgggtttggtaagatggcatcaatggtggaaaagtctggtttggttgagagagaaaatgaatgatatgattacagggttgagaggaagagggtgtgatgatgcagacattttgctctactttttgtttgtattcctcgtttgtgttcttacttttttggtgtcaacaacattattcattgttgagcttgtgagagggaaaaaaactagcagaaaaggaaaaagactaattgacaaacacaaaattgggacataacctcatgagagtgagtgaatactgtgaaagttttggaaacttgttttgaatattattgtattgtatttgtatataagagtattacattttacatgtttctgcttttttcatgtattatatatatatatataattatttatttgtatatttttcaatgcattgaatgaagaagaagaaggatgagacatggatcaattaacaacaagttgtgaatatgggccctttttcctaaggtgaaagagctgtctacctattaatgtactttgtagtgagttcttttcctttttagcattgaaagaagaaggaaaaaaatccaaaaagaaaagaaagaagaagaggaaggaaaaataatgaattttttttttgtattgttataagctttgccttatcaataacatgatattgagttcatacagtccatacaatttgatggggacacaacagctttttataaaaaatagaaaggttattttattgtagtgatgtagttttgtcatgggtaaaataaaatagtaaaagatttggagtgtatgctattatgggatttgtacgaaaattattgtttaatatgcatcttcctgggctggaaaataattttgtttaatttacataatatatatatatatatacatatttagggtattgcaacataattcatttgcgatatttctatctgtaagaagacctttttgttattaaaggaagtagaggatgtgtcataactcttcaaaggctatttactatgcgtgtaaaccaagtaccttatgcttatgatttaagctttaggcttaagataaatacatggcttaagaaaaataattatacaagactttgacaatttgttaaaaaagaaataagaaaaaagaaaaacatgtctatttctttttatatatatatgtttagagatgaatttactttatagttttttcctagatataaatatatatatttccttaactttacatgctaaatatgtttttgttgattttatatattgtatttttaaaataggaaatatatatataaaaatagatattttagaaatctaaaacaacattttttaaataaaaaaatatagatataatatatatgagcctcataaatatgtaccaaatcaagtgaacaattgatccccacattacatctcatcatcgatcttacacaaataaaaatggttatccaactcttccctttcaatatcattttgtttcttagcttatttatcctcatcatcatcatcatcatcatccatgatatatattatatatatatagagagagagagagagagagaaattttcacgttatgtatttagctatagtgagattctgtagacttttagagttaattatgatatatatatatatatgtgggagaggagagtacaatgaaacaagcttttacatatgaggttttttatttatttagtgggagagaattcgtgtgactctgtgttttgtctagctgttttgaatttcccatgtcaatccctacaaggcattcacatgggcacgtggtatggttcctttcttgttccagttaaaccaactaattattcttttgtttaggtatttctttttggcttaaattaaaatataataggttaaggtagacagaataagccaagtatatcacaatgttttcagtacagtttaatattgtatttctcaacttctgtgctttctttctaaagtttaatcaaatgtatatgttctgtgtatctgtgcaattgataaaaacttgtcttgtagcctttatatatacttatactactacataacttttggcactcttctattataatataaactaataataaatccactcaaaccttgctttgattatatattatagttttttttcttctttcaataaaaatgtttagcttatttaaattgttataaaaaaaatttaattagactgtatgtgtagtgttgagaattagctcactaaatagataccacgttagctatgtttattatgggacatggatttagctagttagttactttctcagacaaactaacacctaagcctataaatagtcatcaacactcaatttttttttcaaagaattcaacacctagacaaatctctttcaagcctagacacgtataagtctaattatgttcaagaattttagagtgaataatgtttgtaaataggatctttgtgtttgattaaggtttcctcaatgtgagattttagtgatatctaccataattgagttgttgatgtaatgtattgatttaattaataaagatgaatcattttgtcattgaaaatcgaactgagttttctacttttttatttatttttaagttttacaattattactgtttgatttgttagttctgatttattattattcatcataatataactttgttttaacagaagcaatttcacttcaaatggtatcagagctacaagctccaagaagaggtttcaagatctccattcaaactttcaagaacttataagattgagatgtctacaactagatttgagatggacaagttcaatgattctaatgatttcaatttatggaggattaagatgaaggtaatcctaattcatcaaggaatctaaaaagctcttaatatagaagcaatgaacctcatgaagacaagaagaaaaatattgagattgaaacaaaggtatacagtgccataactttggagatgaagtgttcaggggggtttcagataagggttgtaaacacaattatatatggcaaggacaccttaaccataacagaagtgaaggttgcacgtttaaaaacttatatgaaaaacacttcattacttcagagctaatcatattgattcgtgaa

SEQ ID NO: 26760 - DNA, 3592 bp, Cannabis sativa
tcgaaatcgtaattaatttaaatattactataaagtatactaaataaaactatttcatatctatgcttatttgttatactgtatgaaaattaattagtttctactataaacttaaaaggttactaaaaatataactttaaaataattaattagaaatttaaatattaccaattttaccaataagttaagtgagatttttttttaactttattataacttattaatttatttaatagacttgaaagtaacatgattatttttacaaaatcaaaataaaaaagtaacataaaagtatttaaaataacaaattaatttaatataatctaaagataaacacataagtttcaaagtaacaaaaatgtatataaaataattagtaaataaatggacaggtagaggccgtcaacaaaatactaaaggtcaccctaaagaaaaagctactggcctgcaaaaataactggcctgaagaactgctgcgagtattatgggcctaccggaccactccaagaactacaaccggaaaatctccattctcaatggtgtacggatgtgaagccatggtaccagtagaaaccttgctcccatcccacagaaaggcaacatatgatccggcaatgaacaaagccttattacaagaagcactggatcaaatagacgagctcagggatgagtctctgatacggatggtagcttaccaaagaaatgtggctaaatacttcaacaccaaggtcaaagatagaaaattccccattggcgaactagtcctacgaagggtctttctaaccacccaagaacccagattggggtactgtggccaaattgggaagggccatacgaaatcgaggatgaaatcggctccgagacctataagctaaaaagaatggatggatccatagtgcctagggcctagaatgtcgaccacctcccaaaatactatcagtagttaaagaaaaagtttatattctataaaatagcctgtgctggacaaatctatgcgacctcctatgcgaatatcaagctaagtgacctcaaaaattcttttcatgtcacttcggggggtactaaggcataatatatgggcaaaaaataggataaacataagaaagtaaaaggctaaataaactcaaagtcgtacagattgttcaaaagacaaactgtaaaggcttagggcagaaccataaaaagtctgcccttaaaagaaagtagaattgtcttataaatagggggtaggataaaataaaagataattaattattacttaatcaactcggggaggaagatgaagacccttgctttcctccaataccgcctgaagctttttgtttttctcccgaaaataggccagaacttcattaggcttagggtagaaaggaagatgaggttcaaaattgttggccttctagcacatgaacactccatcatcaaaacgcttcgagcagtgttgacaggtgacaggggacaggagagcatcccttttggccttgaccgcctccttgcgggcctgttccttgaactcacagagctctttcacttcgacagttaaactagatgtcatttttaagtcgttttggtgcagctcctccaaagatcgtaacttagtagtgagttcttgaacttcttccttggaatctcgaagatccctcctggccacgacaataatctcgtcattggccgtcaacacctcccgatgggttttctccatgagggcctccttcctttgggcttcatcccagattgccttcttctgctcctttaactctcggagacacttcatcacctccttcgtgccaccaaactcggacatggtaaatctgtggtcgatcaaagtctttgaaagacaaccagcctctgcagcaatctaacagccaacagggaaaagttagagccttgtataaaaaaaaaaagaaagaagaaaagagaaaagaggcgtaagaaatttggaaggtgagaactcactgcagtaagggccacactcatgtcttgaatttgatacacagggttggtagaagtgtaggtcgcatatctcttcatgggaagttgggtcaggtcggtgggaaaatggctcatcatttccgaagcaaaaggagctaggttaggccccatgaagtgcttaaacaagtccatcaaaggatccaaattcaaatctcaaacgtcttcgggatactcacctcgaaaagacccatcctcgatatcccttatccatttattcagggcctccgcatctgcattccccttggaatgttcccccaatacgtatttgtatttggcgattcagagctgaaccctttcctcgtcaggatgaacgggagtcaagataatacttggaggcgcaggatactcatccacctctgaaggaattcccgagtcagtgttgggagcaggagtatccaccctgctcagtttcttggcaggctctgtctccattatcttgcctttgcgcttacggtcaaggggagggatgatttccccttcttcttcttcttcttcttcttcttcttcttcctcgtctatcaagacaacttggttatcaagttcaacagaaggtcttctcggagtcaccaccacactacgtggctcgatcaggccagcttcaggactgtgtgtgcagacaagggcatctaggaggtcatccattggcttcgctatttaaagataaataaaggagtcagaacattgtcagaaaaccatgcatgcaagagcaacataatgaactagtcctaccccggtgatttaattctaccctagcaaaggtatatattaaaagactcgtgtcctcatcccctagaaagctatccgaggggaggaaccaacttgaagtcagctaagaacaatggtccaagaggattagtacgagaggaccagaatccatccgggacccaccaagaaatgactaagattggaaaaataaaaacttttagcattataaccccatcgtgaatggggcatccgaaacctatgcaactgactgtcaaattccactgaccttaggccaccataatcttgtacaagagggacgtgatgaataatcagtggagacttacaagcaccagaagtgctggcatcagaagccccaaagttggggatcgggaaaggaaacttagggcgagtagggacttgttcctttccagcctccttccggaggatcctccccgaggtagcttgagcattgatataggccagctcctattccttcttgaatttatactttttgtatttttcttctacagaagagatgatgtcctctcggagcggcttctccatttcggggtttcagatgtgagggtaaagaaccttggacaagttgaagtcatccaccgactggcttttcaaaatcaacttggccctcctgcagttagtagtcgtgaccagatcccccactttcaactcatccttattataactagaaaaaactttagcgtggtttaggaagagttgggtaggggcggtaagatgcatgggcgaaatcctgacccattcagtgagcaactccggacgttcgacaactttgaaattcgaggagaagaaaaatcagtgacgatactcttttatattcttctgaaagttaaaaggcaccggactctcattggcgggg

SEQ ID NO: 26761 - DNA, 4737 bp, Cannabis sativa
  modified_base (387)..(390): a, c, t, g, unknown or other
  modified_base (2331)..(2332): a, c, t, g, unknown or other
gtgaaaaagctcagaaaaagcctcctgacctaaaagtaatggatgacaccgaagataataatactcaagaaggaataagtcatcaccttggaaaagacccattgagtcctcaaggatctattgagtcatcacatgaatagactgcaagccccaagaaaacccagtattgggatctccagcttgacaaaccttgggtaaacaacaatcgaccacttcctaaccaagttgatgaggatggtgcctacgacccaaccagatacataccaatcgtggaattagaaaatcttcatcctaggcgtcgattggaggaagcaaaccagcgtaatgacgagttagagcgtgaaatagctgcagtaagggtagcgcaggagaatggtacccaaaatnnnnctgaccttgggagaagagattcacgaggcaaaccttccagctcacaaaccaaggggcaggagacgacccagagatatacttagaactctcaagagatacaacttgaggaaactgaggaaaatgtgggggtacaacctgggatacatggaacatcgaacgaaaattgccaaccctctcttcaggttcaacagaaagaaattcgcatgaacccatatagggacaataaggtgaaccaaaccttaagcggaagagcaaggtccaatcgcagtcacgacaggggtgatctacgggagcatctgaacttgaagaagcctgaccttcgtcaacgactcagtccaaaacaaaatgattcactctatttgtgaatggacgagttggagaataagttcaaaatgcatcaagtcacgaaaacaggaagacaacctgggcatgaaactgttggagaacttgattcggaagcctcaggatcaaagagaaaagacaattccaaaaggctacccaaggataagaaacccaacaattataaccctctttatgctgaatataccgagttcagtgaaactcgggaaaatatctacctcgcacaagtacaagaagccatttttagcgagccaaaacctatgaaacatgcgaggcctataaggaatccaactaaactgtgtgaatatcatggaggtattggtcataccacggaagaatgttgtcagctgaaagatgagatagaaagtctcatatcacaaggacgctttcaacgatatataaaggggcaggatgatgtccatgatcagctcgatctgcccaataactcgagcgacccaagattataaccctcctttgtaagaggaagggacacctcggttatctcaaaagggagcgattcacaagaatacaaggggcagttactccagtgaaacaaatttgtaaaagaattgcgacctgattagatattggctcactatggttgccatatcaagctaccgcgtggaaaactggacgtcaaccagtagcagtcgaagacaaaactaaacctgaattactttacctggaaccccaggatatgtcagagattgaccatatcgaaacaattgtgggagtatgttagggatcgaccatgaacatcaaaacccgttttatcaaaaccaggtgctcttggaggattgataaaataagcgattaaactggggaagttcttttgagattaatgattgtaaatcacattgctaatgaaatattttgaatttcagttgtgaataaaataatcatttctttcaaacaagtaattacaaagcgtaaaccctttaaaattacttgagcggcatatatgtatgattaatcggaattaatttggaaatacattatacaatgcaaatccatcattttaaaaaaataaaattttttgaaaaccttttaaaagggcctcgaccaaacctttttgatggaataggggtcgaatcgttataacaccttgatcaaacctttctaacgagaaaggatcaaacgactgtaattttttatttataacctatttgacgagaaaggaaagtcaaaagttatgactagcacaaaaaactgaatacttatggctcgcgctaaggaaaagtattaaacgagacatcaaagaaaaaatatttaaaacaaacacgtgagtagaaaatttaactactcacataaacaatgaaaatatatagaaaatgacaagcgaggtggaataaatgatggctcgcagattaagggatgggcagatgaactgctcgcgcataaagtaggaaattaactacttaatgtcggaggaaaatacaagcgatggaaacccctaataaattttatgcatgtaattttttatattgtgaataaaacgcaagcaaacatctgcatattaaagtttaaacttaaaagtacgaggtattaaaaagcaaagttggccatccaaccatgcaaatnngtctttacaaaaaaaagtgccactaggggaaaaccattgtctcggctgaagggccatttttcaaaagagaatggggagataaataaaaaccaagtctatatcctgggagataaataaaaaccaagtctataaaaacctcgccatcttcttcctccagcctgtcttctcgcaaagagctaaagtttcctcttctttctcctccaagaagctggtgtccatataagggttccaaattcaggcccgatatacagtgcgaaaacaaactttatcgtaccgttctacggtctcgatttctttttcaacaagattcttctcaaactaagcggcttgggctttgacggtcttctcggcctcctccttcgccttctcggcttcctattttgccttctcggcatccttttttgccttctcggcgtgctcttttgccttctcgacttccatctttgccttctcggcttcctccttcgctttctcgacttcttgcttaacgcgggtattttctcgttgggcgtcttcccaatgcttactcacaaccttgcattgggataataacttgtggaccttgccctccaagtattcaagacgcttagagagtaattgattggaagcaaaagaagcctgaagaattgcaaacagatgaatataaaagatgtatgaaaaaaataatataattataatgacaaagccaacgtacctcgtaccttgaagtgacagtccaagctccccgaaagcatctctttgggattcctaagattgagaaaatcccaattagggggaagaagagtttgaagtttgtgccaacaagcgactccatatgcttgggcaaattcagacttggcctcccctactgcgatcgacaaggtctcaatggccttgctcgaagaagcagtagcgagggttgcctcgggacgaggagcattggagtcggagatgactgaaggaggaacttgttcttggacctcgttgtcagaaacctcgagatcgatgggcttggctagtgatttcttcttatgggaggtggttttcctttgccttttaggaggaaccacttcgttagtagtagggagtccagggttggttgtccttttcttccccttccggtccatgatatcttcataacccatatctacaaaacgagacaaagcgttacagttattaaataggccaatgaaaaagggaaaaatataattttccacctaagggatttatcaaaatcactagaaggcgagctatcactagataaaggggtagagggaccataatagccactaaaatccctacagcctgtaatcttgaatatatcaaaaggctcgattggttctaaatcccatctcgcatctatgtgacctgccctatcttccatagtatcgtattgctcaattataccaaaaatgactcgtgatagttaacctggacatggaatctagggtaccagctatcaaacttatgagcaatgcggtccacaagaagagaattccaaatataaaaattaaggcggaagtcttcaatggtgactaatgtactacgctcagccctaagtagagtaggagaccaaccacattgattacctcgggatcctccttcatcggattcccgaggggcagtgctttgaaggtattgtgcttgagccaagagatcccaagcttggccttcgggcggaacaatgatctgttgccaagaagaatgcttgggaaccttgtaatcacaagtatattcgttatcagcgagaaggcccactgatcgcaggttagccttgctgaagaggaaattgcatgaccgaagaccatagggaagagttaacaggcgcctgtgcctactaaccatctcgggggtaggagtaggcctcgtcaagagagctatcaaaataaacaaaacgttggtcagaaacttgaaaaacaacgatcgatgtaaatgagcaggatgacaacaatcacttacggaggtttcgaaacgtggttgtgccgatgagtgaaagaccagatgtccagaagaagttgttcttgaaggacactttatttcgaaagtctacaataatttttgactcgctagaatgagtacctgagatagaaaaagcccactgcagtgttcttcctcgatggaacgaccttaactgagtaaagatactcaatctctactggtgtgggacacccccagttcagaattttgtacaagactttcaagctagcgagaatcctgtaggagatgggagtcagctggaacggggcaactccaatatggtttatgtagtctttgaagtagtccagaaggggaagggtggcacctgcgctgatgtgctcaaggctccaagagcccatactattcgaaccactagtactagtctcacaactggtccccaagttatttcttgcaaagcgtacaggggtagctgttggaaattattttac

SEQ ID NO: 26762 - DNA, 1356 bp, Cannabis sativa
ggtaaacttggtggccttcttaggcagaccatttctcagaatatacagtcaccaatggcatctatgcttaattctgttcgttgcatgtcatcaaagctttttgtaggaggtattttagttaaaaacattgttatatatgtcattccaaagtgggtttattctattttgtttggtttgatacttattcttttgaacttggtatttttaggtctttcatatggaactgatgaccaatctctaagagatgcattttctggctttggtgatgttactgaaggtgtgttcgatcatatcttttatggttttcagttcttctcttgagctatgaaactggtttaattaaaaccttgcttggttgtggttatttaactaatttgtgtctttagcttagagttcttattcacaagttcatatttgcatatctgttgtaaacagttactgtttttatatgtgcttatgttgaactttataatgagttgtaggagcttcatatactaaaatgattttaagttgttaattcaattcatacttgtgctatactcccacaaggtttgaggttcaaatccctcctgggtacctacgtagcaattgttatagtttcttagttcccaaatattgaagggttaggcgggaccctagtcgaaaaaaaacacttccttgtactatagtttatagtactcatattttgatttcaatttgtgctgcttgtcctttgtgatctacagctagagttatatgcgaccgagaatccggtaggtcaaggggatttggtttcgttagcttctccagcgacgattcagcaagctcagcattgtcttccatggacggtcaggtaaaaacactgttaaatgcaacaagattatgcacacatctaaattgctctctataatagagtagtgattgtatacttaacaaatttcaggctttacaaggaagaaacatccgtgtaacgtatgcaaccgaacgatccggccctcgtactggcggtggcggtggatacggtggtggtggcggcggtggtggttaccgtggtggaaattctagggaagacgacttttaaaaagctctgcttcgggtgtggtcgtgtcgactagttaccggctttaatagtttattaggtttcaaaggtttgatgattaattagctgaactgtggaatgtttatgtttactttatactaagtttttgcctgtgacttgttatatattgtgccatttagcatatattgtgccattaaagccaagtcaatgaggattcatttgtttttgttgactcttttcttcaaaaccaaaccattttgaggtctggaattttgtccaaattttccaataaaaagtaataaaaaatgaaacatggt

SEQ ID NO: 26763 - DNA, 1991 bp, Cannabis sativa
attactggcactcaaagacaagtgatccctttttagctatccttaccaaaactctataaatacccttgaacaaaatgggaaggctgatcgatcgaaaaaaacaaaacaaaacagagagaaactcactaagaacattctctatataagaactctcattaataaaaacgactcgtggactacggctcattactgcttgaaccacttaaaaatcacatgcatcaattattccaaagctctcatcattatctcatttaattggttaccaaaaatttcggtcaacaataaccattatcaaaaccccaatacaatatatgcgcttccacaatatgtaaaggctcaaatcgagtatttaagcatctaacacacgaacacctaatttttccatcagaatttttataagctaaagccatcgccaaaaagacttgtagacactctcaatattctttaccatgtctttttgaaagtactccaagtcttttcaatattcatctaattaaaagagtttcaagaatttataaattttagcaacgatgaaataattaaagtcttatgttattttatgaaattttatttataaattcaactatttctttatttattatttcaaaatgtttatttataaatttgtatttataatttatttattaaaattaatatacaatattattaaataaactcattttaataattaattatatatattcaatttatttttttaattcattacaataatgaggacaagaaaatatttttattaatattttaattgagaaataataatttattaaatttataaataaataaacatattaatttaataattacataaatatatttacaaaaataatttaaataacatagtaattaaataattaaataaatataaccgaaaaatataattaatttattattaataattaaatttaagtttgttaaaattttattttttttgtttttaatagaaattttttttctaaacattcgaaattttgttgagtattttatttattaaataataattatttatataaattatattaatttaatatttacataaacttattttaaaaattttattttttttttataaataattaaatattttaaaaataattccaaaataacaaaaatttattaaaatatttaagttataattttatattattaagaactcctattttaaaaatcatattaattttataattacataaatttattaaaaacttttacttgctaattaaaaataattatactaaatattcatgtaatttttatttataactaagatttttgaactaaatttataattttttttttacctaaaattttactaaatataaaactaaaattattttaataacacaaattatcataactaaaaccacacaacgttattctaaataactaaaacaaacttaccctaacaattaatctcaaattatattccaactattacaaatattaaacaaaacaaaatatatttatattatatatatatatataaatttttatatatataaatatatattatatataatattataactataatatatttcaaatttatatcacaacaacattttattgacatatttcaaatttatataacaattacaatatatatttaaaatatttactataatatttataaaaaaaaaaaaaaaaaatatactttacacaaatgaaaatttgtaaacttcttatccaagcgaaaagtttaaaatccctcttacaaaatataaaaataaaataaaaaaaatttacattaagaacacaataaaattaagcataaaaatatgttcaaaaaatatcaataacaataacaacaatataaatattttaaacaatttaaacattcatgaaaaaattatgttatacagtatataactattgagttttatgccctaaataaaacacatttcaatataattagatttactacttaatataagatcaaaaatcgcattttatgttccatggttcacatgatt

SEQ ID NO: 26764 - DNA, 1783 bp, Cannabis sativa
  modified_base (1730)..(1741): a, c, t, g, unknown or other
agggatgagccaactgattattccataaagaaaaattggttggttgaatattacaagaactcatttgagcattgtttactataaaaggaataatagattgcaaaaagtgagagttgttggactgaagctgagtaggaggaatgacatagaggccatggctaaaatgtccttccataagagtttgcttagagtctagatccttgataacacaatgattagggtaaaattcaaaagaggcattattatcattagtaaattgagctacacttatgagatttcggtaatatgaggaacatgaagaagatttttcagagtgagagttttagaagtatatagagtgtgaaatattttcttaccaacatgctaaatgttaagtctagcaccatctcccatatgtatctattcaagaccaaagtatggttctttttgagtgaaattggtttcattggtagtgcaatgattggtagctcttgaatatggatcccatgcatgatcaaaaatagtgtggaatgtagcaatatgaacatcatattgatctacattggcaaccctaactccaataaattaaagttaaacctctgatagctacgagttgttatacgacctgatttagaacatagttgacaaacaggtctagagctagcagaattaggagccaagggagagataataacctgtgaatttatttgaggaccacgaaaaccacctgaggataaaccatcacctcaaggattcacagcataagggttctagatagcacgaccactacgagaagtaggtgaattgttattagacttttcatcaagactagaattaggaaagaaagaatttccaaatcttgatctagtaccacaacccctagaggaacggtttgtggctaagttgacggaatcaagatctcgattataattctccattctgtgttcttgagagagcaacaatgattcgatttaagccacagtgtaaggttgattttgagaattaacacagatgacaaaagtgtcatattcagatggaaaactcttgaatataactgttatatgttctttaatagtaaccaaatcaccaactgatcaaagttgatccacaaccgatttgatgcgaagcaaatattcattgattgaaagagaacctttcttgatattctacagttgattagtgaattgatcaatcttagttgaggtttgagtagagaaatacacctcaagtgtcttccaaacttaagctaaagtttcaccgctaaccacaccagtcagaacaccttcaatcatcgacgaaagtaactaagagtagaggagttgatcctgctgctcccactgggtgtatcgaggattaatgatgttattaatacgatcttgatcaaaagaaattttggaggtggttgaacaattgatgagatgtagtcgaagagctggtgacctcgaattgtagaaagcacttgaggacgccataacaagaagttgttattgtcaagcttgaccaagatcttatgagaaaagaccactggatgaaacgttgttgctagagtagaaccggtcgctgctgatgatgttgacatgatgaggaagaagtaaaaggatcacaacgaaacaaagaatgtgaacgtaaaaaatgttggagagaagactactctgataccatgtaagaacaaacagaacgattagaagagagaaagagaaaatgattggaatgaattatgtgttggaattattttaccagaatcttagatnnnnnnnnnnnnatgtttattaacaccctaaatataaactttctaaaacgatga

SEQ ID NO: 26765 - DNA, 1531 bp, Cannabis sativa
attgagacctgagagcaaatctatggagagaggagaagaagagatgagccggcagaggctgtctgtctgtcttttagggttatcgtctttgaatcgggtatggttcggacccgaatcaatggcttgggttttttaatgggcagttttagatgagcggatacgggcgggttttatgtaccaactacaccttttccttttttgccgtttagctctctctctctctctctctctataaatatatattttatttatttatttatttatattttaaattttgtctctctctctctctctctctcactaaattttctcgttttctcactctaaacactcttggatcgaaaggtggcccgaaatctggacctctcgattggtattgctttgttggatccgcgcgtagattagatttgattgattattcggcagagacgagaacaacccgttaatggtaggaattcgtgtggcgtcaatttagggttttcttttttccttttcttttgattcgaatttgttttggggattaggtttttttgtttgtttgtttagttgtactcgttttggctgattattattactattgttggtatggtcgatctagggttttgctgagtgcgaattggtgaattgggggcgggtgtgtaattaaaggtgtggaggattgatggtactcgttgggattataggtgggatcgaggctgaagttggggaaaatgcaaggctatgcatgggagggaaggtgaagagaggaaacggagtcggcacatgtggacagtccctacgcgtgtagttgcagtcgatcgttcttcttcgtcgttttcatcttcacccaattcgctgtacaaggtttgatttttttttttcatctccatttattatctgggtttcggggattttgctttctacattgttttgatctgattcctggtcttttcattgttttacggatgagaattctctggattgtgtgtttagaatctgtttttagctaaagtcaagaaaattaacaccatttttctaagtgtgctgttatgcaaattgggaatagaaagaaaacaattttaattttattctcttgtttggttgcattttaaagtattggaatatcatttcgatagaatactaatggaagtaaagaatgtaatatgagaaaaaatttaattattttttatcaattttttgtatgtattttaaattttattttattttattttatttttattcctattttttcatttcttcaaaccaaatgctagtttaggtggatagaatggaatggaaaggaaatacttttcttctattctttttttgtttggttacattttaaagcattgaaatatcattccaatagaattcatcattttggtgaaataattatttcattttgaaataggaggaaagactatttcaaagtaacacgagaaaaatgtaatgattttttatctattttttgttatgtattttaaattttattccatttctattcctgtttttatttttattcttatgctttcattcaaggccaccttaatgc

SEQ ID NO: 26766 - DNA, 2108 bp, Cannabis sativa
aatttttaacttaaatatatcttctaattaattaaatttcatgaaatagaaacaaataattaagtatgttgaataaaatcaacttaattataaattctaattctaagttctaggaaaaatatcctaatttaagttggtctaaaattaattaattttcaacttaaatatattcttctacttattttttgtttttgataaatcaggatattgtattgcacaaaatggtatttggaacctactagcactccatccggggcctaaacaatctatacacaaacaaatctttctgtacaatttcacattataaagcattgaaccaatctttatctacatcattaaaatctttcttggcaaaaacattgcgattctcatctttacactccattagtgtcttcaacaattcaccttgaatttaaagaaaaatcctgccagattacagcatttctcagcctctaaatgctataaaccagccctgcaattacagcagcatagaccatttttcaaaatttagagagcttaggtctgcctatccatctcagcaggtggggaaggctgattgttacagtattccaattcagccaagccttgatttctagcagtccgtgaagagaaacattacacttaaagaacaaatgttgactcgtttcaacttgagcctcacaaagacagcatttctcattcacttgcatcccatactttagcagcctttccttagtttttagccggtttagcattgttaaccacaaaatcacactatgtttaggggtgttcaatctagcccacacttctttgcaccagttcagcctagctgcagaagcagagagcaggttataccctgctacaatggtgtacctttccctctgaaaacttgcaacatcacacacttttttaagctggtctttgatagctaccagcttcttccattaccaactagcatggatagaagcagagtaactccaccaatcctgttttttgatataaacactatggacccatcttagccaaagactctcttgcttgtttgaaatggcccatatatacttacaaatggcagccttattccactcctctagcttctttattccaaaccccctgctcttataggctagcatatgttctcccaagcaacagcaccagctccatggaacatagcttgccctttccataaaaaggctctacagatagcttctatagatttgatcacttttttgggcaacaccatcatatggctccagtatgcctgaatagctattaaaactaaggttattaaagtaattctacctgccaaggaaaggtttcttgagctctaactcttaatcctagcagtcattcttttagccagtaactcacactctttaccagatattttctttacacaaatatggattcccaggtaagtgaaaggcaaatcctccctcgagaaaccagatacttctatcaacttcttcacattgtcttcatgcatgttgctgcaataaattgcaattttacttgcattaggatgaagtccagaagtgagagaacacaattttagggcctgtagcatataagtgacactctttgtatctccatgatagaacaatagaacatcatttgcaaatgccaaatgattcaatttaagttgagagcatctatcatggaaatgaaagtcctccttctcaccaatcttcctcatgagtctagaaaggtattccatacccaagacaaacaatagaggggacatgggttccccctgtctaagccctctcctagctttaaaaaaaccatgtaaagttccattgaacataagagagaacttaggagaggtgatacagttcattattaattgcatttcttccaaaaattcccattcaatggtgtcatatgcctttcgaagatcaagcttgatcatacaactcgatttgttagctttcctgttatagtgcctcaccaaatcctgacatatcatgatattatgccctataaatctacccttaataaattctccttgagaatgagaaattatttcaggatgaatgtctctaattctagaactcaaaagcttagttgtaattttgtagataacattgcaacaagcaattggtctaaaatctttgatagtgttaggg

SEQ ID NO: 26767 - DNA, 1624 bp, Cannabis sativa
atcatatatttcaattacaaacacaaaataaggtctttaacccttcaggatcaagaaaaaaacaacgaaaataaagaacccagttatccaggccgcagttgaatttccttcatggcttcaattattttattgtatattaaaaaaaaaacaagaaagaaagaaaggtgaaaatactcactcttgggaggaagtactctagtctgtacggacagagccttgtcttgcagaacggagatggctgtggcagcctcctgagagaagcaagaaggccatcctttaagaaccctaggtccccacatgtcccccaaagccgtcagttgaacgatgcaggtccatagcaagaccgacgtggttgcacgtatcatccacagcttcattttcgacctggaaggcgccgtactcatacccatcgtcgtcttcaacttctctcctccaaaagacttaaatcccattgttccttctttcttctccttcttctcaaacctgcacatcaatcctctttctcaaaccctttttctttttttccttccttctaccactcttaagcattcatatacacctcttctctctttgccctacatcaagctgcgattctaacttcaatgccgaatcaaaaatcaaattaaaaccaaaggtctttcgtctaattaaccagattcagtactatggaaacctcttctctcctttcctttcgtcttatccaccacaaatccaaatctctaagatccgaattccagtcctcgccaaaaaatctcaaaaaggaaaacaaaaaatatccaacaaaaacctcaccgaatttcacaaaacagcctcgaaaaaacctcaattccctaaccacattgcaccgaactccgatctttagccgatcaccgacaaaaaaataaaataaaaaaatcaccggggaaatgccgcttaactccttgtcttctcgcaagatcagaataataattccggccttaaccttagccgggaaatgccacctcttagaatcgccggtaccaaaataaatacagctgtatacatagagggagagaagagaagagaattaggcgagagaaatagacgaggttgtgaagaaaaccgtgtcttgccaagccaacaaaaccaagaggaagagagagaactgtgcttgtttgttttgatagggagagagagaaagagagagtggggtgtgggtgtgggtgtggtgaggtgcaccgcaggatcggtggggcgaaccggggttgggcttagggttaaaggggatgggaaggaagggagtggctctggtccaataaatgcaggccagctacacccggtcccactcgaattaaggttctctcagatgcgtcaatcatcattccatacgatcaccgacacgtgttcttaccatatggcctccccttccgtattacggctttggggttggttcgtcctcgccgatttattccattcaacttacgatacgccgacaatttatcgcgaatacgatattttagctaattatttgttatgcatttttcgaggatatttattattatcattaatgatattttacatcagataattggggttgggagagacctataaataaaattctctccaatttttttcagattactctaatatcgttaatgattaagaa

SEQ ID NO: 26768 - DNA, 1244 bp, Cannabis sativa
ttaaactctaagtgtattatttaggttatatacaaaatttacaatttttttatgattttgctcggtgacgatgcaaaatgcgacagatggccaatttagtaacatgggttaaattagaatctttttatatagcgggtatttataagttgatatttagaatattaagattaggcggggttatggtcttggaccattttacccctaagtcattttactatttaagcaattatgtaagggtatttttgtcattttggttttgaggattaggtagttctttcttttgatggcagctggccattatttgttttaatgaattaagctcaaaattgttaatttatccaattaattcaaaatcaaggaaaaagacaaaattagaaacccacctcttgctctctctctcctatattcaggcctaaggaaaaaccaaagaaactaagtccaatcttcatcaatttttgaggagaatcagttggttttcaaggaatagtgaaagtttggaacttgtggtaagaaccttaatgccttttcattttgtttttattagttttgaaggggttcaagcatgcagtagtggtgttttatttttgtccaaaccctaggagtgggtgatattttctgaagttatgttaagggatttttagcttgatggagttagatttaagggttgaatgtggtgttgagcaagtttgagtttaagaactcaaacttggctcagcaatggtaatttgtataatttttggttatatctggttttactgcttggatttggtttatattgaagatattaggtattttggagcatagttttgaatttggggtagttttgagcttgttttggagctctttgtttttctgcagtgagaaatggtagatcatatctacagatcggtctaccgtttttactgagaaagacccagaaaaatagcctaccattttaatagaaatggcctgtcattttttaggcagtttctccgtttagttgtttttctcgtgtttcctggatatttgggggctttttcatgctttttatcgataggaaaacttttagttttgagtttagattctcgaaaaggtttagaaagttgtttatccattttatgtgattgtgacatagggcattcatacattgcatgattttccattcaggttgagtggcacgcttgaattttgaaacgagataagactagtatagaatatatgtgtatgtatgttatatacatgctgttatatgattcatatgctac

SEQ ID NO: 26769 - DNA, 2676 bp, Cannabis sativa
  modified_base (2297)..(2310): a, c, t, g, unknown or other
  modified_base (2409)..(2411): a, c, t, g, unknown or other
ctctctctctctcttctacatgccatttgcagtgtacaagagactaaatctttctcatctcgctcaattgagatttgcctagcattgtttcattattgtaattcatagagagctactctagaaactacaacataaaagtttgtgatctgagtagtattatgtctcaaatcaatacaactaaaaggggagtaggtcattacccgttaaccaaggcggtcgaacatctataaaattattgtgtctattttatttactcgctttaattgtttacacgtggtgattttaatcataaataaggctctgctatcagttgaccaaatctaaggtcaatattttagtgctttcattgagaatattatttatcaattcgatcaatcactatggacactgtaacaagaataactctgactataaaatctacttcatcgggtcttcctcaagaccccatgactactgatcctaatgtttgtgttccacccaccactgtagtttccacaaacccaatggatgtagccaatcttgtcaaccctggcaacccagcaggtccaacataacaagtctggtcgaccctgctaacccgactgatcccaatgaacaacctctgttgcccaaggtagatccaccattggcaccttcaacaaagggttttgtcaatgtggaacagcccccatgtaccataaccgactctattccctggtactatgcaggggaatcaggtctgagaattggcaagccaactattggtgagcctcatgtggacttgggaaaggattttgaattggccagacctagagattatgtaggccaagttggcctaactaaagaactacgtgttgttggttgcgatgttttcacccaacagagacgcgaattcctaaggtggatggatgattaggaagccatcctctgggttcatcgagcaaagatggactatcgtaatagggaagctagtaacctaataaggcggtttaataagagaactgctgggaaatgacatgaccagatcagagatcctctccaagggaggctcgtcgatagatcgggcagggtgtacacccatgtagacaatagacaaacagtccaaccaagttcttcgggaatgaggacggacttccctctacccaaagacggacaaatcctgccaaatagatctagtggcgagaataggcaaactctggtacctggtggtatggggggctgaccaggtatctttgggtcattaacacccccactcggccagcctctatacagagtgaaattcctctctgaagcatttgtgagcaaatcgttctaaggcttatctttaacatgctaggttcggggacaagtggaaacaatcgaaggttagatatctgaatagaaggagtcattatattctgctgccaccaatgtaaaattttttataacttcatatatgtgtttatttcattattttaggaaatttatatttaggatgttagattatagatttataatcaacatacatgttagtaaatttagatcttggaaaataaattccaacacacaactcatcccctaataccaccaaatgcttcaggtactgaaaccgacgatcagattccacctggagagccacacatggagttggaaaaccttaaggaggtcgatcctcgagttgaacagcttagccaaactgagtgaattcataatttgatacgtagttgaactgcccaaaccaatttaacatctcagttcattaacaatctatccaagctggttcaacaagcatcttccctgtaattgaattgaccaaatcaatgtaactttgagtaatgtaatgcttgttgaatcagctggggtacatacattaatatatattgcataacatggtagaaacacaaagatattataagtacatacatacattaatatatattaggcttatgatattggactacctcaaatatatggtattatgggcttatcatattagctaaagtgatgcttttgtaaaagggaagttgacttaatgtatgtacgtattagttgcaacacgcttcctttgtcctccaaaaataccctttagcattttatcccctgccattatattagcacattcttccaaatcaagaatctgcaattcatgtggtcttaattacttaagtaattttcttttcaaaaaaataaaaaaaaaaaaattacttgagtaatttcacagaaatgatctaatttcaattttataagtaaatttcccttttagaaagggattatttcacaaatacataaaaacaaaaaaaaaatataaaaatacagttttatagaattttaaatatttnnnnnnnnnnnnnnattttatttacaaaaaatacagtcattttatgttgtacttttgttaatttattgttaatttgttgttgttgttttgatattattttcatgttacttttnnntagttttcttgttattttcgtattttttctaagaaaaactgtaaaaatgtacaaaagaatttaaaatgtaaaaatataattttttttataaaaaatggtacccttattatcaaatatgataagcccaatatgtagtaggggtagtccaataacataagcccattagcggctgtacatgtatctctgtattttagaagaagcccaatatcagaagagataacaccaaacccgtattttattaggaactatttcataaaaaaaaaaa

SEQ ID NO: 26770 - DNA, 3625 bp, Cannabis sativa
catgcaaacatcaatcacttcaagtttcttatattgataactaatcagattgtaaagatttttatttagggcataaaacccaacacccaagtctaggtctacgtccaggtttgggtccaagtctcggtcccggtcttggtacacgatcgagtttgggcccgagttctggtctcagtatgggtctgagcctaggtctgagtttagttctaggaatgggtctgagtctttgtcacggtcctagtcttgttcgagggtccttgtctagctgatcttattcaggttccaatttcgggtctcgtttctaggtcagggtctgcatttgggtcctggtctgagtcccaaatctggatccatgtcacgtgtctcggtctggttcttatttaggtcgcggttcccaggtccgacttcgggtttagacagagactggggtgtaaatctatgtctcggtcccaattctatgtcccgattctggttccaattttgagtctgagttcgggtccaagttcaggtcctgagtctagatttgggttaggatccgggtcggggtcccagtttgggtctaggtctagcttggagttcgggtccttttccgaatacaattttgggttccaggtccaggtccaagtcctagtttccgtcccattcttgagtcctggtctacttccagtttcggttccaaattcgagtcacaaggtacgggtttgggtccaggtttgggtttgggactgggttcgggtccgggtctaggttcgggtcctggtctgggttcaggtctggggataggttccaaatccaaacaacaccaccgacgactactggttcgatctccaagccctgggtccaaatctagatcccaatcttgggtgccggtctggttccatttcaggtgccaggtcacgagctgggtcctatgtttaagtctgggtctggggtcgggtcttcggtcctggtcctagttttgttgcctaggtccctatcttgattctaggtccaagtcctagttttggtctgggtttgggtccaaatctaagttcgggtttgggtcctagtcgcagtttgggtttaggtcctagtcgcagttcgggtttgggtctcagtctaggtttttatttgggtttggattctggtttgggtcatgctcatagtcctggtcctagtcctagtccagtccaagttccaattgcaattctgagttcaagtttgggttcgagttcgagttggggttcaagttaaagttgaggttagagtcatggtctaactttgggtttgggtccggatcacggtctaggttcgaattaggctccgtgtgtgggttagggtcctgggtctgggtccagattcagctccgagtcccaagtttcgatatcaatctgagtccaggtttagttccttttctaagtcctaggttccgatcccggtctttgttcaagtttgggtccgggtgcaggtctaggttagggtcttattctgggtcctaggttcgggtccaattttgggttcgggcccaggtttgggtcttgtcctggtatgggttcatgtctaggttcctgtcctggtttgggtttggggcaggttttgggtccgggtttgggtctgacttcaagttcccgagtctaggtcaggtccaagattgggttcgagtcgtggatttagatctgggtctgggttccgtggcctaggtccctggtctgggtcccccatccaagttcagttcttaggtactggtctgggtccaggttcgtgttggttcatgttcgagtctagcgtcttcgttttagtccagcgcctggtccgggttcgcgtccaggtctcgtgcccagtcttggtcctggttcaggttcgagtccttgttagggtttgcatcctggtctcagtcgcgggtctcaagtcccgatgagggtttaggaccaggttaggtctaaggcccggtccaggttcgggttccaggtctcaaatcccagtcctagtcaaggtctcagtcgaggttctcgtctgagtttaggtaatggtttgggttaggttctggtcttaggtttgggtcctagtcatagttttagttctgattatgggtccgggtctaggtgcaagttgtggtcgaggtctgagtgttagtccgagtttgagtacgggtttttctgatcctggtctatgtccaggcctgagtccgggtctaggttcgggtcctgggtctaagtcctagattcaggtctaggtctgagtccagctcctgtgtttcgatcctggtctgggtctgggtcgatattcggggtattcaggtccggttctgggttcgtgtccatgtttaggtttgaatccaaatttaggtcaggggctttgacttggtccaggatcgagtctcgagttcgagttctggttcaggttcgagtctcagttctagtctgggtttgggactgggtccgagcccgtgtttcggggctgggttctggtcgagttccgggtctcagtctaggtccacgtactggtcatagtcccggtcttgttctagggtcctggtcacgttctggttcaagtttcagtttcgggtcctaggtctgtctgggtccaggtccttgtccagctttgtgtccttgtctgagtcccagatcaagacatcgactatgggtcttgtccaagccccgattctcgaatcttatggacaagatctggatcccactaacaggtcccagtctggtttcggttcatgtcctaggtcccagtatgggtctaggtgtaggtccgagactgagattgtggtccagttttgggtctcgatcccagttctggttcccgagtcttgttcaactttcgggtctcaatttaggtttgaattcgagtcccgagtcccagtttgggttttttatttaggttttggacccaatcccagggtgggtctgtgtccgaatctgggtcctggtgcggttacagttttgggttagggtgggtccagttctgggtttgggttcgggtctaggtcccgttccaacatcccagtccggttcctgttcaagtttcgtttttggttccttagtgtgggtctgtgtcttagtatgtgtttgggtccttgtttgagttcgagtttaggttcgggttgtggtctgagtcctagatacatacacagactattggttgggtccaagaattgagtcttggatcccaggtctcgaggtgggtcgtaggtccaagttttggtctgggtcgggtcccagatccctatccatgttctaaggcccaagttttggttctagtttgggggcccaattcccaggtctttgtgccccatctatgttcgggtcctaagtcccggtccaggtccaagttcgtgttccggttcgggttaggttccggttcgagtccaggtcccggtttgggtttgggtctgagttcgggtcccagtcccattcttggtcctggtttcgggtcccaggtctgagtctagttcttcggtccacggtttagccccgatttttgcgtctgcgtcaaggtctcggtctaggtccaggtctcagtcttggtttaggtcccaggttacaagtcccggtctgggtccaagtcccggtatgggttctaattagatttgttgtttaggtttaggtcctgtacagtcccatgtctggcttctagtccc

SEQ ID NO: 26771 - DNA, 1718 bp, Cannabis sativa
taaggttgaaaaagagacctaggagttagaaactataatatgaggcaaactataatagaagcacggaggagctgaaatgtggcttcaggattagacaaaaccactcctgctggcaaatcaaagacctttttgtaagtggaatgcgggtttggaacgaacaactgatcagagattgcttttctccaagtaatgcagacgcgattcttcaaatcaaacctcttgatgaaggggctgatgtcttgttttggaaagctactaagtcgggtgagttctctgtgaaaagtgcctattggttaagtcaaagccataggctcaaagattgttgcagtttgtggggtagactttggaaatcaagtctacaccctcggctacaactgctgtgctggaaaatcttttcggatagcttaccaacgaagggacgacttgggctatgtaatggagaccaattgttgtgtcaattctgccactcttgcgaggagactactctgcatcttttcttcaagtgtcatgcgatcaggagtatttggtttagaagtatatgggaattgaggagtgatggtcttaattggaattctttaaaggactgtggcaattgatggtgtggcctgatagatgacaagctggctctgtttgtcgcttgtgtttgggacacgatgtggaaatgttgcaatgacatggttcacaaagagaggaaatgcagttttgaagatatctatggtgattgtatgcgacggtatagtgagttccaatcgactcactattcagcttgtgtggatattacttctgagttgggcggggagaaacctcaccaacatctgcaatttggtggatgctgctttcgagtggacgcttctgtgattgaggagtatgctggttttgcagcagtatgtacctctggggctcattcggaggagcttgtatctgcagtccctttggaagatcatttctttgcagtcaacaatggaaaggtccatagcgttatggaaggggagctacagggaatcaacttagctttacatatggcagtggagtatggagctgaaatggtgcacatcgaaaacgactcaatggctgcagctaatgcttttcagtcgggtcgtatgcctttttgttgggatgtatatcctctgttttgtgagtgccttaggctgtgtagaagttttcgtaggtttgaagtgttgtatatccctcgagaggaaaacttaatagctgataagttggcccactgggcaagaattaactctatggtttgtaagggtcgaattggggatatagccccctctgtttgctctggtttgttgtagttctcttttgtttttcaataaagattttacttatcaaaaaaaaaaagtggcattctcataaccacgagccccaaatttaatctccaccgcttctaattacaccctctctcttcctctctttgcattttctatcaacgtcgatgggtatttttctatcaacttaggaaattttaatgagtgcattaaatatgtaaacatgatcgttaaattatattaagcggttgtgattaatttagaaattaataaaaaataattaataaattactgtaacttaaaattttatagttatttattacagtaacataaaagtgtataaccatctatacataatgtaactattgaatatatatatatatatggaacagtttttaatgggtattatccatgaatggttactaaacaaatttaactata

SEQ ID NO: 26772 - DNA, 5862 bp, Cannabis sativa
  modified_base (3676)..(3678): a, c, t, g, unknown or other
  modified_base (3925)..(3926): a, c, t, g, unknown or other
  modified_base (4347)..(4347): a, c, t, g, unknown or other
  modified_base (4461)..(4464): a, c, t, g, unknown or other
  modified_base (5071)..(5072): a, c, t, g, unknown or other
  modified_base (5138)..(5138): a, c, t, g, unknown or other
  modified_base (5209)..(5211): a, c, t, g, unknown or other
tgcgacgatacgtatgccactattttgaacctctcgagcatcatctcttgactttgtatgaaaatatttaccccttacaatgtacgcttcatgctttgctatcacaaaatttggtccaatggaaatacgactcaacaaataaaatactcaatgattctgttcgttcaacttttcaagaatggtattccttaaccacccaacaaaagcttaacgatgttggtctgcaacctatttttgtttatttttatgatttcttagaactattgattgtaatatctccatatggtcaccgtaaaacatgtaaggttaatcaagtaatttttcatggtaactaattaaattttaatcaaaggaaacgctacctataacttactttatgtatggctaaacctttgcattattgttcaacacaactaattgagcttgatctagttcaaacttggacactatcaccattgtttctttcccctttaatcctctatcaacctcatctgggaagttattggtttgctaattccaatcgtccttccaataaggcattcactcgaaccatcaagagaatggttcgaatcgaatgcccgccaagggaacgaagcaatggctgcttgcactgatctgattagcacttgttttcttattgattccaggggcagcggtgttcttgaatgaactctatccgaaccgaattagcacttctcagatcagctaggcctctggagctgagttgggcgtcggggccctagatgcgctagcgatcggcacataggggagtggttgctcgggtttctcggcctggtatcctacacctcgcgttcatgatatctacattcaactgtgccccggagacacggtcgaaacacgcccgcccagtgtgcttctttcacatgtactctgaataaaattccacagcctctttatatatgtagcactcaatcatagatgcttctggccaataatggttacgcacataacttttaaataccttcatatttctttcaaatagatacatccatctcgcccaaactggcccacacatcttacttctctcactagatgaaccataaaatatattatgatgtcgaaaaaatatggtgaaaaatacttttcgaggttgcataatgttttgactatatatttatgtaatgcatctaatttatttatttctaatactttcccgcataactaattaacgaaaatgcaaaatgtgtcaaacattctcgaatatttttcagcaggactaatctaatggtgattggaagtagatgttgcattaacgcattaaaatcatgtgatttcagacccattagtttcaattcagtctcatttaccaagtttttgatgttaaacgagtaaccatcacgtactttcatatttgaaaatgatttaaaaaccatttgtttttcccttttggagtgaccatcgcattaaaatataatcattcacctttctttttaagtgccagagattgtcagatacccatttcaatgagatctaaacgactatttaaaccatccttagtttcgttggggatatcaagtaaggtaccgataatactctcacacacattttttcaatatgcatgacatccaaacaatgtcgaaccagtaaatttttccaatatgcaagacgaaaaaatattgactttctttgaaaacaaccatttgttttcttatttttttacgtctttccatacttaaaatctactagttctacttcttggagaattttttcccctgacagtggcaaagaagccatttagagccattagcacattttttaaaaaaatccttggaaaaatggcctgccattttctaaacggcctactgtttttgggaaaaacagcccgccatttggaaaatggtagggcgaaaatagcgcagtggcaaatccttttttttggctctaaaatacgcataactctttactcgattatccgatttcagaaattctaattttgttgtcttagttaaatgatatgtgatttaaaaaattaattaaaaaaattgaatcatttggtgagaaaacttgtcacacaagttagtgggccaaaatttatacttataacttttttaagtgtggacttgaaaatcattatacaatactaagaaatataaataaaccttcatggagtcttgtcttgagttccttgagtcttggaatccactttgggtcacttttgaaaattttggtaaaatgaccattttgcccttagagttaatttttccttagaataaattatttcacctttaattgtgctacaaaatcaacaaaacattagtaacaaataataatcaaatatttgttaatcatcaaaacaaggagacctaaaagtttgagttaacaaagggcataattgagaagaaaagagaattcaaggtttattttattaattaagaaaccttggaaggtctaattaataaatatatctaaatggtaattttatatgataattaattataagtataaatatatagaattagtatttcaataactagaacagaaaagtggcaatactaaagaaatataactttgcttcattaaggaagcaaaataatggtaaaaatctaactcgtaagccttcataaggggttcaaccatgagggagtattttaagccactggatctttcaaatcagcccatttagttctaaccctaaacctaatgaattcctataaatagaacataacaacctttgatttaagaaagcacctttagattctttcttgtgtgacaaattgaataaaaaaaaacctactattttctatttattatttttgaaaattttgagttttcttcacaaaaattcgtggtccttggtgttgagaaattgtccacacattttaaagaaatactcagcatagtgaggaagattgtgtagttcaaattgtcaattaaaggagaattcgggttcagatctttgtcatactctataatagaaaggatcaagggttaaagatccgaatgaaatgattcatattattccgctgccattaatgtaaagttttctataacttttatgtgtttccttcattattttagagaatttatatttaggatgttatattatagaattataatccaagatacatgttagtaaatctagatcctagtaaacgattttcaacatatttacacagtcgaacagggtatattcactcagggttccatccaaagtagattagagagaagccgagcaaggtccattcattgtacctctccaagcaaattcaacatgccaagttgggttccttgcttcgtacagaaggacacgacattagaaaatctcttaagatatttttcttaaatatctccacaactatggtttagttaaaatccctatttttatgggatttattttgttgagagaatcatggaatttattatttagtttttcgctttccctattattttgggtcactgactcatgtatcttctttataaatagtgaagtcatttcattatttagggatttgaaattgaactttgtaaagagctattgcgttgttaaagtacttgtaaattttcttgagattataaagaaactcaccttgttggacattgtgatcttaataatattctaagtaatacaacaaaaaatggagtaggctattaccactatcatagagtcaaactattataaattctttttgttcttattgctttattattattattnnnattattattattattattagaaatcgatcattcaattcaatcgctttaaagactcaatgtcgttggctaaaagtgaggtcaacaacatcaagacaacataaaaaataataaacaaataataaaaaattaatagcaaaattacaagagtacaatataaaaatacatcaaaagaccgtattttatgtaaataaaatcttaaaaactatacaaatgttaaaattttcatacaactatatttttgtaattnntttttttttttggttatttttgtgcttttttgaaaggaaaattttcgtaaatatgagatttgagggtatagtttactgttttatagcataaataaataataccatagggttatggatttcttattttttttacatttatatggatttttttatgccatatttttgtaaaaaaaagtagaattctcatatttgtaaaacaacaataaggttcgccgaaaaagtcaacggcgtcggaaaaggtactggaaaagtcgtcggtactagaaaagtcaccagaaaagttattgtcgctgaaaaagtcaccgtcaccgcaaaagtcatcgtcgccaaaaaagtcgcagaaaaaatcactaaaagtagatgtctcagatataattaaaaatagaatcggttctatgaataaaaactaataactcaaacnggttataattgaaatataacctgttctataacataataaataaaaataaataacataaaataaatcaaaccagttataattaaaatagaatcggttctataacagtgttataannnntaaaaataaataacacgaaataacttaaaaccggttataactaaaatagaatcggatatataacataatgaatacaaacaagtaacacgcaattattcaaaccgattacaattaaaaaataaaggggaaatcagttcttaaaacactgaaacataaatgaaaaacaaaactggtttcacaataaaatacctcataacacatatacctcgtaaaaccgattataattttttaagaaaaaaaatagagatcaattttaaaaaatattgaggcataaatatgaaaagaaccagttccataacataataaataaatacaaataataacacacaataactcaaatataatataaaaaaatcggttatatttatcaactagttaaaaatttaagaccaaaaaacttgttccgtaaagcaacttagataaaaattcacacacaaaaattaattaaataaaataactcaaacgaaaacatccattcaacatactccaacccactaattatactcataccatatctatcccaaaaatactcgtttattatgttatacaactggttctattttagttataaccggtttgagttattctgtgttatttgtttttattnnttataacattgttatagaactggttctattttaattataattggtttgagttattttgtgttattngtttttattcattatgttatagatgcggttatatttcaattataaccagtttgagttattttgtgttattnnnttttattcattatgttatagaacccattctatttttgtttatagttgagacatctacttctggtaacttttgcagtgactttttccgatgacggtgactttttcggtgctggtgactttttcggcaaagcttattattgtttacaaatatgagattttcatcttcttttacaaaaatatggcataaaaagaccataaaaataaaaaataaaaaaaaattaaaaaaaaactataaccccttagtattatttatttatgccataaaaaagtaaactattaaaatttctcatatattgtgtaatttctattttttttgaaataatccctatttttatacaagttgtgatggctttatatttaaagaatttttgaaaggaaaatttacactcaagtactatttttttttttttcaaagtttacatttatactttgataagaaaatttttacattatactttccttacataatttttttttttctgtgttactgtttttaacgtattaaagctttaaaaaagattttttttttcttctttatatttttttattcaattttagctgactttttttaagtcaattgctgacctttttcatatttttctaatttaaatctatttttatttttttattttttttcctctctctctctctc

SEQ ID NO: 26773 - DNA, 4166 bp, Cannabis sativa
  modified_base (2886)..(2888): a, c, t, g, unknown or other
tatacccaaaattcggctatgtactagaagttgatacatgtcccacaaaaggaatataaatcaactcaaagaatataataatgacattgcatcattaaatgcaatttaaataactcgttccaattaaatgcaagtttgatataaatgttcaaactcgctagctgttaatcttatgcgagataagaataataactattaaactagaattgacgagacatatatatgtctcaggataaacttagtaaaatatacgagaagagatactctcccacacgagcaagtagcaacactcaaccacctcgcattattcataatgtggtgatcatctcgcatcactaatacaaataaagaggtacatcgagatgaagttcttctaatacttagcgttttccctattaagattgataagaaggagaactcgtgtttgacaagatgcaactttcataatcagcataaccgtttaaataataaaaaataaggggcaattgggtagttactagatattgtcccatgtgtaaataaatgaaacatgaggaatgtccatgtttcatcaacaattttaaatgaatcaatcccaataatataactgccaacctatatttctacaagtaggggcaaaatctatggaaaaagggacgacaaaaaatatgagaaattttattattttcaaatattgagatttgtgtatagtatttcaaaaaatctccctaataataaggactcgtggagtatgtagattttaactactaaactatgtaaattatctggtgttatttattatcattaaattctgtagtgtatttattgcaaaaaatgctatttatttagttaacaaaaatatgcgttaacagtttggtactttcattgagagccttcgtgataaaaactcagaaaaatctctccttaaaaacccaaatacaaacccatattaaatggctgataacaatcaacacgacaaaaatcaacctgaagaaataactcatcgtcctggcaaagaacctatgggatctcaaagagccaacacatatgaaacaccacgttcaggaaggaacgatggtaatttcgatgctggcagtgatcaaatctcacaaagaaggagtgaggatgcttatgatcctaccagatatgtaccactggtagaattggaaaaaagacaacttctgttgagattttatgccctaaataaaagctattttaatataatcttatttgttatcaatagaagattagaagtcatttatgtttaaatgtattttttatgtttatggtttggtcggccgtgagataaatatgataaagggtttggaaccctactacctgacggagaataagttatctctaaaaggtgggttaggtctatgacgatcagaattgagggtagagagtcgagtgctgatttagtggtattgggcttagcagattttgatatcatactttgaatggatttcttgtccaagtattctgctagtattgattgtaagcagaagatggtgatcttccaacccaagggcgaggaaccatttgtgtttacgggatcagtttagggatcctgaattctagtgatctcgattttgaaagctagaagagatttgttaaaagataggttgtctagggtttttggcagtggtattggataccacacgacctaaatcagttcggccagaagacattaaagtggttcaggaatttttagatgtgtttcctgataatcttctaagtttaccaccatagcgggaaatagattttgttattgacttagcacctggagcaaagccagtctctaaagtaccgtatagaatggctcctgcagaacttaaagaattaaagattcaacttcagggaatgcttgacttagggttttctcgacctagtgtgttaccctagggagctctagtgttgtttgttaagaagaaagatggatccctacgcatgtgtcttaattatcgagaaccaaacaaatttactatcaagaataagtatcctttacctaggatcgacgatttgttcgatcaacttcaagggaagacaatcttctttaagattgatctctgatcaggttatcatcaattgacaatctcagaggaggacattctaaatactgttttctgcactaggtatgggcattatgaatttttggttatgtattttagattgatcaatgctccggtaacttttatggattcgatgaataggatattcaaggattttatgtgttatagtatttatcgacaatatccttgtatactccaatcagaagtggagtatgaacaacacctgcagatggttttgcaaaaattaggagaacacaagctttatgccaagtttaaaaagtgtgaattttggctgtctgaagtatcgtttctcagacacattgtctgtaaggatgggatcatggttgatccggggaagattgaatctgttagggattggccaagatcaaagatagtcatagatgtcagattttttctaggtttggctggttatccttgtcgatttgttgaagacttttcttagatctcaatgcccttaaaagaactcaccaaaaagaatcagcgatttctatggacaaataagtgtgaagcaagttttcaagagctaaaacaacgtttgattgcaactccagtattagcactatcatcggataaaaagaagtttgtagtttactatgatgcatccagacaaggtctgggatgtgttttgatgcaagttgatcgggtaatcgcatatttctctcgtcagttaaaggagtatgaacagttatacccaactcacaatctagaacttgctgtagtagttttttccttaaaaatctagcaacactatctctagagaaaagtgtgagatttacactgatcacaagtgcctcaaatatttctttactcagannnatttgaatatgagacagaggcagtggttggagctggtcaaagattatgattgtgaaatcctttatcatcctaggaaggccaatgtagtggcagattccgtaagcagaaaggttcttgggcaagtatctagcatggttatgatttcacctcagctagcagatgacatggtcagatcaggtattgagtttgttgtgggaaagcttaataatttgacgttacaatgagatttgttagacaaaattagaactgcctaactaactgatttagaattggtaaagatccgagaggaggtcttacctggtcaagctaaagactttacagtgtcaggtaatgggatgttgttatacaaaactagtgtgtgtgttccaaacagtgtagaacttaaaaatgaaattctcgaggaagctcataccactccttattcattacatcctgacactaccaaaatgtatcaggatttaaaacctttctattggtggtgcgggatgaagaaggatgtggtagaatttgtgtcttggtgcttgacttatcaacagattaaggcaaaacatcagagatctgcagggttgttgcaacctttgactctttctgagtggaaatgggaggatctcaccatggattttgtgattgggttacctagaatcacaggattgttcgatctaatatggcttgattttctaagtccgcatattttctaccagtaaaaaacaacatttacagtggatcaatatgcagacttatatgttagagaaatagtgaggttgcatggggcttcgaagtccatcatatcagatagagattcgaaattcacctcaaagttttggcaaagtctctagcgagccatgggtaccaagctgaagttcactacgacttttcatccttagactgacggacaatccgagaggacaattcaaatactaaaggatatgttgtgagcctgtgtgatggattttgaaggttcctggagtaagtacttactgctgatagaattttcacacaacaatagctatcagaatactatagggatggctccctatgaggtgttgtatggcaagaagtgcagatctccaattcactgggatcaaactagagaaaggaaatatttaggttcgaaatcagtacaacggaccaatgaagctatagaaaagatcaaggccagaatgcttgtctctcatagtaggcaaaagcgttatgcagatccgaaatgcataaatgtagaattccaggtagagatcatgtattcctacgagagtctccgatgaaggggattaaacgttt

SEQ ID NO: 26774 - DNA, 5050 bp, Cannabis sativa
  modified_base (4032)..(4035): a, c, t, g, unknown or other
  modified_base (4227)..(4242): a, c, t, g, unknown or other
  modified_base (4665)..(4667): a, c, t, g, unknown or other
tactcccctttttgttgtattgatttgagaacaagaatgaagtgttcttcctctctaaagctcttacaattgatctctgagtaattctctcttagatcgctcttttctctctagagtgttcttcataactaaattttgtctcccctaacagtgaatttatgccactatttatatgagcttattacatgaagaatggcttcccttaatctataataaataaaataggaaactacattaattttataattacaatgcaaagaatgggaaaccaaagaatattacctttattctttgacttaatccacgaatgtagggattatcattgtgtcttagaagcaacgatgcttgcctctgaaatttccaactcacatatcctgcccggtgcatgagagttgatcacgcgattgtactttggtcatatgtcccttgattactctgctaggacatcctgctatatgttgacgacagagatctttacatcaacctttcggggctgctaggagtactttcttttgcccaggtaggaaaatgtaagacacgtgtcatccagctcactgccacgtcataatgccaaaaataggatgacaaaatgtgccatgagtttaaatttaaattgtaataatgttaaaaaaaatattttatgttatatagccacatttaatataagagagataagagagatatgtgtagtaacagtaactttttttgacactgaaaaattgttaggtttatttttatgcatttttagaatctactttagtatgtatttagtagtttttatttatttttattcaggtttatggttgttttatttttgtttcaagtttcaattgtcaaatatatcacgtgggttaaaaaatatgctaaataatatgaattttatggatttagcatgaattttgaagttgtaagatacactgcgtgaaatttttttagttttggatgttcaacatgcttcgtttgtaatcaaaagtaaagtttgaagcttggagataattttttacaatgatccattaacttataggaaaaactttgaatgaaagttctagatctctctctcatctttcaaaagatcttaaatcgtctaattctaagttatatcgagacagttatgaccaaaatacttatgatcgttgctagaagtaattgaaaacaagaaactacaaaaaattagcgaagaaattaatttggaaaatcacttgcaaggtcgcgacctagcatgcaaggccacaaccttgttgatttttaggaagcttggaactttggattataaaaagggtgctgatggcaagcttctgacaccattcaaaaattgagagaaattctgagtgtagaaggagggcaaagagcagaaggcaccagtgcaggactctaataatgttctatctctttatctctatcttttatgattttacatgaattttattgttttagaatgtcttctagtagctcatttcttttaaggattattatgtgaattacttgaatttattttatagattaatatagttgttcaatttcttcttcttctttaaattcaattccatacaatctattttaattttgtaattatttactgttaatcaatagttgctatttatgaattcaaatcaatagtctaaaaggtgagattgaatatgctctgatttttatgatgcaaattgatttaaaatgaaagtacctaggttgtttatatgattttattagttgctatgtttaatgttatctttgtgattaaacttaccatatgaatataggaagttttcaaatagattgggtttataagtcttaaccagattataaacttcttaactcaacttgtcaatggaataggaagaagagaaatagggtaattgcattaataagtaaaataaaagatagtcagggatcataataatctttgcctttatttttttttatttctttaaaattttaagtcattgtctcgctttattttctatccaacaatttttatttatcaaatagaactaaagaattaattcatttataatttaatatcaatccttttggaaatggtactctatttatcattatattactttattcgattatttatatttgcctactaaatttatcgaacaattttttggcaccattgtcggggattaaaaattatcaatatcattttaattaatttgattttgattttattttattttctcttgtttttaacctgtttagtcgctgaatttgtttatctcaagtgaattgtgttatatgcacagtagaagaggtgaagagagtcttgttcttttgaatcttgagattgaaaagtcttgtaagaaaaatataaagaacaagagggaggccaaaaaatcagagaaggtggtgcagaataaagggaatgatctaattcctggagctatgcaaggaggtcacactcaaaataatgctgagagagcctgagagacaatgtactacccactctgatgggggtacagaactgtatacatccctagcagttgaatccaataactttgaaatcaagcaagctattatacaaattgtgcagtccactctctaatttagtgggttgcctttcgaagatcctcacattcacttggtaaattttgtagaattgtgtggcactttcaaatacaatggagtgagtgatgatgcttttaaactgaggctttttctattctctttaaaggaaatggcaaaaagttggctaaattctctataaccaaattctattgtcacttggcaagatctagctcaaaagttcttatcttaattcttccctccttcaaaagctactaaactgaggggagaaataaataacttttttcagaatgatggtgaatctttatataaagcttgggagcattttaaagatctattgagaaagtgcccccaccattgtatggagcagtggatggtggttcaaaacttttatactggtttacgtcctactactaaaactattattgatgttgcatcaagaggtacattcatgagcaaaagtgcaactggagcttatgaattacttgaagacacgacaatgaataaccatcaatggtctgatgaaagagcaactggaagaataaagatggtatattgaatgctattactgctttgacaacttaggctgctacactcactaaacagttacagaagacaactgaagctgccaaaaattgttcaagcttcaactgggtgtgagatttgtggaggaccacaaacttttgataagtgtgaatcaactgaagatgttgtgatgactcatgctcaagtgcaagcaattgccaactttcagaggcaattcaacaaacccttcttcaacatatttaataatggatggactaataatgaagggcaacaacctcaattttagaaccaagcttctacttctcagcaccaaaatccacaagctccaactactcttgtaattgatctacaagctactttgctaaccctcaccattatacaaacgcattttatgactgagacaagagcatccatcaaaaatcttgaaacacaagtagggcaacttactaatatgcttcataatagacctaatcgaaatttatcaagtaatacagaggtaaatcctaaagaaaactacagtgtaatcactctaaggaggggtaaaaaattaaaagagtcagttaagaagcctattcctacaccaatgattaaagatgatggtttagtggaagataaggttactaggaaccttgaaaaaaagcagccaccgattagttatgagcaccacatcaagattccatatcctcaacaacttcaaaagaagaaactggacaagcagtttttaaagtttcatgatattttctggaagcttcacactaacataccttttacccaggtacttgaacaaatgccaagttatgtgaagtttatgaaggaaatcttatcgaagaaaaaaagattggagtattacgaaactgtagcacttactaaggagtgcagtgttgggttttctaccctaaacaaaatcagatttactaattaataaaatatcagaaatcattttatgttgtatggttcacnnnntttatttcatgattatatgtttaatgtatatattctattaagtccataacttatatttattcatgattatagtgttgtaaacatagtaaaatataatcatgattatatgttcaaaagtttatcccatgatttgtcagtacagtggatttagactgacatgataatcaatgataaggtatacttacaccttgnnnnnnnnnnnnnnnntttccagggcattggcaaagtatgccaatatcggatgtatgaagtatacattagattagactgatattgatcttggataagatatcataaacttactgttatatcttcctaagttaatatcactagttgatcttatgtctatagatcttaattctgagatggttaggtttgataattgtattatttatgttcttagagttgttcgttgaagctcgtacgactgaacacaaacatctcgagaacatgatagttcaattgagtgggagcactaatcatatatatggaatctatagcttctatacatatttagaagtcaaatgatgatttccttctagcttggcttaatagagataattgagtgaggccacattttactaattatattagtttactaaaacatcatttataggtggctaagtgttnnnaggataaaatacattgaagggtacaacagtaaatttatccctattcaatgtagatcatctatagaggatctttgactatttgaattgtaacaatggataatttcataacgtatttatatcttggtacatatagagcgttctatataattaagagtacaattctgaatctatagtggtgaaatgaggaattaataagttaaagaatttacttggtaaattctaggtctacttattggaagcttgattacatagtcacatggtccttacaatagttgagataatactgcttgcagactcagttaattatttttgattaatcaattataattataaaattaaactgcgtcttatttatgaattttcactaagggcttaattgtgaa

SEQ ID NO: 26775 - DNA, 3354 bp, Cannabis sativa
aatttcccttaattttatttatttatttgaagtataaaagaacttaggtaattaatgggcttgtatattattgggcccacttcaaaacattttacaaaactatcatttttttcggataagttgaaaactatccatttttattacacattaaataaatataattaaaattagtgaaaaaatatattttaaaaataaaaaattaaataaatatctaggtaggtagatctttatcacagaccgaggcttggtaacttctgcttagcgagaatgggcgcaagagccttcatatataggatctctagcctattcttcacgagtatattctgttcatgcatgttgcacgtgcctcccacgtgtcatcattatgcataaattgtgctaattacacggtccagatcattttcaagtaggtctgggaccgacacgtggtggttaataaggtttgatatcaagagtatacgttgactattggtttagtgacgttgacctattttttcacaacactttcggtgtaaagctgataatataaaaactcaaaagttggttttaaaatatgcaaattttggtgttgttttaagaaatatgatagtacatgtcttaaatattaaaatgaaattaataaatacgaacaaagattaaatagaccattaattgttataaaaatcgaaataaagtatctttttcaaatataatatgtgtcaatgatatatatgaatatgaaacttgtgcgttatatatataaaaaacaattaatattaattatcttgatgacctaactcttaattatatggctattttactcataaatattaaatctaaaaactcttaaataagatttatacaattatgaaaaaaaaatagattaaatattttttttgaatattaaaataaataaaacatctaccaaaacatttttttaagagatgtattataaaattatcctaaaattttaatatataatatgtgtcaatgatatgaatatgatgaaacttataagttatatatcaaagaaaacaacactaatattaattatattgatgattaaatattaaattttaatatattgtaatctattagttatattggtagacagatccattatttggctgtttatcaataaaacaaataatatataactaatctatatcgaaagaaaagaaaaaacgaaaagcaacccgtctgtgttgtattacatttggtattacctactaaaatttttatttttaaatttaaattaattatatacttcaataaattaattttttaataaaaaaatttcaataattaatatttataattcttttattttaaaataataaatcaaattaggttagtaaatttattaattattttaaaattttaaattaatcattttatctaataataatccacaactaaaaataaatataattatagtagtattatcatagtatttaatgtaattatttaaatctatatatataagatatttttgcataatatataatatttaatttgttgtaacgtatttctttgtaacgtttttccctttttctttttgtttttttgtacgtaggtatatattaatgaggttacttagcctaattacaaaaaaataaaataataaattaactatcattatatagtgaaagaacgcatgtttaaaattattatttaattatatttctattctctttctattaaatattatatgtcaatagatacatgcaactatactataattagaataaaatagacaagcaagcaacaataaatgttttagttcattctcttactataaattggctttagtggtagatcaattaaacccaaaatttggtgattgaggctactcataaggatcttgataataagtaaggtaacacatgtttttatatattacgtaatactttaccatgtgaaatattaaataaactattacatattgcttaattacaaaagaaataataaatcaaggttaattaagattcttctaactttttaaatcgttaaaaatttatttaaattattgagattgttgtatttatgaatttttatttaatttttttcaatttcactaacgtaataaatgttcatgtactaaactgtgctattttgaattttaatatttattaaatactcttcaaattttgatatataagaaattaattctttcaaatttttatttatgtcagatttctgttaataaaattgtacaaaaaattttaaatttaataattttaataatttttttaattacgaaaattaatgagtttaaaaaatataatttaatatatgccaaattttagaacaaaaattctaattagacacaaatcaaaagtatttatgatgaagcaaaataaagcatatgtatcccaacatatgtcaaaaactcaaagccactaacttcgtatatacaaataaatatgtatatctaacaagccatgtgagtgaatttatgttataatatatatatatttccttataagtaataaatgaaataaaagtgctctctatatacactgcctctctcattacttcaaccacactttccctaaaaaagaagaaagaactttggttctatcgactcctccactttctccaatatatatatatatataccatttctacacaactattaggatccatatcaaggtaaaacaatctcttctcttcatcaaatacatatatatatatatatatatatatatatcatcaactcagaaaatatggagggtgaaatgaacaacttcatcaaggtatggatttcagtgttggtttctttaacatattgttatgttataagtaaactaatctcaaaaggtactaaaagactcatcttttacctaccaataatatcactctttctctttctcccactcaaactaaattcagttaatttagttggtgcaactagcttttgctactcatggttagctaatttcaaactcttactcttagcttacaataaaggccctttatcatcttcaaataatctctcatttggtcaatttttagtgattgcttctttccccatagaaattaaggaaaagaccaaaaacccatctcaaaaaaaccctaataataattataataaacaaccaacaattagtttcactttaaaaactcttcttttggccattcttattcaaatatgtaacaacattaataaaaatagccaaaattattaccataatattgtggttttgattctttacttcattataacatatcttgtactagagaccactttggtcattgtggctaccttggctcgagccatggtgggtcttgagctcgagccacatttcaacgagccatacctctcaacctcactacaagatttttggggtaaaagatggaacctcatagtaa

SEQ ID NO: 26776 - DNA, 1862 bp, Cannabis sativa
acgggcctttggttgggcccagcattctgtagaaggccagttgatatattgtgtttgggagcccaaaggagaggccctataagaaggacttgaatagcttccttcagctgagtcaatcgtgggtttgtctttactggagcgatagtgactcttcatttctggaatgcattggtctgaatccttcccagacgcagccaggtcttcttgaggggggttattcagtggctttttccccttgagtttcatggtttctcctgaagaggtaacttttcttgcttcgttttgaatcttttggccgttatgctgtgaacctggatctttacagactgagaatttgttccgcgtgctagcgtccttggaattggaaggctgtgctgcatcaattaggtcctggatgactacctttttgttgttattaccataaggggcaaattctccaatacccggtagataaaccaatggcagttgggtaataacctgcgccggttcccccccgtcgtgtgcttcctcttcttcatcggagacgattcggcgtttagtaggtagctgaattctgctttccctcatctcatcattttctccatttcgaatagctttttgaacccgtatttgattgcgtaacactgggtctttgcctatttgtttttgaagcacccaatcttggaaccatttggctaagggggtggagaacgtggacttatcttgagagtcattctttagccatgtcccgtatagagggtagaaattccccacactgtccttgaccaccataggtggtttaaaacatgtgctttgatcgtgggtaagaatgccacacttaaaacatagctttggaagtttgtcatatctgtattgcagccataagtcctttagtttttgtcttctgaggaagaaactagaaaatagtggtttgtttagatcaatagttgctctaaatcgtagcgtgctcattccaacagcgtcttccactccattcggaagttcatagacgggtgatgccttagcagcaatctccttcagattggataagttccaatagaatggagggatgctttcaacagaaacccaaataggagttttgtcgaatcgtatttctgaaggggtaagccaagcaggccatggcattaggaccatcagcgctccacaaacaaaccaaggtcgccgtgcaaggacgttcattgcatcttcccgcctagcaaacgtgaattgtataatgccaccatctatttccttccatcgccatcccttaatagcattccaagacaatttaagggatccttgaatggcagctttgcccagtttgtacctgctaataatcttgccaaggaggactttatttgattcctgtggttcgtctacttctcctggattcaggctgaacgtaatgtcctccgaagatagctgtatagtgtcttcaaagatgccactgattccggttggatccatagggtcaagggagttgttatcgttagaataagtgcaatttgacaattctctatatcttctaggaagaaagctcagtacagagcattttctttaacaagggcattttctttttttttttttaaattgtagttccacatctttattcattaaactacgtgaaaaactcatggtaagcacgagcggatccttataaaaattaaggtaagcaattgttcccttaaaaaagttaaaaaaaatataaacatgtagatatatttttaaatttaagtaaataattaataacaaaatgctttattgtttttaattattaagctatatgtcaattgccaaaaatttaaatcccactaacaatatttttttaaaaaaaaaaaaaaatctaaaataataattaaattttattttgttacaatttaaaa

SEQ ID NO: 26777 - DNA, 1852 bp, Cannabis sativa
ttcccaagaagtgtgtgagtgaggacaaaatatgttggaaacactcgtgttagtttgtagggtcagtcatcattccatgaagcaaccaaagtgacgtattcgtgtagaagagccaccattctatgggtctaagggcccaacagaagcttgaagcggggacgttacattctaaaacccaagacaccacatattttcagcttgcatatattcttccacgcaacaagagaaagatatttcttcccattcatcctgtcgatccaccaaaaatgcctagtggttttatcgagctcagaaagaataacagtaggcaatttcaaaattgacatggaataggtaggaagagcttgaaccacactatggataagaataatacgacctaattgagagaggaattttgccttccaaccttccatacggctgactactttatccataacaaacttgaagtctttacaacagtttccacgaacaaaaagagggtttcctaaaaatttctcatcccttcccatgacatcgaaatccaacaactcaagaagttcgtcctttagttgagtattggaattattggaaaaagtaattttggatttgttaatggtgagttatttcctagactagaggcaatacttttccagacaatcaagaatcacacccatagtttgagcattcgccctcccaaaaaggagagtatcatccgcatacatcaaatgtggaatagacgacccccttctagagattttgaccccttccaacagaccacaagcctccttagcatacagaagcctcgagaggacttcagaacacagaataaaaatatatggggatagagggtcaccttggtggattccccttggagggtagaaagttttggtgggaccgtcatgtagaacatgatcatatggataaacttctaattgaacacaatgctttgaggacagtttcaatgaagttccacttcaatctgtcataagctttagacatatcacatttgataccaagataagcttttctccctcttttatgcttaaaatcattgataacttcctgagaaaatatagagttttcaacaatccatctacctttgacaaatttcgattggttaggcgatatgtgattacttagaaccccacaaaacctatttgtaagattcttggccacaatttcgtacacattacataggctaatcggcttatagttgtccaaacatttagtagagttctgtttaagaatcaaaaccaggaaggtgcagttaatctcagagacaaattggcacgaacaaaaaaatttttgcacaaaaattaaccacatgatccccaacagtgctccaatacaccttatagaatttggcaagaaatcgattgtggtctgtggactttaatgggggaggtccaaaaccacttttttcacctcctccacctctaacaccaccataagaatctcattctaattctcataaatgaaaccttgaattatatcaaaaatttcttgagggataataggattagaagaatggaacaccttggaaaaattatcctataagtaagaatcaatgtcacacctctcctcgattcaggacctttcattagtgaaaatggtccaaaataaaattgcatcatcttctaacaactacggaagcgtgaaaacttagaattcctatcaccctttgcaagcgatagttctctaaattgcttattccaaatcgattcctgtctaatttttattttttcaatttcaagtaacagattcctcgaattgtatagtctcctacgaaggcatcctattatggatttctaccaaaatattttacagcatacttagcttagcctttcagaaactaaaatactcgatattccaa

SEQ ID NO: 26778 - DNA, 3169 bp, Cannabis sativa
aataactgaaaagctaactaacatctctaactaaattaacggaattggtacccttaacatactaataatacatacaatatcaatcaaagctctaaatttatatgaatatttttaatatcacgtgtataaaaaataaaattcaataatcacaattaatataattaaccctaataatctaacatagattgaggctcatgataccacttctgagaaaataaatctaaaatacatggatcttaaactcatgtgagatcatcaaaattactctatatgaatcaataagatggaagacatatagattccatgctattagacatgagatgagatgatggttatatatatggtgttccacaaactaattttttctctatgagatctcacttaattgatggaaatagaggagaagagtgttgaaattagtcttgacactaaatcttaatgttctttatgtaacaaattaattagagtcccataaaccttaatcacacttattattgggtattacattataaaatttataccaaataagatctttatcgagctcattgaattagatgactctttatagcttaatttaaaatattaattcaagtaaattatcttaatttataaacgaccatattaaattattaaaaataaccaaacatataaaactcttataaataccaaaggattgaatgaggccaaagcacctgggtgtgtactacataatttttctaatataaatatagatattttaattctaatggtcttgtattaattattgtcttttcagtatatgttcatatatgcataaaagaagaagaactatttaattaaaagcatcaattaatattattccttgcattattgcatatatatatatatatatatatagtaatctactaagctataaacaatcatctaaactaggtgtatctaccctatcaagaaaatggattacacacgaaattaagaccaactattttcaaataaactcaataatttccactttatttctcattcccctgcaaatttcaacatggcacaccaagttttgtcccttacttgtcttacatacatatattatagtaagatgatgatcaaaatatatataaacccatttcaaattgaacacatcattttcacctacgccatatatataaataatataaggaaaacaaaaaaaaaaaactaataagactaaacttaattgatgggaaaattcatgaatttttctctttttagttggggagtgatatgtatatatcttttcaacttcgtttagtcacgttagagactgacctaataaatatatgtatattgcttttgtgtgtggccacaaatcaaaaagatcttttcaatcgcttttcctggtctttcttctccaatgctaatctactttaattgtataatatatatattgataataaataataatatagagcatagaatattttatatacaatactataattgatgaatgttttattagcaaaagaaaaatatttattcaaataactactgaacaattaattatatatttaaacaactcaaatatatctctcttttttggtgagatttaatagctaggatggatatttgttaaattaattatacaaaataataaagattaacaaccatcttttgatctttagtaacttttggtttggcaagctataactctttaatatacattaacatgagtagtatacataatatacagagagaaataataatggattttgtcttgtaaacgtatgtatttcgtggtcttcatcacaactattgaattaaaattgagttaattaattaatgtttagatgctaaaattgatcaaatcgagtcttagaatatattccacatcttaatcaaatttaatgtttattagctaattttcattgactctcgattataacatgcaatgaattcatgaggtctttatcatttatatgaaaaagttagttccattattatggaaaaataaccaaaaatattattattattattattattattattattattatacagaacgtgacaccaaaataattctcaaatttattgaataaataattttttttttgaaaacattcaataaataatattttgaatcgtatatttttgtgaaagttctcatcaatttttctattttattgaaagaagaaaaaaataattctaattgtaccaaatagagcataatggtaccataagtaattttagccttagtacagggaagcgaaagttcagtttgttaagtataaattttattttatttttaccgtttaaataattattatataaatatcaactttcaatttgtgtttagatatcattaataacaaaaaattttgagtaaattaaaaattatataaattatattaattttaaaaatagcttttcaaaagttcttttggaagaactacaaatcttaacttctttcaaaatgacttttaaattaaaaaataattttttttatccaaaataaaaaaaaaaaaaaaattctaaaaaatagtttaaaaaatttaaaccaaaccaaccattatactgttatatatattttaaatttgactaaaattagactagggtaccattatattttattacaaaacacatgattcaaagattgattgatcataattttcgtaataagccataaaatttaaaataatatttatccaaaatttagctttattaatttggataactaagtatataaaaagtgacaagaaagtccatttttgtaatagtgacttgtgactatacgattgaattaagcctatgcttttagccattgaatgcgtacaactactactaagaaattttggcaaagctggaatttttgatattattgtaaatgtagatggtctttatcaaaaaagaaaaaatgtagaaggtaagaaagaaaagtgggtgggacccttataaatcttaattgggggtctaaatagaatttgggacccattcagatatggaagataagggtcatttttggagtgaatgcattatatatgcatatggcctagtgaatagtgtgagtgaccctttctttctcgtagctacagccataaagaaagggttacttacttagctatatatattagctgtatgaagggattcaatactccacttatctaccttaccgaggtcccattgccaatacatgatcattactacatcaattacttaa

SEQ ID NO: 26779 - DNA, 6453 bp, Cannabis sativa
gtgagtccaaatcacccacataacacatatcaacatttctaattcttgttagctgagtaatgttgaaagatgaaaaaaatattcaccactaaccatacaacgtgccttcccgaaatcaattggaaagttgaattgcctccatacagctttagcatgtctacaatggaacaatacatggcctatcgactcccacgattgtgaatataaagaacaagttgcagaactgagtttttttctttataaagagcaacagccaccgggagagagttatgtattatacgccacgccaaagtcttaatctttggtggtaattatatttcagattttgaaaaaatttccaccactctttatgggagcttaagaatgactctttctcagcatcttctaagtcagtagctaggtggaattctgattttactgtgtacgctccagctgtagtatggttccatataagtcgatctaaacccaggaaaaaactaaaaggattgaaagaattcgatcaatgccaatttccttaaagtgagcttttaacaaggatgtattccattctcttgtctctattatgtagtatgaaacaggaagagaggatggtcctcaataggagagaggctgaaattgtctatggccaggtatccatggttccaacccagcattagtatgcaacccattcaccactttatactgaagccctttgagaagtaactgacgaccgcaaaaaatttcttgccaagttagagatggagaatgaccaatgtttgattccaaaaaagatgtatttgaaaagtacctgtgttgtagtaaatgactgaaaagggaattgggcatttcaaagatacgccatgcttgtttagccaataacgcttgattaaaatgcacaaaagaacggaatctcataccaccttcaaactttgatttgcacaacaatgccatttttgtttgaaccctactaaaaattagccatcatagactcaagttagttatagaatttttgaggtatcttgaagcaactcattacatacgtaggtatggattggaccactgctttctaaagaacctccttccctcctgtagaaaagagtttttccttccaagcattaagcaatttccaaattcgttcctttatagagctgaacatttatttttcatctcttctagagtaagcagggagcccaaaatatctttcgtgataatcacttataggcatgttcaaggtttgatggaaaaattattgagttgcggctattgtgtttggcgagaaagacataaccaatttttgggtgttaaggagctgaccagaagctcagttgtaagtatcaagaacataatgtatagctaaggttgatgtgttagtggcatggcaaaacaagagactatcttctgcaaataataaatgtcagattggtggggcatgccgtgtgagacgaagacctttgagattaccaattgattcctcatgattcaacaagcgagataagccttcaaaacatataaaaaataaacaggggacaaaggatccccctgttgaagtcctctccttagtatggcgttcccaactatttcactatttaaagaaaaggaaaaacttgttgaagaaaggcatttcatgatgagagacatccaacgttcatcataacccatcttacccatcacaacttcaatatagctccactcgatacgatcgaaagccttactcatatctaacttgagtgcagataaccctttcttccttgagttttatgtttgagatggtggactaactcaaaagctatcaagatgttatcagtgattatgcggttagatagaaatgcactttgagtttttgagataacaaaaggaagaacatctttgaacctaaaaaccaacacttttcagatgagtttgtaaatgacgatgcacaaactaatcatccagtagtcactcataccaacaggattattgatttttaggattagagttatgatggatttattcagtaaattcatatcttgtccatttttaagaacccccaaaactacctccgtaacagaagggccaacaatctcccaatagttttgatagaacatggctgacattccatcactaccaagacttttatccggactcatcgatttcaaaggcctagtgtatttcatcgggtgtaaatggccaagtatgttttgaattcattgcagtcgtaaccgttgttgggatggtagcaattgtttgattaaaagatatggtgtcaatgggagaggcagtgaatagttcttcaaaataagatgtaataattgttgtcatttcctcctttgtattttgagaaatacctgttatattcatgagtgatgttattgaattattttgttttcttaatgtatcatgagcatgaaagaactttgtattttgatcatcactttgtatccaatccacccttaatctttgttgctgataggttttctcttgtgctaataaaccatcaaggatagactctgatttttttaactccgtcatggtctactgtgttctggtgcccaaaatattgagatcggtgacttctttctgcttttctgagatttgctgcttcatattctaatacttgtgactgtgacaaagttgtaaggaagatgtacaagcttgcaaattgttgagtaagagatcaatacccattgttgaagattctgagttctaattctgcttaataaaactagcagcttcatcatctcttagccacatattttcaaatttaatacaagtttgtcgcttaacatgatcaattcttgtgtgttttttttaactgtaacagaaatagcgtgatggtctgatctatagtagtccaaatggaatgttgttagtcgcttaaagcttgttaactatttatcattgatgaaacaccagtctagtctctctttgatagtatctgccttgtgtcaatttttaatccaagtgaaaggatctccaataaaaggcagctcagtcaaacagcaataatctaatgtttcacgaaaatcctccatttgagattcacatcttaaagcactaccttgcttattttggttggagagtatttcattaaagtcaccaatcactaaccaaggtgaaagtagagcaacatctcgtaatctcttaagagtcatccatgaatgacaacgattactttgtttcggagaaccatagaaagcagtaaagtgataagtgggaccattgccaaaagcaagataacggtcaaacatattggaaataaaattcagaagaattacattgacatcatctttccacaacaaaagtaaaatgcctcctagacctaccctggggacttcaagtccattattaacatttaaagcttgtctaaaatgagaaattacattagaacattgtttagtttccaccataaataatacatgtggagattgctctttgacaagaaaacaaagatgccagaatgcgcttagaatcctcagatcccgcgcattccaactgatgattttcatggctgattgtggggctgagactcaaccaccgcagatatgtcaaaaaaaccagaattggaaaatttctagctcggctcctccccagcagacaaagttggacaagattcaggttgctttggacccctgcatcgtttaagaattttccttgtggagatgttttcaggtagcctttttaataatcgatttggagaactattttctttatcaacattctgccttaatgttgtgttaatgacaacatccgtagttgtgccagggttcatttttgcatgatgaaaaccagttccattaagtggagcatgaactgtggttgacataggaggatacgttacaatggtgttgtggttgataccaatgtctggtatataaagataagtcaaatcatctacattcgaaattgcaactgctggtgtaggtggatctgttacagatggagatgaggtcgagtttttggtcttcataccaaaagtattatccactatatttgttagtgttgctggtgcaaacagaccttggtggtagttaaagaattaggagtgacatttttgtgagcatttgtcatggacaaagttgggtcagttatgtttgcaacagttataaccgaggaagaagagtcattagtggagggtactgatctgggaataattgcctcaatattaatattgtgtttctgtttagaagaatcccctggtaaaagtggccaaggatgagatgtttgtctatttgaaagccctggaatcacaccagttaaagaattacgagccaaatgcgtgagaagtggccaggcatttccctttgaaaaatttgttctatacccatcataaccattatttggaagtgtagcccctttcaattcaggtccataaagtagttcaggttcgatactattgtcaattttttccatccactctagacatttctcataaggatgaccaagtctaccacactccatacaccattcagggagcctttcatagcgaaattccacccaaaatttatcacatacttgttgaagtttaatgttacgacccctgagcagaggcttagtaacatccattttgatacgaaatcttaaaaatggaccccaaccttcttccaccgagtcttcatatactttcaaaaaatttctaatgatgtttcctaatgctttggccaatgttttagacttgctaagaaaaggaagtctataacattgaacccaaaaaggagtgcagatgagatcttcaggtgagacattttgtaaagcacttggcgtgtataacacaatgtgatggttttagaagtgaaatggctcccgaagaagtaccctatgtttttctccttcacatccaaaggtaagaacaaaaagatcaggcagtttctcagtgattttcgtgtgaaatctgccattccaatgatccttcatctttctttgcaatgtagagagaaaaacaggtttcgttgtgaggatttgagtaaccaaaacattgtccagaccaattgttcactcatcttcatcatccaggagcagtgttgaatcgtcctcattagtgagcttcatcgtgcccttcattttgtttgtaagtgggttcatgattcaggtagaaggaagcaatgaaagggaaggatatgaaggaaaagaagggacgtggaacagttaatgggaaggttatggataaacaaaacacaaagaaaaaaccagaaaaatgattatagctacctcagagcactaacacggcagacactctcatatttcattcttcttaaatattttggcgcaataattttatccctaaaattttgacaattataaaattttacccttcaaaataaaaatgagaaagatttaacattttttagtaaatcttaataaattaatttagatcttaaaaaaattaaaatttttaaactaattaaattatttaaaaaattatttatttttttattaaaagtttatttacatatacaaaaaatatattaaatatttataaaaactaaattttatgggaacaagtttgagtatatatttttttttgggggggagggggggttttattttaaggtaaaactacctaaaataaacatttatagtgatacaaggaaaaataaatatttatactatttaatatttacaaacatactatttcttaagttaaaaattttaaaaatgatgttgagatataaaattgaaaataaaaaaataaattagacaatcatatgaaagacacgggcaagggggacaattttcccacaggtctgggaattaccccaaatactaccacgtggaaaagtaacaaccactagtactacctatattattcattttttttttaaaaagaaaaaaacttatttttccctaaaaagtttagggtgattatatttacacccgtaaatattataactgtaccccattactaaatttaccccattaaatattatttttaataactacaccccatcctatttaccaaaatggtattaaacagtaaaccccaaaactactttttagatttttttagaaaataaaaggaaaacctcaaagaatacttccaccattgttatgtacaagaacactttgcacttggttaatggttcaccaaatcccaccaaatttcgcaacaaatcgcttgtccaccactcccgctctaccagaaccttcgaagaaccattgccgtttgatgactgcgattatctcatgttgagtttcagtcgtcttcttcgtgtcattggtctcgttgaatagttcagaaaaatatcgatacattgctcaccatctaagactcatttttttcgttaattttcctcattttacactaataaaaataatcagatcaggtttttgtttagaatattaagagatattaattgtaatagtattttattcttgtgatttttttttttgaaagtaaaatccattaatcaacaaaaaccatataatggaaaggcaataggcatatctgccatatattattctagtaaacggtatgtctctaacgaataggtttttttt

SEQ ID NO: 26780 - DNA, 1772 bp, Cannabis sativa
  modified_base (106)..(121): a, c, t, g, unknown or other
gagtcacatggagagtatcttgaaatgacaggggcaaaattagtacaatgtttaaaaaaagaggtaaaaatgatagactttaaaaaaaagataaaaataaaagagnnnnnnnnnnnnnnnntatagagtgtaatttcctcaaacccaagacaccccaattcattaaaaccaaatgaaaggaaacaattacaaaaataaagacaaatcaaacaacaaaagtacaactcatgacaatccaaatagttttttccaaaatatttggtagtaacaaacaacaaacaacaaacacattacatggtgtgggggtgaattagttttattcttattttatattaaagcaacatatatcttaattatataaattgccccactcaaatccatgagtacatgatgtaattaagcttacaatttgaatgcatcaatgtgagattttccattatactcacgtgaaaacatactcttgatatagtctttactactcattgttttgtatatggcaggattttgttgagtgattaagctgtgtgaagggcctatttcacaatcttcatttgaattaagaaatgtggcaatggacattctttcatctgtagagttcactattgctctgtgctcattgctaagatatattccatttgttataatctgcaaattacatggtagataaaaataattagttaatgtaaaatatagttacatataagaaatgtcacttttaccagcgtagtacgtgaattttgcaaaaatgcaatggtaaaagaagattttgctttgtcagtgcaatacctaacttttaccaacgcaaaaataagctgaaaaaactcttgtttcttgtgtagtgttacatgcaaataaaaatatattgtatatattgtgaaaatatataatgaaatactaatttttattattttgtgtattatgtatattgtgtaaataatataaaaaaaataaaaataaaaatacagagaaattgatatacggtgtaacatatatatatatgtgaggtaaaatagaaaaatgaactacttaatgtatatatttgttgagatattttgaatgattattagaaagtcttatcacatccataaattgtaggaattttaattaatactatatataagatgcatgaattatttctcttattgtcaattgattttaaaattgaatcacatgtatcttattataaactcaccttattcagcccatgttaaaagaatataggtggtacttttaaaaattactcaaaaaatatatgtattttttaagatttttttttcttttaaacccttagattggatggaccctaggcacagacctatagcccaaagccaatcctgtttcaaccatacacttctaaattttaacatgaagaatagagtagaaaaactattaggatcgagttacctctagtagatctccaatattgacaatgaaagcatccgggagaggcttgacggggacccacatgccgtctttcttaacttgaaagccttctacttggttcaattgaaggagaaaagtaatgccagttgaatcagaatgaggggctataccttcaacttgctctggttgaaggcatggagggtagcaatggatactcattgcttgtaatccatcttcaaataaattggaaatttccttgctttttgttcctagagctttttccatttgagagattataataatggctaactttgcaagttctgatgaataaacttccaaactttccctacaaaatgaataaatatatatttatgggtgagtattcaatg

SEQ ID NO: 26781 - DNA, 2261 bp, Cannabis sativa
tacagtacaaattagcagcaaagtttgtcataacataattataaggagatggccaacttcaatttcctaaaaatataattattctatctttttgggtagttaaaaaaaattcctttaaattgtttagtttcataatttgtaaatataaaagagaacttaatctgaataacagtagaccagacacttttgtatgttctctgaatttagatttatctaggaatttttggtcttctgttttcttaactaaataaaaactaaccaattcagtttctttcacatgggtaatatgtttattaactttcaaaatgccagtgatacaagttgctttttgtacacatgtggtgtgtaacttcatgagtgtttattttgttctaagcttcaattttgaaaatgaggtataattataaatagtatatataattaaggtatatttatattttacattagatttttataattattttgttaatagtgtgtagttatgttaaatttccactattggattcaataaaatatggcaattagtaatctttgaatacctctttgagctcctggtttatgttccgtaatttactcacttgttttattgctttcactctaatcaaagatctaggatcttgcctattgttcgtgtcctacacgcgtatgtaagatttcaattgctaactataaatttaaggtagacttgtaagatgtttgatacccttacaaaaaaccgtcattatatttatagacagtgtttggcaagtagagtcttctttccagactttttatatcaccattactaagtgaacgtgttggataatgtactctaatatgatttagagagtattcacatattttattttcattttatttttcacataatatagatactattactatataaaactatttgctttatagctaggttagtattagagaaaacttattcaactaatgtggtactatgaaatagatatgttcttcattaaaatctataaaaaatgattgataaacccctaattgaagctgcactacacatccagtaaatgacacatacatacagtattattgcagctaatccttcttaattaaatgcttctaatcgaaaaatcgagttaattaattaacgcgggtcttcgtgattccctttgtaaattctggtttcaataaactggtaaaagttgattgtttggtgaaagacaattcaatctgcacacaatattactgtgtttagattaaagttgagtagtaattaataccacattcaagaagtaaaacaatcagcctcaaaatatttatttatccaagcaatgcagcaattaatatcaaatctcctagaaatgaaagttaactttaacataccattgatttgaatctataaatgtgttaaatacatatctatctttctttcttgtaacactgcatagccaaaacttgttgatgaagattgtgacagtcagtagtcccgtgatctgtaagaaaaaatactaaataagctgtgttatttcacaccgcttaaagaaagtcaagtgtgatgattctgagactgtgtaggtatgagactaatttcagtatcccatcacgaaaaaacttcacggttaagcgtctttgacctgaactaatttcaggatgggtgaccctcttgtataagagccatcattccatgagtgtaaaatcccaatgaagacttgaagcgggatgttacaaagatgcatgcctttatgtcatccactttatgcacagctgcaatatcaaataataaaatgatacacattctgttttaatttagtcaaaaaataacaatagatatttaattaatgtttgtacctcgaaatcttctttgtttggatctggaaataagttcaagagttgtatatgagaaatcttatcccaatcttcacctacttcctttttgcatctcttcaataacataagactatcactaatcctaacatggttcaaagaggtgaggcttcgaattccttccggaaatgatgtcaaattaggacattttgcaatctccaagtatttcaaagaggtgaggccttgaattcctttagggaatgatgtcagattaggacatcctcttaactcaagttccttaagtgatttgaggttgtcaatccattatggaattgttgtcaaactatcacaatacctaatataaagccgttgtagacttgtaagatgttggatacccttaggaagattcgacaatgaccatagtgctaatttgtggagtctttcagttaaggctttccacataatttggtcac

SEQ ID NO: 26782 - DNA, 1318 bp, Cannabis sativa
ttgctttaaagctctcactctagatatagtttacttctaatgtgatcatggaggactcgttcaagaaaaagaaaatgaaaagataacttcttcaagttttaggttagattttttatggggtgtacaatatatctaagaaaaaattgtagattgtttaagacctatatttagaattgaatggggttagtaaaaaaatatggggtgcatttagtttggggtgtggtgatcaattatgggggtgcaaatatactttctctaacaaaaattgtaagaaaaaatgttagtttatttattattataattactgtttgtaatgttattttgcaatatattatatttattaaatcaatgtttcaacatgtttattaagtcgcacatttttgtaaaatttatttaataagtaataaatagttaaattaaatatttttttattaaagagcaaatactatttttttataatttaaaattaaaaaatatgaaaaaaattcaaatgtatttatttatttattttgaaaataaatgtgtgttattatattattataactaatatttgtagtaatattaatttttttagactatttataatataacatgtttataaaaaatttaattaaaggttagaataaatttttacaaaaatacatattaaatattttttattataaaataaatattcattatcagttttattataattaattataaattaaataaaataataaatataaaaataaaaattataaaaaataatatatataaaatttatatgtaacttcattcaaaataatttatgaaatttttattattattaacacttatattataattatattttagtgaaaagattaaataatatgaagttgaatttgggataacataaaagttagatatgataaaattataattaaattagtaattagtaataataataataataacaaaattaaattaacaataatattaattatatgcaaatttattatgtattattatatatattttgtatgtaaacatgagaatatgcttttaatggttaacaaaatgtatataataaattgtaaataatgttttttcatatatattgtaattagttaatataatgtacaaatgattcttttgttcaaatttgctctggaaaggaagggtctttcgttgtctcctttgaatgatggggggtggaactgtgagcgttgaattgcacctttgttaaacaaaattaaagttaatgttgatggggctttatttgaacaagagggccagtttggaatgggctgtgtagctcgagatcatcatggaaccatggtagaagctttcaaga

SEQ ID NO: 26783 - DNA, 5302 bp, Cannabis sativa
  modified_base (1061)..(1072): a, c, t, g, unknown or other
cataccctttaagtagataaattttgacctagaatttagaaagcaatatcttctcaaaacaaatatttagtagttacaaagggagtctcattctgtggagaatgattaaaaaaaagagttctcttctcaaagtaacattttttttatagctcttccaaatatatgtattattaatatttttttagtctttgcactatattgttatgcaaaatagagaacatacaagctaaaattgttcaatgctactgagaaatcggagacaggatattggaaaatgttaagggcaaatactgttattgatatattttaatattgattcttacttattttgatttaataaataatataagaaactaataattaattgtaagatagtttaattgagtctcgaacatgaataattgttgagaattgacatcaatgttattttttaagttagcaccaatgtcaagttttgacattattgttattctttgacttgcatctctcccaatattaacattattgttattctgattttagttacagtttagtaaacgtgttataagaaagatcaaaaatttgaatgaaaattacttgttgtatggtgtaaatgtaatggtatggatgttagttcatttattggcatcttttgttacttgagtcaaggtttggaatctcacaactttttattagaaaagattatgtttggccttttagaaagttagttgattagttttattcttctaagggagttgtcttatttatagatgtatattccttttgatgagaaagatttttggaaagtgtcataattttggtttgtctatgaactatttcacaatcttcttgtcttagaaacctttgggaaaaaagaggtgactagtggagaatgaaatggccactgtgaggggtggtctttatagattttgctattatgtttttccatttttatcatactatttaagtagataaattttgaatctcaaaacaaatatttaatttaaagggagtctcatttattttattacatataaaaaacaaaaccctaaatcagacctttctctctctctctctctctnnnnnnnnnnnnatatatatatatatattctctctcacacctcactcctctttgaagccgcctgcccctgcccaacgacgacgacggtgattcgctgcccagcgatttgacgacgacggagacgacagcatcttctcccccacttgctgacgacgacggccatttcctccctaagttgccgacggcatcttcatcaacgacggaagcgacacagctcctccctctctagcgaagacacatcttcttcctcgcaaacggcactaactcaggtcttttaactttctcttgtatttcatttttcatagttaaatccaaaaaacctgtgacttaattagttcatttttgtctaattaattagttgatttagtgagttgaaaaatcaggatacatattagattgtgaattatgtgtttttgtgtttgtcagatattaatttgatgaattagtgtcaaatttaagtgttttctttagttttttttgtattatatatatgtaaatgtatcgtattcctttctattctaatcagtttctaagtgggtttcctttaattatatgataatcacctttttttaaattatattcgattaggttgaatttatattgggttgtaatattttgaactaatttattagcctgaaaaattaggttttacttctagattggattggatagatccaatcaatctaattaatattggattaaaaatattagatggatacaattcctctaaaaaaaatattagatcaaaagtattggattgatccgatccaatacaggaattcatcaatgaagcctatccaatccaatgatttattggatcggtttggttgagcctataatattggattttagagaaatccaacattcaatatataattggattggatttgaatgggtgtaaaaccattgtatgtgatacaatgaacaaccttaagtataataatacattctcatgcataacttaacacaattataactttacagtcaatcatattctctttcataatattttctgtaatcaccccttataccaaaacactcctaaatgtgatattctcatcactgtcaaaataataataataataataataagctttttaccctctgagttacacttgtagattcttgccctctgaattattttgcttagcaaaaatactcccgaactataacacttgtagatttttgcctattccgtcgaaaaactatgtggcagttaataaaaatatattttatggtatttttattaattgtttttaaatttaaaaatataagtaaaaattaattttaaaataaaaaatataaaaattaactatttaattatttatttatattatccattttagcataaaattaaactaaaataaaaaataaaaaattcaatttaacataaccaaatcaaccaaatttcttctttttcttcagctagcgtactcatctatttttctgtcttagtaactttttgttgagattgatttgagttttgatttttttatttcaagtaataagtatgattaatttaatatttcttgtttatagatttgtatttcaattttaattttggttattagtgtttcacctttaaaaaaatattttaatttcttgaatgaatgttagatataattatctatgtttgtatttacttagttctaggtattctttttgtttttaagaaatttaaaactaagttttttattaattttatagttttaaaaaaattaatattacttatcttttaaaaaatataaaaataaaaaattataaaaaaaatcataaaatatattttttttaattacgacatcagtaaatcattaattttttagacggaatggacaaaagtcaacaaatgctatagtttggggtattttttccaagcaaaataattgagagagaagagtctacaaaaagttactcattagagttagagaaaaccctaatcgcatccaactctcctaactttctcaataggtgcggctttgcctccttctccttctccgattcagccctccctccaggtatatatgcgtatgtataacttaaataattgtttttcgatatatgaccaaatgcatttttattttactaaatgctaatcatgggtcttttccatatgtttaaaattccaaactataattggatttgatgaaatttaagcaaaatggttggtttggattggattggaaaaaaggatgaagatgagcacctaaaaatggttgaatttgaatttgagttttctttttggatatttctgttttaaaacaagggctgatttcatgtttagtttaatatgccaaatgatgttgggaaattgcgcaagggctttgattccggtactttatcacactggggttatgagaacaatttcacaccttatcccttctgatggcaataccacaatatttatttttttttaattttttttttcctttgaatggtagagcctatgggtggtaaagttagacatgagattcacatcataatatgcatcattgtcttttgtgctttgatgtaaatgatccagcatcccaaagctgtggcattatgtttataccaggaacttctcatcataaaagggctgggctgggctggtttgattgattgcatatctgagcagcatttttcttatgaaagctgaaactgccatctcttttaatggaagctatctataggcaatgggattttcatttagtgcattacttgaggaaaagttgtttagtgaactgcctaatgaatccttagtgaatttgttgtcatttttttttgaaagtagaagatttgtttttctggagaacaaggagggaattgtagaggaggtggtactgtcatttcttttcttttatagattttaaaaaggaatgaatatgaactcattctttcttgtatgattttattaaaatgtcatatgtttcatcttttcttatagctcacttgaggaaacaatttctcattcaccccatattcaaattgagtatatcaatcaattttcagttgtgaatacatagtgagttttacccaatatctcttaaatggtcagccatgtattttgcccccacaaggtttgaaagcttagtttagaaaagtaaaaaaaaaatacatagttagtcttactcaaaattatgtctcaaaatatttcagtttcaaaaacacctaaactcaataattcccacatccgaaaatgtatatagagtggatgagaatgatctcctaaagtgagagctaaaacaaaaagatgaaaaaggagctatttattctactttaacactatatgaaagttgcacatattttctcaccaaaaatctggtgttgacaggagtcttaacatcataaaaggatgaagcatattgtaaagatcataacacttttggtaaccatttctgctttatggattggtctgttacaggcagctattcttcctcgtagctatacttggttggtgagtttatgttattacatttattaatcaatccctttcacttgttagtgttaattaatttaatgcttagacttaaactgttaatttaatttcattttattcccagccacctatctatttcattgtctctttgggatgctatggtctgttaatggttggagttggtcttatgcaatttccaacttgtcctcaagaggctttactactccagcaggtattgaacttcttatactgttaacttgtcctatagcaagtttctatacaagtcatcattttgttttaagtaaatgatttatgtatatatatttgtatataagataaatagcagtttaagtatcgaaagttttgagtttgtacgaggcataaatccaatgatttcttttagcggcataaatactccatgtttgtaaagttgtaatttttttaagtagggcacatataagtctcagattccagatcattgggtttagacagaaacatataatatcaattatttccaaattttcttttaataaattcaaaacggagtttgtattaacgaaacttgatgaaaattacagttttataaatattgagtatttatgtcttgtataaattatgttattttatattttgtttgattttttatttaatatttggtgtcttgttgttataggacatagttgaggccaaggagtttctgaagcaaagaaatgttgatgtgggtgattctgaatgacttcattgagaacttcaatttttgttttaccaattttgtacaaaccaaaatgatccaaaagaaataaggcatattcttttataactttact

SEQ ID NO: 26784 - DNA, 3910 bp, Cannabis sativa
tcaataaggagactctagactaatgaattttaactaaatgcagctatactgaaggattctgattataatgaagtagatagagctgagtgccaattttctacaacttcaactgtacttgacaatggatcacaggtttaatggcagcttttaaatcttcaccttttagtatgtttaaacaaacatgagataagaacataacataatacttatgttatttatgcttatatgattgtttgaattgcttttatgtaataaatatggtgcagactactccctttcatccaccaaagaccaacataaatggtttcctggaatccattaaaagcctctggaaagaactgtggaaggatttgaaagatttcattactggacaaacttgcaggtatacatctcttactgtgaattgctagactttttacttttttggcatacaaatgttttatcttttataaccatcacatttggtctggacttaagattgcatcctttttttttttgtgtggcagaaggaaatgctatggcttttttgactttaaatgccacattcaatacatatgcatgagttggattgtgatgtttggactatttttggctatcttcccaacaggtcaacaaactattttattcccagggaattagatttctaagttttttgtaaggattaattaataacaatttccttttgagtttcagtgcttgtattactgtggcttttacaccaaaagggtttctttgatccaatctatgattggtgggaagatcatttttctgctgatgatcagaatactcgaatacacaaagttcatgtgcatcatcatcaccaccatattcatgataagaaacatcacaggaaagaattgaaacatcataagcatggagctcagcgaaagcggcgaatcattcacaatgattacaatcacaaccatcatgagagggaattagattacaattaccatcttcatcatgttcacaaagaaaaagacaagcatgggcatgttcggaattcaagggacgtgcagcattttgatgacaatgtagggaagcacaagaggagaaaagaaagagaaacagacagaggatacttaaaatgacaagatttgaggagaaagagaaatcgccttcacactcaactcaactcaaagttgaaggataatagaaacttttgataccaaatgatgatttattacttcaaagcaactattaccaaaaaaaaaacacttctccttgatatttgaatgttgttacttgttagaagggcatctgaaaacatgaagtacttggaaacatatgtgtagaatagctcttttctgagagtaaaaaatattagaatagatgtattatatatcatttacaattattgtcacagcttacaggtaaaatttctttttcataacttgttttacatatctcaagttaagaagatcatgatttttttgacggaataatatgttgattgttgaggctacttggattgaggattaaaatagaaaaaccaaaacttcaaatctgaccctgagcaaaacaataggtcagctttgatttcggagtgacaacaataagtgaacctttctgtacattgttccaatgtactgttgagtgttccagtggaagccttcttgcttctcaaagtgttatcttttgtcacttgctccaatgtacctattgaacatgaaggagaattatgcagtgcccttttctccattgtcattctctatgatttggacttggaaaccatttgggaattgtaatcctggagtccgaactatgtttcctcctccaatagtattccacctgaaaaagaaaaaaaaaaagaaaaggttccgacctgtaccggttagtctatattcatttatgtatccatttaatattaaaacgcgtttaatcctacctgtattttttaaccaaacaatggagaaatactgccatttgcaccttagtaaactctgttccaacacagaatctcatgccaccaccgaaagccatgaaatgtttagaaccaccatttaattcaatcccctaaaacaagagaaataacatgttaagaggtgtgagggatttcaatatatgtctatatatttatacatttatttatctgtatatatacttagacatagttttttccagaagctgaccttccatctccaaggattgaaagtcaaaggatcctcatattttgcagggtttagatgcacagctgggggacaaaccataactgcccaatctgctggaattgtatatcctgtgttgagaccaaatatacttttagatttaccataacattaaatggtaacattctctaaaaccatatagaattattacatatacatacatacatacccttaaactggatgtcacgtagtgtttttctgaagataccaggaactatatttgctaatctgactgtctcattaatgacctggaaattgaacgtcaatatatatattatatataaaaagaaaagaaaactcagataaaattttataatgtgtacttgtattaattcacctgaaatgtaaatgtcattgatttgtattctttccatgtaactccagagtcagcattttctctatttcttactattctttcatgttcttcctggaaaagggtagtagaattaagagtgtgttaataagggggtgacgatgacagttaatgtctgttaataataaaacggttattatagtttcacataccgttaactccttaagcactaaaggatggtctgtgagtagcttaacagctaaagttatagctaaggaagttgtttcaaagctggcaaagagtagaacaaacattagatccaaagcaatttcctctgtaagaaatgttccttgcttctgaagttcttccaggacatagtcaaaaaaatcactttgctctttttttggattagcgcgcctttcttgtagcaagttcttcagcattttcattgcttttttcctaccctgagaacaacaacactttaataggtagtttaatataataaaataacgtaggaagtaatggagatagattacctgtaagcatttgtgataagctgttccaggaatgttcaaaggaaaagagatcaatccttgaatgaaagcaacaaaattttcccttagattctcagacgagttgtttccatcataactgatcagtttctttgctgttaagtcaaagatcatctgcacataaaaaagaaaaaagaaagaattatagtaagagacttatataacaagtacgtattcttataaatgagtcagaagaagaagaagaagaaaaaaggttgttacccttgcagttgattctttcagttccaccatattttgagttgaccaatgctgtaagtttctgttggttgtttgttcgacttcattgagcattcttttgaggctttcaggaccaaaaagattaagcaccatgtttttaaggtacttatacatgaaaccatgtaaagaaccaacattttgctttccaaagatttctgtaaaggtttctggataccaactctgaaataagtgtccctcttgttgaaaaatgaagtgattaagatctgggtccgtagatatcacaactggtcttccaaccaaactggtcttgaatatggatccatacctggaccaggaaaaagaaacatgtcaaaaagaaaaagaagatattgatataaatttttccaaggaaaataaaaaaggtttaccttttcatcctttttttaatgaaaggagggatatcagaagaagtattgggactgaagaactgaagggtctctcctagaagtggcaatcccattgaacctggtggaagttttccattaatgcatctgggatttctccatctataaacccaatgtgttatgcttatgattactaaagctccaatcacaagtgcccacatcttgatcaaacttggtcaagaaaagaatgatgat

SEQ ID NO: 26785 - DNA, 5103 bp, Cannabis sativa
taaagaacaaaaataagtaattagaagggtaaaaatttgaccaaaagtaattacgaaccaacacaaggatcactaatcactgtggaattgattatatcagtggacattgtgtattaaactcagtaaatgtaattatataattactaagagttcaattccatatttatagtggagtaatcatagaattaataactaagattatttggttgatgagatttaataattaatctaatttattggagcttagtattataggtctatggtcttcggatcgccaccttgcaacactgtcaagggtaggaataaagctatataatgatttttagaaaaatctattttgaattggtaaaatagtaattatttattttgtaataaataatttattttaaatttattatttaaacaatttaggaagaagacaaagtgttggcaggacaaagacatcacccttatctggttaagataatgttagcactcgtcatagtgtaaggacacaattatagccgcctatccgataagatggagctcacgagatttcttgttgtattaattaattaattcaaatgataaatacttatttgaatttgaatttaaaatttagttacagatatttacggtggttgagattttccctcaaaatggttgaaaaactctctccagatggttgagatattctctcaagtggttgaaagattccttcaatatcttattagtatttagtttaaactaaatattttaatttaaaataaatatgtataacagaatcagttggagatatttattcaaacattttaatatttgaaacatttatcattattcagatatatcgtagatctatctatatatatatatgtataattgagaaaacttaaaaagattaagctttttattattattcactcaaatggaaaagaaaagttcttgcccatgtgttgatgaaaattcaaacacatatatagattttaattagcccacactaatccttacgtgtggttgtagatctagaagattgcggggtgagtttatcatcaccatcttaaagataaaacttataaaacaattcgaggatgccccaattcacaagaggtaaatatatcctattatcttttgtttcagattaatatatgtacacatagtcgagcaagtgccagatttaatatatgtacacatagtctaattagactatatcttatttatgaatagcaaatgttgtttgtgttcttagagttgttcatccctaaaatcacactcatcaccccgatgggaatccgtttagtgttttattttatatttctaaataatatttcataatttgtaatttatgtttgcattttttaatatattagtatttttttatttaattacttttaagttgtgttttggataataattagtttactgaataataattaatgtgtaatatattagtttttatgtaatttaatattttaatatacataaatttttattaataccttaatttttttatgaggagattctccgctctgttcctattcttattaggggatttttcgctccgtccccatccttattaggagattttttgctctgtcccaatccttattagagaattttccatggccgatggaaaataagccagaatggtgattaaaatttttaacggggatggggacaaggagagcactccccaccaatttcctgccctgtgtacatccctacaaataatgtttaggtgattgtttaaaattgtaaaaagaattagatatccccaacaattttaaatagtcatgaagcatccacgacagtttattacaatcacttaaaatttggcaagattttttaattagttatctctggcggtctaattgagaacaattcagctattacctcaaattcacattcatgctacataatttcaatattaaatattacaaattcataagagaaaattattatctagtctagatattaagtcaaaacaaaatatgaatatttgcaaaagcaaagataatgttatacaataaaacacatagtagcattaagaaaacaaaaagtataatttgcctattactctaccatatacaaagttcaaactttaaggcaaaattgtttttggttttttttttttcaattataatttaaaagaaaaaaaataagcaagaggaagaagaagattaggataatgaacctttctgatgtaaagggtatgtcgaagtgggttaagagatcagtttcagataaaggtcacacatactgctgaagaccagacccataaaggcaggtcctccacctttggatttagacttgagccataaatcctaacagaggaagggaacactgaagtggactccgacgctaatgaaacaccgttgacagtagatttggcgggtggtgtcgagtcgagcagagatgatttgaaggcaagtagcttgggcgtgtcaggaataagaataggaatgcagagcctaaaaggagcagacgacgttgatttcttcaggttgaatctagagagaagattggaggtggttgagttgagaattataaataagggattcaaagggaggtttggttccaattgaaaggtcatgaatgacaaatagaacaagttaattaatatatacaagagctagacagagtagaagtgggtagaatagacatggctgcaagtgctctagagaaagggtacttcaagagacaactatgggctatggctcttgattattctatttttgttattatttctgttcttatagaacatgcagttcattctcttggaaaggtaaatatatatatataatggaatattgagtttataaagaagaggatgttgcatatgtaagctttaattattaattcttacatatgtacgagcatgcaattgttcaagaagagaaataaaaaggctttgatcgaagacaatgaaagaaaatctagatacattacaactctattataaaataatacaatgattaaaataagaaatttattaaatatattacaacacatatatatacactatatatattgtatatatatatatataaaagagaggtagaagaagaaaattacaacacatgtaatataatacatatatataacaatagaagaatatatatgtatatacactcactcacaaccttgagtgtagattagtggggatggtattatacctttgtccaaaaacttatttcctcctatctttaagcactaaaggcactttctaagaaataacttttggaattatgaagctttagatttttctaccaatggaattttttgatagaaaacttctcatcaaaatgaggaaattaaactcctttttatagtgtttaggtgatcacacttagaattcaaacacaccatctcatttctctcatataaattagtattaatataatttgtaacaattatatttcataacatttgaatcctatcatcaattttgagtaacatctattttattacacaaaactaagatcatccgaaagaagttacaaaagtaattactcttataacttctctccatgttacaaagtgtaggttaaaattttaggttaaataaatcatatattacacaatttatttaccaaacacttaatatatattttcacataataatatattgttatacctgaaattcagctatgcaccagaagctaacacgtatcgtacagaaagaatttggatcaactcaatgaatataatgatgacgttatatcattaaaggcaatacaaataactcgtttcaattaaatataagttcattagagttgttcaaactcgcttactatttagtcttatgtgaaacaagaataataactaaactaaaaattgatgagacatatgtctacctcgcgagaaacttaataaaatatatgagaacatatactctcatacacaagcagaatagaagtggcaatactcaacagcctcgcctcgcattattcataatgtggagatcatctcacatcattaatgcaaatagaagagtacagtgagaaaaagtgcatctaacacttaacattctttcctattaagatggataagaaggagaactcatatttgacgaggtgcaaccttcctagtcagcatagccgtctaaatgataaagataaggagtggttggatagatattagatattattccatgtatgaataaatcaaacgtgaggaacgtccacgtttcatcaaaaattgtaaatgaatcaatcctaataaaaatatctaccaacctatattcctataaataggagcagaatctatggaaatagagacgacaaaaaatagatagaaattctattattttcaaatattaagatttgtattttgtatcccaaaaaatattcctaataataagaactcgtggagtatgtagattttaactacaaaactattaacacggattttcgttgacgataatgagcctatttttgtgataggttcagcacagaaattatcaaagattaaagaaaagtagtagcgaacgatataacactaggttttttatgtagtttttcaattaactctgcatagtccacgagtcaattttattcaaacttttctgatacaaactagggttctttacaactagtgtattcttttttctctcaaggattttccctctattttttggtataatctgcccctatttataataacatagcttggaagttaattacattcaacttcgaatcccacaataatattttctcgaaattgtgggccttcattatgctccatgtaaagaaatgcagttattatttgaaaatttcacagctgtgatttaaaccgcttttaaagggtcactgaggtggattaagatacgctgcaaaacgtatctcgctgaggcgtctcgcttggtacatgaatagcttggtttatcgatgattcttccagcaatggcatgagcaccaatgtattgagcaaacttaagaactgctttttgaccataaggccttgcagactggacaatcatgtcttaggggttctcaatagcaacaataaccttggtagggagctggagtttaccagaagtacgcattcctatagtgatatggatatctcgctatccgttatatatatccttcaatgtggcgccctaatgctaaggcacgctacagt

SEQ ID NO: 26786 - DNA, 2645 bp, Cannabis sativa
gatattttttataaaaaaattacttgtttgtcgtttgttatttttgtcagcaccggtgctttgttagaaaaccaaaggcaaaagtattcagtagccattttcatcgagtgcgaactctgagttactttttcctacaagaaacaccatttttgtaatagtgttaggttggttattaaaaaaaaaaaaaaattaagcttaaggtattattttgtactattttgttcgaatgttatttattaaaattaaaagatccaattaataacttttatataatatagggtcacaaataatatttaccattgaaaaaattattgtccttatatatataaaaaaaatgtaagaagagacacattattttagaaaacaattatatggaaattaataccatactatttgtttctattcctttaagtaaacatgtcataaaagattaaataactttcaggagtcatcaaattataatcaataagaacatcaaagaaaatatagaagaaaaaccaaataattgtagtttgaactttgaactaaaggtattcaacctctatacatggcccaagttatagctaactagtctccatttttccactagcaccaatacaactcactccaattataaaggcaaagagtaaaaggcacatcccattacatgtcaaggcctagaaagtgataagaaatgaaatgaaaaaaagggtaaacccttacatattttcaatccaaataatatgcaatgaccattattcaattgccatgattttactttgccattgagtttaaatacagtactaatttgattcttttctccaactccacttactttacattaaattcaaacatttgatagaggagtgagtggggacctatatatataaatatattgtatgagtaatgaccctctatataaatttttgagatgtacacatgtcaagtgtgagagaatacaatattacttaagtaattaaacacaaattaagtatgcctccagccaaaacattgccacaattctatatattttgctagacactagcctattccactgtctaccttagtgtagacagccttttataaaaacctaatcatccaatgagaagagagtggctcttaattgatcatctacatctagtaattctttaatcaataatctaacctaacctaaccgagtagtttattaattggaacaataatttaaagatatattaaagctgatttctacatcaaattgtgtatgtggtatgttccctttcctatccttgaaaaaaattatatcatttagtctcttgatctttgacagatcatcattattgttcacttataactaaatggaattaaaaatccattgacttgaatttccgttcctagacaaatgttattggtttggttattgagtcacatacatgcaaacaaaaaggttgaaataatagtgttgtttagtgcagacttgtgcttttttagttgtgtttgtggatttcggtgctttataatgtagcacatataaaaaggtaaaatggacaaaatattagtatggaattgtgggatctatagttctatatattgacctttggaagtggaaaggtagtgacatatccaccatggttgtagccactagctcctcactaggaataaatacactagttactttctacttaaaatctagagacatacaccttcaatttcaatggcttacctgaaatttaagagagaaaaagaaaaaaagctagatttcacatggaaaaattagttttgccaaaagggtatatagaagcctatagttaaaaatagagaatatattttatgaaagaaagatacataaaacccaagtgattttcttctgaagggcttttagtaaattttgttttgagtggaaaaggataatatacaaataaaaacagctataagattagctgttacaattttctagctacataaatgtaaaataaggttcataccttgactttttttttttaaaaaaaaaaaaaaaaacaaacaaacaaagataaaagtcacaatgtttatgtcatgtggaaaagaaaagagatgacttagtaattaggatgatctcatttgacattcactaccttttatttgtttattttatcaacaagtttgtacaatatgtgtatggaaggtttgttttttaggagtatgcttttgtctcaattggtaaggtcctttttgtttttagtactaaaataattttataatcaatatgatcaatatcatcaatatatataaataaaagttcacgtaggaaaaaatagaaaaatacaaaaaggaaaaaaaaaattacaaatatactataggccgaccctttaaatatttatacacatacaaatatttataagaataccacctcctctaaacctttagccgcacgaaacagaatgatcaagaacaacagccctcgatcgttcaaagcagcaacacaaccgaaatgaaactaaatcgtgagaaagaccaccattaattccggcaaaatccactagaaaagaagacatacgatctaaacggaaagtgatgaaaaacaaaccagaaaaactgtgaagaaaactgaaattacacatttggttttggttttattcgatcaaaacaactctccctaatatcgaagtctagattcatgaaatgtagatctctaacaaacagattta

SEQ ID NO: 26787 - DNA, 5014 bp, Cannabis sativa
  modified_base (1414)..(1418): a, c, t, g, unknown or other
  modified_base (2758)..(2776): a, c, t, g, unknown or other
  modified_base (4652)..(4654): a, c, t, g, unknown or other
cacaacgaccgcaagggaggccccgtggttcacgaactagaagggcacaagaaccaaacctcaaagaataggaaccaaacaatcccactcatccccaggagaaataaccaggggaaacaagggacattcctattgatgggtgaggccctaaaaattagggagcgacaactttgtggcaaacgcgagcaaggggacaataaacatctcaaagaaataatgaaaatgcgaatgatccactacctaactggtctagtcgtcatccacatccaccacaaggacgtaggatagaagaaagagaccgtatatatacatacttgatttgaggtagattcactaacttatttaaaaggcgaagacctgctcgagaatcaccacaggaatcagaggctaataagcccaaagtagatcaagtagtcaagggtaaacttgattctcaaggtcacgcacatgggaaaaactcacggcgtggggagagaacaccgcgatatgaatatcaaggcgagcaagaaagtatgagtaactttcaaagttactaattagaaagtatctccccaagtcaatcagtgagcagttacaatcggcgccaaaaacatacgtgatcaacctgatttgcgagaccatataaatcgaaggcgtcttaagtccatccagcaaaggataattcagttggaggatcgatttaggaaatattaggatggatagtatggaatgcttccacgctttgattcaaacaaagacccaaaaccttttcaccctaatattttaaacttgcaatttttgaaggaatttaagagccctcatgttgtacaatacagtagaactacaaacccaattgcacatttgaataactttaatactataatgcgagaaagtaatgtttataatagcttgtgttgcatatttttccctacgtcgctaataggggcagcgagtagttggttcataaccgaagccaataatcaattagcgtcggttcataactgaagtaaaaaatatcaatatttgtgtctacaactatagcgtcagttataccaactgaagtaaattgtttatacgtcatttaaaaaccgaaacaaaaatccctttttgtagtagtcactatcagttcgcaagatctttaactatttaccaatgttagaaattcatgaaatttctcaaaatatttcaattttttttttgtataaggtatattctagagagattgcctaagaacttaacaataactcctatccactcttgaatgtacatccataggcttgaatacagatgatcttacttcaaagtggatattggcttatttatccttccagagaatgatcttgtcaaaaatattatgaacaagatgtaaaagccatagatatattgttgtggttatgatcttttggtgattcttaggtctagttacaacaaagannnnntagaatagttcaagtggattctagtcacagaatataaaactcataatccatacatttaacatacaatttagatctattgacaaaaaataaatattaacaacttgtgatagtcaggccttcgggtttgtagttttcttcccgagtttgcttgaatcttcattatttctgatgatgtaaaagatgcctaaaaaattttgagaacttgattggaaacaactcaagttggcaatatgtcaacctagacgctagcccagtgccaggtgttaacctggaccctggtcccctttatggccctttagaagttttatttggtctcgagaaatagttgagtgttaatctttactaaaacagagaagattcttgaaagacttcttagaaatcatcatcaaaatcggtccaagttgaaaaaatgtcaacctgggcgctgggccagccctaggtgtcaacctgggcattgagccttgcttctggcacccaagaagtgttggttcttccctgaaagtacctttttctctgtgtttggcgaagacaaagatgatgcaaaaattggatcatcgatcttatacttgtaaggtgcccagattgataaattatcaacctgaacgttggatgcccgagcatcaagtactcaaaaatcaactttctctgaatatgatattgatgcctcaaatatgcatgtagtattctagttcatgtcccaatgcaaagtttgacccattcgcactaagaaggtcctagaaactaaagccttagttgagaatgtcatcttgggcgctacgtgaaaccctaggtgcccaggttaaattttgggatgcaggttcatgtaattttagctcacggaacgtgaatttgattgctccatgtcttcatggtacataatactgaaaaatagtgagttgaaaacgggttatcgaagttcaaactgcccccaaaattcccgaagtcaacttggacgtagggctaagaacccctcccaggctgacttgctatgattcgggactactcaactctaagaagtcatctttcttgccacgtgtcaaacattgatgtccacatcatcaatgctactttgatgtaaacagaatttttgtaaataaaaattttaaatcgtaaaatgataaataaaacataaaaatagagtattttaaaaaaattcttcaaaaatttatttatttattattatatatttaaattaacatctaaattttaaataaattgataaacaatatcataaatgtatattataatctaagacattaatatattataataaattaaaatcaagacattgttgattaattgtaaaatgtaaataatccaattattattattattattannnnnnnnnnnnnnnnnnntattattattattattatttaacattatttctcattaaaattataattaatcaaatgaacattttcataattgaccaaatatatagctatttaattatatgtaatttcggatcacctaaataatttgaatataaaaaaatattatttcacacaaaattttcaataattgttaaattaagaatatgtgtcaccgctccaaaaaagaaataaaaaagaatatgtgtcatctagtgctgtaaatatgagctatagattttttgacacagaggctcaagcatgactcgatttgaaaaaaatatgtgtttagacacgatacggcgcgatatgaaaaaaatatgagtttaagcacgacacgtaagcacgaataaaatagctcgaaagcataacacattaaaatgtccaataattaataacaagaacaataatgataaatattaatttctttagtaattaaaataataataatatttaaattataatatttataatttttttatatgattatgtgtaactattatttaaaaagaaataaaagtaattaaaactataaaatatacatatattttagtatttaccttatcaactataataaaaatacaaaatatagagtacggatttgagtccgtatgaaaaaacaggttggtctagttaaaaaacttaagtcagttcgaataaagtactacctgaacccgacatatatcgtacgaaattattagcttacaggtcgtatcggacttatcctataaaattgttgcacgacacgattcatattttttataacacgattcatattttttttaatagcaaggtatgatgcggtttatattttttatgattcggtacggtacagtctatatttaaaaaacaaaaaaaaaaaaaatatagaccgaactaacataatacataattacaatatgatctaatattaaattgcataagaatataatgagatcttaaatgatgttgaacataatttgtttaacttcccatctttctcgaagagatgaaaagaattatttggcaaatgaatatatgattgaaattttcttatgattccctagaactttcgtagaagagtatttatacttatatattttgagaaagtatatatttctttctttggcacacacatttataaattatagaaacaaatgtatacacaaaattacaacttctacaattaataatcaattatatgaatttcatatatttttatatatgtaaaattaagtgtagatctaaggttgaatagttctctagtgaatatttgttccattaaataattatgagatcgagcatgtgatgatgatcacccatcgaagcccccaaattccctatgaatcccaagtcatcttcttcatatggtccccgaagaagctttatatatttatttatatataaaaaatattatatgtctctttcatatttatgtgccatgcacactaacatttattaatattttagttatatataattatttgtgtgatatgagtttgcaattttttataatttttattaaaagaaaatatataaaatcgattataaatattaaattacactaataataatattacacctgtttattaatatttctctaaaatatatatatggttttactatcccatttatatatatgaaaaaaatgaattataacatatttatgtgctagaaataaaaaaaaaaaataattgttttttttaaaaaaacaaaattcattcaacaaaaaaataattagagaagtgataccgttaacttcttattacaattttttagttgacctctgggcttgaaaatacatactagaaattttttttctaaatttttttcacggcggtatttgttatgcttacaacattattcttgtaaatttttaaannntttcgaatagtttacagtgccaaaaataagtatgaaattttttgaacacgcatagtaaattaaaatataaatgactaggaactctactttcgacatggtaaactattcaaaaaacttcaaaaatttacaagaataatactgtaattatatcgaataccgctatgaataaaaatttaaaaattattccaacatgtaattttagatgtaaaaattgactaaaaaattataataagagattataattatgctaaaataattaatattttcatgaagcatattttatttatactacatgaaagagcactttcgaatttatctttgcaaattataattttataagtgttaactgaaaaactttat

SEQ ID NO: 26788 - DNA, 3683 bp, Cannabis sativa
tcaaccctccttcctagaaggaagaaccgcttgaaatctgctgcatatccaacttggttctcgcgaaaggcacaaccaatatgtttttaacataatccttgaaaagggaacattgttcgaaatgctattgcagtcgccttggtctattgaccacgcttacaagtttcctacgaggagtgagaaaaaagaagcacgcttggaagccctccgtggcccaacagctctattattacaaatttcgaaaaagtttgtctaatgctaagtcagctttgttactttagatcgagaaaggatagtctaaaacgttagcttaaagacagccttgtctccctgaaaagaacctggctaagacttggttgcatgcttggtcctccttccctcactaatccaaataacataagtttgctacaggatcatgcttaaggaaattaaccaagaaaaatgtagacgggaggtaagctccgcgactcttgtagcggtctggggacacaatttacaattcctccgcgaaaggttgattcgccaaaagcttgtaaatcgccacgacgagaactttgatagaagttggcacctgcagaatatgtagtttcacatacttcaaagggttcaacaagatagttacaaagtcagaaagatcaaaactgacaagttttgaccgtggaaccaaaaactttgaaaaatcctaaaagtaaactatggagcggcacaagaagaaaacattaagcatggaagtaaagagggcatgcataagcaaagcaaatgtttctaaaaaccacaaacagccccacggttagggtacagttaaaattgttttcgcaaaaccaaaattaaagcaaaaaaaaaaaaagaagagaactggttgaggagagtcactctttggttgagattgagaagtacaaaggccagacctttcgaagctccaagaagttttggatcgcaagcccggaggaaatcactacctcagctgataattcaagcttcaaatctcagagtgttgctggatggttgatgggaggcttcccttcgcatcctctctatggtttctatgtgatggtcactgattatgaggataccttgctggttatagttgacctccaacaactcttttttcctttttcaagtcctcgaggtccctcttcaaagcctcgttctcatccagcacactcttaattctctcctcagtatccttcttagggttgtccaccttgacagcaatctaagattcggcttccccaagctcaaccagtggggccctgttagtggcatgcagctggtgattcttgacgttagcatgctcaagctccatgactagggtgcctacttctttagtgactctctttgccatcaaggccacatgataaagcaattaaatgtaagaaaacaatatacaatagcgagaaaaaggatcaacgctactgcaagttgctcatgtctctaaggacagtacgaatgcgctactggccatttggtttaagagatcggcagcaaagggtacgatcggccccaccttggccgccagtcacttctttagagccttgatgtctaccatcggcccaactgggacgatggcgaaaaggccctttgatgtctaacgatgtgtttctacaaacaacattctatcaatcaaacatgcagtatgtactaaacccagcttgaatttagcatttctatcctagatacagaattgcacaaagtcaacagagtgttgaagtacaaaatagagaaggatgccatgcgagttggctcaagtgtgttaaaccccgtctatcgcgcaattgtagcagttatcgtctgacaagggatggagcaaatcaggatttatgagctctagctcgaagaatgcagagggacttctgtaggttgaaagtgatgaaaagagagtgaataggctctcgaaacttatttatacgccggctgaagtctttgcaattgaaaaggttggattcaatgatcagcccaaacattaaacattcatcattgcatgcctcgtgtgatgtgtttattaaaagaaaggtcatctcaatcaacttgtcatctatgtaacaactcccaagaaaccgatgtccatgtgccatgctagtaatacctgcggatattgacctgtcaactgacgacagctcgtgggatgagaagcgattccaaccaacaccacatgtcaagagtttgtcatgcataagcgggagaatattgcaagctcccagaccgcattacgtactgagagcttggggtaaatgttatctttgtttctgcaagatatggcacgtggcatttaatggagaaggcgaaattaatcctcctttgattaaagtcttttaatactgctccattgctgaagggcttccccaaactaagaagcatccagaatgaaagagcatgcagaagactactcacgcttgcctttacttccctaatatggaaggcgaagtgtttcccctagacttggaagggtctaatggagctctcttagcttaagtccagatagatagtagaaaaacctaaagcggatatcgaccttcatgaggcgttgcggacgtcgactttttacacacgccaggtcaccttatgcttttcttgacagaatcagatcttgtctcctacatccaagcatgatagtgcgggtaccacaaccaccatactaggacattacggactgctgcttgtaaaggagcgaactttgagcgacacgtgttccctgcttttaaaggttgaacctttgagtgacacgtgtccaagtgaaacaaaatggtccccattatttagctattgcacgcacgggcacaatgctacccacaggatcatctagtcaactttacattgcatgtaatttatcccaacagagggatttaagtagaaatcttaggcaggtcataggtctgtccatacccgccacttagcctataaataccccattattctcatgcaaagggggcaagccgaaacacataactaaaactctttgtaattaccattgatcttgttcttcgaaaagaaactaagggtaaagagttagggtttcctgcaaaaatactgtaaacacacatcaatacttgcccttagaggctgatagaatgactcatgaactaaggtttattacccaaacaacgtaaaaaatcatcaccttctaatttttgcaagttattatttttttagctcttaaatatttagtttcaaaaattctcagtaaatactactgaaattctttttgggaaaggcctgcaatttcatatagagcatcatttaaacataagagttagattctatatactctgctcaattcttatttcatctcgccaattttaacaagcgagtattaaccatttttcagcatcaacagttcaattttcacaagtataatagtttttcatatgatgctaaaaacaccaaactaaatccaaataaaccatatatagcattgataaataattttcaaaaacttcaaacacaaaaaaaaaaaaaaaaaataaagcaatttgcgtcaaaacccccttatgttttaatttttatacacttaactcctctattttttttttgtaacaaaaccctcttatgttttaatttttatacacttaacccccttatctgttttgtggtgacaaaatcccctcatgttttaatttttatacacttaaccctcttatctttttttttttgttgcaaaaccccttatgtttatttttctttgc

SEQ ID NO: 26789 - DNA, 2094 bp, Cannabis sativa
ctatatcactctacaagatcacatatttcaataaataaagtatataattaatatcaataaaatatttactttaacttgattaaaatatataatagtacaataaaatacttaaagtactaaagaaaagtctttggttaatataatttaaatttgatccacttctttctcacattttaacatattattactttgaattaactaattatgttaactccaattgatccaaatagaataattaatgatatctatcaactaatcaatctaattatttatcaactacctcaccttaaatttcatattagtataatattatccgttttggatctaagccctcacaatttatttttgggcattttcctaaaatgcctcatactaatggaataggtaaaacacttatattcaagacaactcttgcttattcttctgatgtgggacttgggttgataccccaacaacaactaacaatagtagggttattactttgtccctcagtaacaacatctatattttcgatattttgagaaactataacatattttttttttatatctaatctaaatttttgttatagtgtacacatcccatctgttttaagaaaatttcgaatgatttataatactaaaaaaaaataaatttaaatagtcattacacacatataaattaaaaacaatatttgcaattggatgtttaaaatgtatcatattaaattatttcaaacatatctattataactataatgtacacaataatatataaagaaaaataatactcctactataatttttttccataatatacttaccataaatcgtttatatgaatcaatagctgtagtcatatttgagcgatccgcaatttttactgtacatacaaaaaaaatcaatttgtaatgaaatagcatataaataatgcattatactaataattaataatgttattttttttaaaagaaataataatcacttaataatatatcaccttattatgtgaatatttaagggtttcaatcataataaaatatcaaaatatatttaattttgtgacattattatttttctaacaacaaatatataatagatacaagaaaatgatgcatctagttatgattaaaatataatatggggattgctctagtttagtttatgctataagatcccttctaatgggaagtacaaaagttgaaccatatttatttggtacaaaaaaaatagttttgttatatttttatatcaatttttactatcatgctcaattacataaaagaattgctaaaagacaccactgttcctagcaccctcttcgatgccatactattattggtgtaattaagtatcgggttccatataatttaacaaaataatttttaaagaatatcgctaatgaatcgtggggcaccacctatagaacgtattgggcatcattaatgcctaataacaatgctcattttataattataaatcttgatgtaagatttaatatatcatttaatgctcacttaataatttattaaaaaattcaaagtaataataataataatacaaatataaaatttaataatataatgcaagtagtgcaaaagaatatgttaactaaaatttaataataaaatatctattaaaaaattaataataaaatattaaaaataacataatggtaaatataaaaacataatatttattgtgatgagagttttgcatcatgtttttattacgtgacatatttgcatcataatttggaacacaatcagggccgaccttagacataggcgggctaagcctgcgcttagggcccaatttttaaaaataacatttatctttatggtaagggcccaatttttttttttttttgttgcctatgacccatttcaactcaaggccgaccctacacagaattaaagtagatttttaacaaattaagtgagttatattttatatttacatcacttttttatatttttattggagatgctctaaactctaaggaaatgatatttataaaattactatatataggcaaaaaagtactattttgaaataatttaccatataaaatgtattaaagtagtattaataaaaaaaaaaaaaggaatttttt

SEQ ID NO: 26790 - DNA, 2912 bp, Cannabis sativa
aaaaaaagcagtttctttacctcactgcctcgagcaaatgagtggctattcgttttcttctgttgacaggagacacccaaattgctctaatgccacagacagcaggcaccggtacctcctcgcaaataactgctccgccgacgtcttcatccaactggttagtattactagcagagtgagatcttttcactgtctccctctgaaaactaatatcaccaaatttaaggatagttggtttggctctttcttcttttgtgttaatagcatcattgcatctatctgttgaatttgagatgactttgaatgccttctctattggttctgcaattaggcatccagctaccctattggatagaatgaatagtaaaacctgcaagaacactaaaacatctctaataccatttttaaaactaaacaaaaaaaacatatcacatatctcttgacactaaagatttctttgcaaagataacaaacaaagagaatccaagtgcatttattatgaatttcatgatgtaacttctacagagattttatgatttttgtgaataaggaatgaaaagtataaattagaaccagttttaataaaacatggaggacggcaactgtatccaaaaatccaaatgtaattgatataaaaatgaagtaaaagtaggaggatattaccttacaaaatttatggaaaataaatccatttccaagctcaatctccatcaaatttacaacttccttaacctgcaagccataatgtttcattcagaaaagtaaataacttacttacactttctttattcagcaaatgtcactttcattaacgaaaagaagagtctcaacctttttctcaacttttatgttcaaaaacacatgccaaaataatttttattctaatcttttgtcttggcaatgtttgttatataattataatatctatcctgaccgaaataatattttaactataacgaataccgtcataaaaaaaatattttaatatatattttcgaacgcaaaagttgagaaagagattgtaataaaatattgtaattaacactcatcttaacaagaaaaaaacaccccttaaactcaatcttccctataataacataaacatttctttgacctgaatgaaaatacaaatattcaatctaaaccttgtttttttgggcattagaatcacagtccaaaaccataacaatccgaccaccttccatagtaggcatgtgaataagcctttcaacagaccaaccctgcaaaattacatatcaatagttttgttataagcaataatcaaattaccacaacaagaagcacatttcaaaactaaattttaaacattttataccttaaattgaattccatgggtatagttcttatgaaattccttatgggtcttctcatcactctcatctccaggagaatacttaaacccacatgtggaacaattatgaaagttgaaatcagactgacccaaatctaaatggtattgggcataacttctcttcttatttttcaccattgttttctttgatataattgattcagacttcgaagacaaactactggaaacagttttttccagccactggtcatctttggctttctccttttccccacttcataaaaaaaaaatgtcagtgattatggaaagaataccaatatttaactaacaaaattcaccaaaactctaaagctatgtttggaagttggattttggtgaggaaagaaaatttaggggaaaaaaatcaaactttcattgttcaatcaactttttttccttaccaaacatgagaaaataattttctttccctgctaaaatccaacttccaaaagtaaaatgcaaacccagatttccaatttcactttctgcaactttaattatatagaaagcaatacctgcttgggttacgagctcttcgactgtaagtattgaaaatttggtgttctttcttctcccagatgtctaattcgccatcttcttcagaaaccggaggtgggtttgaagatagaattacagaagaagaagaagaagaagaagaagaagaagaagttttgaaaaaggcactgattttggattgcatttaagctaatttttctgtcttacccaaataacaacctcaggtataataatttcacacatcaatcaaaacaaagaaaaattgattaaccaagaatcatagagcaacagacaaagaaaaagaagcttaaatcaaaacccaaacttcataaagctgaatttggataatacataatcaaaaatcttaaaaaataaaatctttatcaatcattcattgaatatagaatcaaaagaaggccatagggaaatgaactattcatttttaccagatgtttcaaactttggagagattgactaacaatggaataagattgagatacattgttttgattaaatttggcgggaagcaaagaaaaagcattcccgctcatttttgtacagaagtttttcgtatcctatatagcctctcagctgggcctcttcataatcatattttttacaagattatgatttacaatatttttttaaaaaaaaaattataaatttttaagtaatttacaagtttaaaaatacttaaatttaaattttgatagtaataatacttaaagttatatttttaaaactcagtgggtagctagctattaaatattgtcattatataataatgttttcttattggcatatttaaattatttttttaaaaaaataaatatataataacttagaccaatcaaaaattgtcacgtgtccatttattaccgttaaaaattataacatagatatttatttacaactgagagttaaaaattataacataggtatttttgaactttttttaaaaaaaaattctcataaaataactatttagagaaaaaaaaaaaaaaaaaaaaaaaatttctttaaa

SEQ ID NO: 26791 - DNA, 1229 bp, Cannabis sativa
ctatattatatacaaatagattttatgttaatttatctaacataatataatataaatgattaaagtgatgcagactaatgtaatggcaagtctatttaatatgtaacagctactcactaacatcaacccaaaaacaaaaatgaagtaaagtttgagtactattgtccaaatatctcaaatataattagtttagtcttattattttcttaatgtataatattacataatctatacctcatgcatgcgttaacgtgcatgttctcgtccttgttatataaattaaataataatataacaatgctatgatcttgcagaatcttatcaatctttatattaaattatttcaaatatttttctttcttctcaaaatccaatgtcacaaaatacaaagttatttggttaataagttacatctcacaaattgtaataaggtcgcgatcaatttatataataaaaaaaatttgagtgtagactcctattgtctatatgatgtggcagtactcctttatttgtgttcaatatgcttttgaatttagactgaggttgtgtatattttttttttattttttttatagtaattgtggactctctgttgtcctttgtgatgttggtttttgatgctcattttgtggggtttgtcccttcatttttctacagctaggtttatgtttttttatctactttgcaatcggtgtggtttattttatgattgatttttttttttgttgagatttgtacaactttattttcactttatggattgagcttttttcttatctatcttcaatgaaattttaatttcttttttttttaaaaaaaaaaaaaagtttgagttataaattaatcacagacaataacaaatccaaaatttatattaagagggacaacacatttttttttttttgtaagtgaggggggcttcttttttttttctttctacattgtataataggttaaaaattaatacaaatttgtattttagtattaaatatagtatagagcaaaaaaaagtaaaaataaaaatattaagttcaacaattaagatactaaatacaagtcttatcggaggaggttcaaaaattaaaatttaaatactaaagtaaacatatttttataggaattagaagtcttgactttcactatgtgcatgaaatagctttatcattatactaaaatttgtattatgttcataaatgtcacttttatttagaaatatatattgtaattag

SEQ ID NO: 26792 - DNA, 1511 bp, Cannabis sativa
ccctgccagtaaaaccaaatcccaagggctttatagggcttaaaatgcttcactcctatcttctgttctttacctaaaatctgcaaataaattatcagaattacataactaactatggtagaaaagagatgttttgagttaatgaaaagccgctatatcaaatagtatatctataatcaagtttggttaattacaaatcaatcatatttaagtgtgtgtaaataatccaattaacaacaataaaatagtattttgaatggtgtagccatagatctttagatttctgcaattgagtgtaaactacttaaaactcttaccctttgaacattttattagaaaatgataaactaaagagactttagaagaagctatgagaagaaaaaatctaaaagaaagagtgaattatagagatattaaattagtcaatataattaataataatgatctataataattaaacaaactaagtttgagtgggaaaaaagcctttacaatgggattatcagggagccttggattagtaatgacgaagtttttctcaatatgttcaatggtggtaaatttataaaggtacaattaagataatgtttcaataggatacataaataataacatattactgtaattactaataaaaataacaaagatatgtgatgcatactcgaattgcctcaaatttagattaaaatgcataatgtaacttataatgtaaaagaccactaatcaaaagttgttacacaaaagaaattatattataactaatccaaatctaatgaccaacagaatacaagtgataaaaaccagggagagttttatactgatgatacacatatacatagaccaaattggttaatgaaatctaaaaattcatctagtaaagagaaagcaattaagcagtgtaaactcttgccttgactttgagtgattaaagtaagatccaacgaaataaaaaccaaactaaaaatcccaaacttacaaatattccaagcaaatattaattaaaggaaggttcatgcagctaatccaagcaagtaagttaggagaaaatgatttaaaatgaataaattcttgccctttttgaaaattgtattttgctcattaattgtatatattttgagacaataatatttgggaatccaaaacctataactattgctatgaaaatagcagaacgagctagtaatataacaaaatccaaatctgagtacaaccgcagatatgcatactggtccttgtgtaaagcatatatatacaaactcaaactaaaactccaatcttaggtaaaaaaaaacaaaattccctttggaaaaaaattatttgacatttgttaaataaataattgagtttatgaatgagtgaacatacatcaagaaccaagccatagacttcatttcatcagtgaagaagaaagcttcttgcaaccgagcaatagattgtacaatgtcgaacatcatatcctcattcacatccctcaacaacaagtgcctaaaccaaaaaaaaaaataatcact

SEQ ID NO: 26793 - DNA, 9522 bp, Cannabis sativa
atttagggcataaaacccaacggagatattacctcaaaatgattaagagattctcttaggtagtcaagagattttctcaatcgattattagatatttagtttaagctaaatatttaaatttaaataaatatctatagcagaatcaattaaagatatttaattaaatatttaaatattattttaatatttgaaaataataattaatttatttaattaagcttttattattatgttagtggtttgaattaatctatcgatatatcctaaatctatacatacgtataatttaaaaaacctaaaaaagttaatcacatcattattcactcagagaaaagagtagttcttgctcatctgttgagaaaaactcaagaacacattatatagttttatcctaattagcccattctaatccttgtgtgtggtggaagatttagaaaattgtggtgtgagttcgtcatcaccattataggatacaaattatgaaatgattcgaagatattctgattcgcttcaagaggtaaatataccttttcatattttattccagatttaatatatgtacatatggagatcttagagtatggtacaatgataatcgtcataaatacttccgctacgtacctcattgagtactacaaacccaacactcgacacctttataagaccttgctcacaagcgtctcaacaagcatgagcaagagacgcacgtttaaaaaaattacaaaaaaatagaatagaataaaataagatcaaaaagaagaaaactagagctaaaaatgtcttagctaagaattgaacttattacctcttggatagagtagaaggaggatcaccactggaccaaagatgatgcagtgaagtggatgaaaaatccacgaagacccctttatatactaagggttgcctcaaggtgcatgctgaagataaggttcacttctgaacaagataaggccttgaagaactcaaatctctcaattcgtaaggaacacttgaaagagttcttgaaaactagggatgtcttagctaagaattgaacttattacctcttagatagagtagaaggaggatcggcattggaccaaaaaggatgcagtgaagtgaatgaaaaactcacgaagacacctttatatactaagggttgcctcaaggtacgtgctaaagataaggttcactttcgaacaagataaggccttgaagaactcaaatctctcaatttgcaaggaacacttgaagagatgttacggactaggagcaagtattaaccccaaaaattaatgctacaatggtccgagattagtcaagcaaagtgagttcttaactaagtgttgtcattgaatttagggcgatgaagccacaaccattcacacttcgagtccctcaacgtgtagactcaagcgtcgagataataagcttcagcttgcaagcacattggcaaggcttgcatgcaacctcaacttgtagactcaagcgtcgagacaagaagcttcagcttacaagcacattgacaaggcttgcatgcaagcaactaggcaagctttcatgcaagcaactcggcaagcttgaatgcaagcatctcgacaagcttgcacgcaaagtatctcggctagcttgcatgcaagtataatgacaaggatttcatgcaagcatctcggcaagcttgcatgtaagcatctcaacaagaatccatgcaagcatctcatcaagcatccatgcaagcatcttggcaaggcttggatgcaagcatctcggcaaggcttgtaggcaagcatctcagcaagcttgcatgcgagaaccttgacaagcttgcatgcaagaattttggaaaagcttgcatgcaagcatcctgacaaggcttgtatgcaagcatcttggcatagcttccatgtatgcaaacatcttgacatcagcaagcttgcatgcttgtaagcatctggacatcaccaagcatgcatgcttgcaagcatctcggcatagcttgcatgtatgcaagcatctcgtcgtcaccaagcttacatgcttgtaataatctcgacaaagcttgcatgtatgcaagcatatcagcatcaccaagcttgcatgcttgcaagcatatcggcataggatgcatgcaagcatctcgacattaccaagcttgcaagcatctcaacaaagcttgcatgtatgcaagcatttcgacattacctagcttgcatgcttgcaagcatctcaacatcaccaagcttgcatgcttgcaagcatctcaacataaatctttcccttgcaagcatctcgacaccatcagtgatgccttgcttgcaaggatctcagcatagatccttctcttgcaagcatattggcaccatcaatggtgccttgcttgcaaagatctcgaaagagggccatggcttgcgagcgtcttgacaatgcacttctcaaggatgcaatcaacgcttagtaaaatttttctaagtgttgagaagaaaattagtgtacgtgcaactacaaggacaaggcgaacacgcagatgaagtacaaccaagcttcatgcatggtcagttgacgagggaaggtacaagtagtggaggcgtctcaccaatatgccctgacacatcgaaaaaggatacactgcaaccattacgcctgcaaacctataccacctaacaactgacagcagtacaaggcgcaagaccacctcctacacttgcaacctggaagattagagcgtccagcttgtctcctgaggaccaccaatatatttcaagccattagaacctataaataccccatacctagatttgaaaggggattggaagattttgtaattcagcatttatccaagcaatacaatccttttctcctggctctaagtgtcatctaaaagttcttaatccaaattttcattttgcttaatttcatctttgatgttgattttccgatcatttcctagttgacgagttcttagcatcaacaataacatactactcaataaaaggcatggtaattttgcttttctcctaaaacaagtgtttttcttttcttctaacattatcacaatgcaaattcatttgtacatttaaaagctaataaaatgggaaagttgttacttcaaaatgtagaagttttgggtggtccggttggtctttaatcttaatgcaaggataatgctagaatggattatgaaagcgagtacaatatatatttaaagacggaaatgcctaatccaattagtctgagtatcatttatccaagaaaatgtgacaatcaatgaaaatttacataaagtttcttttatcagttgatctttgggcccaggtagaactttggatccctgaaaaacttaaaaatcacatctgccttttcagccgatagatcagtgttttccagaatatactccttggattgcttggcaatatcttcaatcgaaccaatagcctgattaagctgtgaatggcagaaaagaaatatgttaattcaaatttaataagcagcttaaatgaaaagctacgaaagattcatacaatacattagtagctcaccctccaacggaaagatctcatcatttcttcaatttggacacgcaaagtaaatttttgttgtttttttaatccaaaaactaaaatctcgtgtttgtcagtttagagaatgagagaaataagaggactcaatcttaacaatttcaatacttccattggaaagacatgattctacaattcaaatgtgtctttttgttccacttctccccgtactaagcaagatacaattttagtctcttctcattcgttctcatctccaatcattcttactaaacatagcacaagtttataaacatttgaaatgatgaatgctatatatagaagcttctcttagtaaattgtgcaaaagaagttggaatttccggcacattttagaagagaattaaatgcatggaaacaagtaacacggcactgaaacaacatcatgttcgtcagaatttcacaatgtttagttatgttaccgcatttgcgtcatgactgtcaattcccgggatggatgtaaccactttcaggaaatagtccattccttgcactgtttgttttctcttaaaaaacaagaaagaaataccgcactacaaatagattagatcatggttatgctatgtacgtattaaacaaggaactatatttttcacttactgacctcagatttcaattttgttttggcatcttgtcgcttgcatactgatatttatattagtaatttggggaaagaaataaaaaaaaacaattggaataactcaatgaagttgaagttcgggaaaattgtcaaacctccaaaggagtgagctatctttacaatcttctcaaaccccatctctatatctcgaactggtataaatgttggcttgccaagctccatttgaaatcttaacgaaagattcaaatagaactaataactgtttgtaccaaaaaagaaaagagactcaattggagaactggagtgtttaaaacttacttaaagtaggaacgaacaaaagagtcattttggtcgttggtagtaagggtgacgacaatatagaggtgtccaaactgcatcctcaacttttgaattctgcacacgacaaattccatcaaacagaaagagaagagaatgaagcaacaatgactgggagaaccatcttactcacctgccaaagattgttgagacattattttcatcccacttggtgacaaaaatgaaggccacagacgaaccgccacaattgaaaatgaaatcctagaacgaaaaatgagttcacgattcgggtctaacataacatagaaaacaattgtatgaaaattatgcctacggaaattacaggagcaatcgcaacaaagttaagacggaaagaatttgctcttaggaaggtagagatgaaatttatgaaagatgagtgttgctcctctctccatgtattgctcatcatacaaaccccaccaacacctgtatgtactaacccatttcataatcagaaactcacatatttacatatgtaccgagtaggttgaaatttgaaaataaaatgtttaaatccaaatccaaaacctattctcttggtctttcaaaactacgcttcgattgaaaattttacatgatcggaaaacgaaaaacagacgcaaagagaagcacctgagttattcagcacctcacctcgaatttcagctgctgctatatcattcgccattgcccaaactctttaacagaaagtgactcggcgattcaaagaagcgggaaactgatttatcactatttattttagaattttttttcttttcagaattattttactttagacatttgattagtaaggcataaacatcacccgcgcgttcttgagctagcccatatattgtgggccttcatatcgattagcccatttattttcttctgttctaaattgtaatgggcctaaatcttaccctatttgatgtgtggcctattcattattatttaattaactaattattatcgagtagttttgtgagtagtaagcaaaagagaaaaaaaggagaagaaagaattcgatggcaataaccagctcctcttccactccaacttctaagcgtcttcttttcgaccggcgttacggttgggtgtaagtctctcattgtgccaaagtataggtacatatgtgcatatgtatgtatatatatatttatgactttcaatttttgatgtcaaatgcagaattgatgaatggaaggacccatcggaagaagctctgtccggtggtcggggaatgttagttctcactttctaatttaggcctcaatttctaacattcttttatcaaccatgaatatgagcaattaagtacgttaataattttttttttttatttgggggaaaaggttttgcattgtgcctctggcaaagggttttctaaagatggcttcaaactcggtatgaaatattctctgctctgtattatatgtatatgtatatttatgtaatgtgtctgtggactggaatattttctttagctttggttagtttagtaaactatagtcaagtttagccaaaattaacaatttgaaatactaaattttataaaataatctggctgaaaatttgtttcaaaaaaaataatctcactgaaaaatagtctataatatatggtggttggtggacatacaaaattattttactaataaatttttttatggttatttttctgataagaaaattaataaaaggctattttaaatgtatattattttgacttgtgctacaaaatttaagggaaattacttggtatattattgttttaactttttttttttgtaatttagattctttaaagtagtttttttggtggtttctatataggttgctaaatgaattttagttgcgatttaagttgttccatattgcaataatagtttttatatggaattccataaaaatgcaaaaaaaaaaaaaagtgtaaaaatgaaaaaattccaaaatataacaacaacatatcatgcgtttttaaaacggaaagattgaagaagggcgtattacattattccttattagtctttaagtattacctctaatttccttgcagatcaaccatgctgcaaactcagcagtgaaagctttggaaaggccaaagctattttcaccacagctactccaacccaatcttaacgataagcttcacaaaattaagtcattgacaaactccggtacaaattctttccttcccccttaatagaaatctctcatcacatgaacgaaccagttgaaatcagtatatcatacattgtttaattgtaatctggttcctcaaagtttgtttgatctaatattacattgtacctcaggcttgtcttttaacttcttcatggttttagggtctagttttcagtagagtagacagtattgttcaagatgttgatgacggctggtgtagacaaaattatggtggtcttcaaatggtttattgaggagcccgttttggggggcaattagtcgatggttgtctcactagaccaactaagctacattacttttagccgaatttactgctattaatattggaactccactccgagctgatcccccttgctgtttttagagacaaacatgtttggatgcttggaatggcagtatagatgtttgggactttcaaaatccaaaggattaacctgacactcatgccaaattaaagatatgctatgtaatttatggattacctctcatgtgaagtgagaaaataggatcatttgcgtaatataaatatatgtgattgaaggaaatagtttgggttaacatctctctttctaattaagttagttccaacaagaaggcattaatggaatttatagccaaatgggttgaccaacagcttctgtaaagcaagtagtcattgcaaatgagtgatttgctctagcttgaacttcatgcatttgcgcggtcaggttttataacacgttttccgtcagagacattagaagaaatattgaaaatatttcacacttaatcacttccttttcgaaaaattgaagtgatacattgtctggctttttgatagttcaaaatagtgtgtatgaattcaatatgggaaataagtcataatctctgtatctacacctatacactacttattttctccatcagaataaataattttggcaagggcaattaaaagagcaattaagcagtttaggttaaatgaaagagttcgtacttagcgaagtctagtccattgagagatattgaaaattctttggtttgatgtaatcttatgaatcaataagatattaaaattatcaatgcaataataaaatttaatttcataaataaatatattatatattattataaacttataaacatagatttaaaaaatatttttttgttaatttaaaggtaacacaaatagtggaagcgtactttaattcatagatagttatgattttaatccatccaatagagatgatttttgtggtaatgatgttttaagaaaataagactgcatttgtttttttttaatacattaagatatcaattttgaatttaaatattaaaatattaaattgtttgtttttttttttttcatatctaatatatatattttttagtatttttaatttatataagattgataaatttattaaaatatattttattttaaaaaataattaaattcaattatacgtataaaataatatctttttatcttatctttttattatataaatatttacatacatatatgagatgaaagaaaaattataagcatgactttccataaagaaatagaaaagtggaaagtattacatcttaaaatttttaagaaccaaacacacatatgaccgaatcacatgaaataagtgtaaaatagtggttcaaaaaaataaaaaaaacaaatgatattaataggcttaacactatgtttggtagaagggagagatgggtggatggagaggggtggagggagagtgatggaaggatagactaaatcacttgtttggcaagagggagaggagagatagagggagacattctccctccaaaccttcaaaatttaattcctccaaatttagaaggattgtataaaaagacaaaatatattttgcaaaatacaataattacccttaaaaaaataataaaattttatttttaaaagaataattttgtaatttactaattaattttttctccatccttctcacttcacacctaataccaaataatacaaaagagattaacaatcctctctatccctcttactccccatcctctctaacctctccatccatcctactctccctccctcccaccaaacatagcctaaatctgaacgaatcagatgagttacatcatttgtagcctgagcattgataaataattaatgacaaaaacttagagaatgtatatacctgtataacaagttaaaatctgatcaactttaaattatttagaacctttaaaattagctcacaactaacaatataatgaagtacaataaaattaaaattttaattatttaactacttactagttacattatttatgagtaactagttacaaataagtaactacttagtaaaaaaaatctatgaatgaatgaaaaaaagtaactagttactatttaatatattatatacataaatttttaaaaaatttatatatacatacatatataatatattatatctcacactaacaaaattttgaaaacatcatctgtaaactaattaaaacactcaatataaaatatatagacacccacacagggccggccctgaaacaaagtgggccatagggaaaaaaaaaaaatttgagcccttatcttagaaaaaatgtggtatttttcaaaatcggtaaaaaaaatgtataattttaaaagaggaaaaaaaattttgggcccctgggctgggttggctctaggcacaggcctagcccgcctctgcctagggccggacctggacacacacaatataatatatatatacacacaatacacaatatacacacaataaatatatatacaaaatacacaatatatatacacacatattcaataaaacacaa

SEQ ID NO: 26794 - DNA, 1483 bp, Cannabis sativa
cttcaagacggctcaacaatacaatagtgattctagtttttcaggtagatcaataatttcgattacaaactataatgaacacgttttataggcatggcaacataatgccctacttaagaaactattctaaaagtaagttgtacgaagtgaggctaaactatagaatcgcaaacaatggttaaaaatgagcagccattaccggggattgaatattgagttctccaagagaagccacgagagttgcaagctcagcttccttggcagcaaccgattgatgaaggcgtgccttgcaattggcagcttcatcaaccttccgccggtaaacatctaagcattctctctctagctcgagtagcattcgatcttggtctgcttcagtctcaccaatgtcgttccatatttgctgtttttaccaaacaaatcattaagtttagaaaaagaaatgtatcaaaatttagctaactgtcattgtatgaagagattaaatatcttttggaaaattatgtgccaactgcatagttaattaaatattctaagaatcaagcaagaaaattatacactctttttcttccagcccataaaattggttatgtgcagaaacatcaaaatcatcaaatttataaagaataataatatctctcaacaacctagtttcaccaattgccattcttcaaaactacaaggaataaattagaaaaatataatatttaaaaaaaaacatctaaaagaccatgtgaggcataaaaaaataacaaaaaataaaagacaataaattctaagagaatttaaaatgaaggaagagaaattaataaatagaattggaaaaataaaatgtgaagtcaactcaaaggcatagactgcctactgtccttgaaaaccaacaatattattatcttaataatagttcaacaaatttatgaaaacccctcttcaacaacaacaattattttccctttaaacagtgaacaagttttttattaatttttatttatttattctcacacaagtatggaaaagtaacaattattattaagtgaaattggcaaaaacccaagtaggaaaaaaaataataaatcattacaagaaacccttcaacttgttttactgtaatatttctaaagcaaattaaaagtactccaatctacagcttcttcagtagactctataatggataataataatcaaacctcaactttcccacaaagcagtaacaataaagtttttacattaaaacatcatcattgaaaagtaaatttcaacccaaaaaagaaaaacaagttaaaagttaagagagagcttaagaacccaaaattacaaagaaacaccatacctgaagctctctgagtaaaacattgcaagtagtatttgtacggacacccatggtaggactccctaaagccaacatttttctctttctttcacagatctctctttctctctctaaactgaagggaacccaagttgacaaaacccaagaaaaaat

SEQ ID NO: 26795 - DNA, 2979 bp, Cannabis sativa
  modified_base (77)..(80): a, c, t, g, unknown or other
ataatcatgaaataaattatgtgacccatgcaacataaaatgatttttgatcctttattaattaataaatctgattnnnntgaaatgagttttatttagggcagaaaaactaacatatatcacattgaccatctggtcaaatagaaaagtaatttttatcattattgtattatcatgaataatttaggtaatcttccttaccttagtgataccactactcgccataacgttcttttatacgttaccctggtaacgtcccagcttcaagcctctattggacccttatagtcatagagtgatggctcttatacacaagtgcgtcattctaactacttcctagactgacaactggccccagagaccaatccaattgtttctaatgtgcttggttatggctcacacctgggaaacttaaatgaaatcaccctaggtaaagaacacttaaccgtggagtcccttcatggcaggctaccaaaacaagatgcttctcgctaacataggtagtcccaagcaatccattcaagtcattaaccactatgtagtcccacacatacataatcttagaatcattacatacaacctttccccaggcgatgtaggattgtataactcctagtctttcctttgcagatcacgcgattctaactttcataacttgactcatgcccccatgatctcactcttcccctagtaatgaatagatccaaccatacaatcatcgcctttaatttacctaaaatttcgaacaatactcataatatgtcccacttatactaacactagatcacttctaaacaaaagattcttttctctgaatcaattaaatggatgcctccattagctactcatgtcctatattccacttatgaataccaataaatttaactcatattgtcaattccttaatctgtctaccccgtcagatgagttaccactaactaacatacatgcacagtccattccgatcttttcatgtcccctcattgagtatacaatgtttagtatcgatatcaattgaaatagaaattataatattacccatgaaattctaacttgagtcaacaaaaggactaatactcgagtccccttcaatcataactggcacttggacaggacccgtgcactttcctcctttaaccaatctttcttaaccacgggtaggttctttttagatgacccactaccccacaataaaataagatttggctctacattggctcaaatggcgcatttttgcatcttaaaaacttaagataaggtcaccatttcttattctcactttgaccagtatcatggtcgccctttaaccttttgttctatcccctaattggtggttcatttagtttctgcctactgatctactcgcaagttgggtttatatatttcaccacatccagtggtacgacaggaaatgtcggttattataagaatagacacaagacgagcttattgttctctcagatctcagatcttcttccccttgttgtctaatcatatcatgcatagcagaatttacatgtttccagtattacaagaataaaggattctcttccttactgtttgcctcgagcccagacagcttgctaattaggcaattcaattgcccttactgtataacttgtcacacatttaatccacatcttccaaacacttcaaactcaaacagatatcaatatcaacatgtatatactatacataatcttattatagataatcagtacgctacttcttcccatcatacactataattatctaagtaggtaaggcaataacaattaacataaacacttactataccatgagtcaacctgtctttgcagcaaacgtacatattcgaccaatatttaggacctttaaaactatggttcgtgtgataccaagctgtaaaaccctattctataggcacaccacgtgtgattttataaaatagtttaataccaatagaataatcaattattaaaaaatgtgatagtattaaaaacttgactaaaataaaacactaaaaacacattataacgacataaaaagcgtgtttcagggatccctattataaaaatctttattaaagaaatattatacgacaaccattttgttgtacctaaaattagactagcactttagaggaggacacgtgtcaacccgggagaatacgaatcaacaaatataatggtaattatattaaagaatattaaaatggaataactcattaaatgcaaagctgatagagtatacttataactcgtcgactgaaaggtcttgagcgagacacggatatacaaactattaattcacatattgacaagaaaccatttcgtatatgaagacaaaatcataaggacggaatcagtaatgcaaagtgaggcatcaacctcgctacgcatgaagagacatagacaagacatgatgacagttattacacttagcatataatatacatcacacaaactaagcgtaacaaatggatgaacctgaacaacaaatagtgaggcatccatctcgctataggaaggcatacttctggtaccttcactaatcagcttcagacatctttaaatgagatccacaactccgtcgagttagctctctcagataaaagctcacattcaaatgatgttgactgccgaagttcaccttgtcaccaagaactacgattgtcaaatgaagcattatgttttcaatagcaaaagtgatgatatttacattatcaaccttggaaagacatgggaaaagctttagctccctatcaggattactgttgctatcccagcgaggtaactctgcgagatacactttggagcgtgtttaaatccacatcaacattgacccagtaaaagtagataaatcacagctttgtgtttttcaaataacaattgcatttaatttacgtgggacgtaatcaaatcccacaattttaggggattattgttgtgggaaatcaatctaattgtaattaattgccctcctatgtaactataaata

SEQ ID NO: 26796 - DNA, 2718 bp, Cannabis sativa
taccagcgcaatactaacttttgttagcacaaaaatgtgctggcaaaagtaacatttcttgtagtggaagacgaaagcgacgcatatcaactgtgaaaacgcttagcatataatgtgcaaactaagtataatagacgagtagactcgagacataataagcgaggtgcttatctcgctaaaggaaggctcattcttgtaacttcccccagttcacttcaaacatcttctcagtaagacgtacaatattgacaagtcagaagctaacattcaaaatgagctttgagaaactctctgttaataagaaccgcgattgtcacaaatgaagcgttaagcttttaaacaaagaagcaacaaggtgtacattgtcgacctcggaaggataaggaaaaaggttcccgctcgctatcatggtcactggaaccgagctcctgtcgagacatcccagaatgcaacaattaaagacgtgtttaaatacacgatcattttgacccagtaaaagcaggaaaatcacagctatatgattttcaaataataaccgcatttacactacgtgatatgtaatcaaatcccataatttcagggggaaaacgttgtaaagatcacagtcaactttgtaattaactgccaactatgtgattgtaaatagtggcaagtaagatcaaaaggggaacgaaaaaatcatacaagggagaccttgagaaaactatcagaaatctataagattgactcgtggaccatgcagaattttaactgcaaaaccacgtaaaaaatcccttgtgttcatatctcttactttactgctttcattttttctgtgtgaaattatcactgtgagactcaaattttggttaacgaaaatctacgttaacaacattcaaaccaggtagtgtttgggaattccctgaatcgagataagtaacatccactatataatttacaaatatacttggtaagatcagcaagatccccttgcttcttgttcgttaaaatcccttcaacaaagctctagatttgaataccttcagatcttctcgccgagatgcagctgaactccctttagctcacactactcgacttcaggtcttgcattgaaattttgaatcgccactcatggagcttcacacatgtacctggaagaatcaaagaataacagagagaaaagagtaaaatacgatctcaatctctgatataagagggttagtcgcaactgaatcaagaagatgatatttatgcctagctgaaataggtaacaaccaaaagactgaaagttgtaaccaactaaccattaatatctaaaataagctgatatggacaaattaaacaagtaaagtccatacatgacttcttaagactctagacatatctggacataatttgtcataaaaaaatttactggttcttataggatgtaaccgatactactgagcctcaacgtcaatgcatataactaatgttatataaacctcaaaaaatagaaagtgtttttcttcatttgatattgatgctaatatataaggttgccttagtttgtaactgatgctaattaatgaggttgtcccggttcttaaatgacgtaaaatgtaaaaaaaaaaaatatattaaaaattacaaattgttgtcaagagtacttaaactcttaagcaaaaatatcatccatctcattggaatctagtgtccacaatcccagtaacaaaacaaaatcaaattttaaatatcagaaatatacacaacttagagattataaatctcaaaatatgtactcaaatattatgtcatttttaacccaaatatatatgtaaaaaaaaaaacaatatgtcataaatctcaatttttaaacccaaatattttagccaaacattaaaagtcagagaaagagttaccttttcaagcatgcttgtgcttgaagtcgtcgacatcagtccttgcctatttctcatcgccaagcctttaacttcgacctttaggtcattttggcgtcgatgtagtgagaacgcaagagagattaaaatatgacatgagagtgagaacaagtttgagaatgtgacagttagagatggcgagaggagaatgtgaaaattggtgagatggaaaccgtgagagatggtgagaaggtgagaggtggatgagagaatgtgagagttagcggttatatttgaagaaacgagaagggtcttagggttgatgtcttatgagctttaattcatgtgggattttgctttttattttattttttttctaatattaggccatgagtatcactaaataataactgataatgctattggaccataagacatactaggggtgttaataaaactgttcaaaccgctaaatcgtccacactgcaccactctgcaaaaaaatgtagtttgaaattctttacagtgcggtcgcaatttgaattttttctaaaccgcgcagtgcagtgcggtttgcggttttgaattgttaatgtgtggttcaaatcgcactgcactaaatattataaaaataccaattcttatatttatttaggtccaatatgtgaatgtccaatccaaagcccactaactattgtattgttgaaacttaaaagttttttcataattaattttcaagctttatgttatttttaacaagtgttgctcaagttttgttgtatttgcgatagtttaattatttggtaataatctaaaccgcagaaactgcaaaaactgcaccacatcgcaccattttttg

SEQ ID NO: 26797 - DNA, 3552 bp, Cannabis sativa
tgtcacttattcccactacatcttcatgtccccaggcgaagacatcaaccttccttttgagatattgttttagctcatgttttagggcttcgcaaagtcctcttctaatatcactacttctttaatttcttcatcaagttttggatggacctcctcgttgacccttggatccaattctgcatccaccctttgtaggagagtgttcttgttacacacagtcattgccacagactcgcatggctttgcggcaatcctgagggacgtgttgtaagactcccttgcatctttttgctctccctttaccattgccactccacctagagttgggaacttcatggctaggcggtaggttgacatgatggacttgatgttgtacagggatgttctcacaaaaactaaattaaaggctattgggcagtctaccaagatgaatgtggccattactgtcacttgctcagggcgttctcccataatgagcggtagttcaatcatccttaagggatggattaagtctccattgaacctgtatatgggtgtcgtgcatgacttcaaatccatcaaacttaatcccatttgtttaaacgtgcttcgatagaggatatcgaccgaacatccaatgtccactagcacccagtaaacatgggcattagccaactgtatttccaacagaagagggtcattataggaaaagtgtgctcctcacgcattttcctcagtgaacgtcacagagtaacattcccctttagagttcttcaacgacctttgttctaagctcatgacaattgggggttgtctatcctcccttgcatacccatcccttcccttaagggtatcacctcttaatcctggccctccaaatattgtccttacgtcccctaacacctctggaactttgtttggggttcgttccctccgatcttcttgcctcctctactaggggcactgatcctccctacggtatcctcccagatatcccctttgtatttgatccaaaatttctatcttaagatgagagcactcttctaccatgtgcctaatatctctgtggaacttgcaaaactttttaggatctctctttcacttgtccttcctcattgggggcagtttcttaaatcagactcggtgttcatttatcaagaagatgttcttccttgaacatgtaattccagtataataagtgaattccttgcatcggggcccctcctccctcctaaccttcttgttttggtcagtcattcccccattgaattccctttacattcttggttcttcatgggtgcaggggttcgctaatccgctatagtcactcttccctattgggaggttctcatgccctgcttaacccagatgtatttttatgatctctcatagaagtcctccaagaattctagttctctcttaagcatgttgttccacaacttgctttttggatgggcgcccgcagcgatggccatcttgtgctgttccttagttattctcccaagcgtgaccgcttcaacattgaagcactagatgtagctcttgaggctttcatcttttgcgtgcttaatatttgccaagctagttctaataattgtgtagtgtcgggaagcatggtgttgggttaagaattcatcaagaaactatttctaggaagtgatagacccaagcgccaaccacttaaaccatttatgatggacccctgagtgttagcgtaaagcactagaaccttgctttgcttgtaaccctcttcatcttcattattttgttaaaggcatcttggtgatactttgggtcggtttttccctcgttagaaaaaatgttgtgttctatgaagtttgtgggcaaaggctttgctttgatctcccttgagaatggggatttctcatcaaaatcatcctcgtccaagttacaatcttcagatgtagctgatgctatcctacatcaaagatcctccatttccttatctaactcttttcttcttttagttagcttctctcggaggtctattatggatggcttctttctattttcatttcagtaaatctactacaagtgctcatttctccgtcatgaattttaatggagcttttctcttaagttgccctacactgctttggactcagtcttcttgggtcgcgatgagggttctagatccttttgggatagagctcttcgtgaggaagagtcaagggtggtttttgtggattacttagatattcctctatctcccagctcacttactcatcttttcccagcttgtagctctcttcgtccaactaaaggtgcttcggaatgacctcttgggagctcctcaatccctctttggatgcttgcaatagttttttctagttgcaagttgtctatcctgaactcattcatcgccttattatgcaatcaattcgagatcgagaactcaccgagtaaacttgcttttccattcccagttggtggtacaaggttctcgaatctcccaatcttggtagttgcaacaaccttatcggcaataagaccctgggccttcttatttctcttccttccataggcatgatggaggcggttgtgctatcttactgtcaattcatttgcttatcctcgagttaattattttcttctcttttcagggggtcacagccattcggcctcctctattctgaggtatttgctaatcttccaccccatcccccagtgcaggcagtggtgggttaggccttcaggtgattagttggaggccattaagtcgaacctccacttcttggttatgacgagagcgtcttagagtttcttctaaaattgtatgtaaaaaacaacatcgctttggagtgttgttccaataggcgacaccaaattactgacggtaagaactcgtcaacgaaatgttaaaaaccaaatgcaatattttaaactttgaattgaaaacaattaaagaaactctccaactctatccagaatatcacttttctattgatctttttttccaaaaaagtactctttaaaaatacctcaaagagcctatttatagtgtggctattagaatcacatcctagtattttagtatagtgaggtgatatagttagacattgggaatgtcaagattggttgggattttagaattttccaaaagtaccccttggtgacctttagtggttattagtattaaagggcaaaattgtcattttgccaatcattgttttaggctgatattatttgaataaaaacaacattgtctcatttgattttacaaaatatcaagttatgccaaaaatttcatttcactctcaactctctctctcatttttgaaacccctagaccagctagggtttggttccttttctctcaattcaagcaagtttctgcaagattaggagtgctttagctctaggtaagcttttgactttatccttttgagtttcttgaattttaaaaaaattgatatgcatgatgttgtggtttattttgttgtagctgctgtcagggtttgatgttactttctagaggttaaatatgttgtttaatgttgatttgaacatgttttagtggttgatagaagatttaaccaagttttgagtttt

SEQ ID NO: 26798 - DNA, 3043 bp, Cannabis sativa
gatcaggccaattcaagtacttcagaaggagataagtcatgttggaaactctttgctgaacgttgttgtcgcacatgcgtttgtcaaggccaccaagatgatcaccaatcaagtgtaagtgatcataggaatatttgcaagctcatttcgaattacatgttctatcttctagtaaacaaatcagtgatgttggcaccaattatgggcaactggaacatagtgtttggagatacttgtgcagatgccaatagatttttcgaaaagcataagctttcgcgtcatggtaaggtgtgtgcgaagattctatctgtgaaaccgaagattaaatcgacagctatgaaaggtgagagaagcaaatctgtgttctttgatgcttgtattcttgcgcaacaattacaaaatgagaaatcacagtggaagattatgagccaagtttgggtggaaatgttgtcatatgcagccattaattgcacgccattcgttcatgctaaacagcttagtaaaggaggagagctcttgacattcacatggctgctaatgaaccatttgggtttgggaacgcaatttgtcgagcaagaacaccatgctggaacaaagatggtcacagtcatttgaggaagaacccatatcacctcattattagtatttgtaaaccaatgaaatattggttaggtagttagttatattgtttagttagaaaactgtttttgtattctgttatgttagttaactttgtaactgaattgtattgaacattgtgcttataaataaggtgtcaagctaaccgaataggataagcttttctttgacaattcatttctaaagctttgctaatatgctatgcatttctcttcttttctcttcttctttctcttccaaactttactgccattgatatggtatcaatcgccactgaccactgtcttgcctgattctggtgatgacatgctttggtttgctgacacaagggccacaaaccctaatttttgccagattatgcaagcgggccgcgacactacaaaagcatgttgtgacccgtgtctttttaactagggatgtatataaacttttataaactgcccaatccaaataacccgcccaaaccaaaccgagataccccacgaaaaatacaaaccgaaaaactcaaccaaaatataacccgcctaatctttatattaggcgggattgggcgggttgaaaataataccaacccgcccaatccacccgaactaacctaaccaacccacttaaggggtttttttttatatatttatatatttttatgatagatatttatataccatataatttatatgactatttaaaagatatattaaatataaagttgaaactaatatattttttatggtggttgattttaactttaaattcaatctaaatatatttatttcattattacaattaactaaaatataataattattgtaaaaataaaaaaaaaatacttgtggttggtctggacaagttaacctgaccaaatcgactaatttcattgggcgggttacaatttttgtttttttaggctcacttagatttttgcaacccgatctttacattgagttgaataaaatgtagcataaaccgaccaacgtacacccttatttttaacacgcccagggttttccaaacacaagaggcaagccacgacactacaagggcatgtcgcaagctccaaattttgagggccttctgcctcaacattgaatcccaatgttgaggccttcctatagacttccaaatcacgacatttttgccaaatttttaccttttagcaccctgacattagatttccatgtcgaggtgctactttacattttccaattctttaacattaaaagcttcaatcgcaccgaatctattgaagtttttttttttttttttaattcatctcattatgctttagtgacaagactttatttaattcatcatttctttaacaattttcctcaaattttttctcttctttttcactactaaacctgaaaaaatattaacaaccacaagtgtaaaattgcacaaaacacaactaaaacatactaaaaaaaactttaaaaatctacttaaaaataatactaattaagtcctaacaaagacctccaattttgtacttcatgtcagcaaggaaaaagtcacacgcttccctttccaacatccaatacatgtgccactcaacctttggtccttattcacactgatttatgggaaccttcccatgttcaatcaaaacaaggctacaagtatcgtgttcactttttggatgattacagcaggtacaacttgatctatctacttgtgtatgtaaatgatattctaataataagtccaaatatatccttggtcaatcaggatttcataatgagtttatattacaagatttgagaccagttcattatttcctaggagtggagacatacaaagatgcaaatgggatgtacttgagtcaaagcaagtacataattgacttacttctaagattgcatatggaaggtgcaaagagttgttcaaacccaacaagttctatttctaaactgagcttacttgatggtgatccttttgaagatagcacactaggggtacttcagtatctaagcctcacaagacctgatgttgctttcatcactaacaagctcagttagtttctacgtgctccaattgtcaaatattgggaagcatgcaagaggttactcatatatctcaaaggcacattaatagaatacttatggcttaaaccaactactgattaaagtcttcagggatagagtgatgcagactgggccagctgcatcgataatagaagatcaacaagaggataccttatgtttttaggacaaaacttagtatcttggccagcaaagaagtaataagttgttgctcgatatagtactgagagtgaatttagggcacttgctaatacggcttcagaaataagatggattatctctttattgtctgaattacaagtccctatctctcacactccaatgctttgggttgacaatcaaagtgccactgcacttgctgc

SEQ ID NO: 26799 - DNA, 1507 bp, Cannabis sativa
tatatatacacaacaaagtaattattaagagattatgatctccatttgtaactatattcatattaagagattatgattatgagatataattggtaaatataacagtcttattagattcagcccacgtttttctgttttcataaagttgctcaataattatgttaagttttcatatttgtggatcaattatttgtatttataacaaccaaaatcaatggacaccaatagcataacataacatgaatgaataattttattgatgatgttctaattggattacaactgaattccaagcattctttacaaagaaaagatagaatcttggggctgtaaaataatatgaagtgggcataattaaaacacatacagactagtaattctcaaatctagctatatacaatttctaacctaacctagtccactaaaaaaagagtatggaactttcttcacaatgaagagggacaaaatcatatcaccacctttgagggattattatcactacaacaatagagaacaaccttcctatatgcatacatgcaagttattagtaggttcgaacctttcaacccctagcaccaagcaaggggtacccaaaagggccaaaactatgctcgacttgggtattgggtgctaagtttgtgcgtaaggcccacttagcccaattgcaaaaataaaattctttttttttactaaaaatcgaaagctttattaattaattcaaaacaatagaacgtacttcagcggaacaatcctccaattgaagcacacagcttgtagagaagcaagagtctcttgccaagcaatgagccaacttagcacaaccaacttggcaagagtctgtgctaagttggctcattgcttggcaagaaactcttgtttgcagatcgtttaacaaaacacaactcaatatatgagaaaactaaaagcaaattacggacatcttgaacaagtaaactaaactgagaaatcatagaaaatttactttagatagcttggacacagacgaagctatctgtttccaaaataacgtggtcccatggatgatatacaatccaacttaaagcttctttgatgtctattatttccgcaatttcatgttgaatacggccaatcttccctttagtgaaagcttatagcatattaccatgacgatcccgagctacgcaacccacaccaaatcgaccctcctgatcaaaaaagtccatcaacattaacttaatcttatgtaacataggtgcattctaatgctcataatgtcgcccccttcattcaaaggagacaaagaaagaccttttctaccttgagcatatttatactgatcaaacatgtttttcgctgatacaacaatattagatgcaacccaatttttttgttgccaaacaaaattattttaaaattacatattttattttattaattttaaaaattattatatatattttttctaaataagaactcaaaaatattatttttgtatgactaactaaattttaagattaatcctgta

SEQ ID NO: 26800 - DNA, 1708 bp, Cannabis sativa
aaaaagttaccaaacgcaccctaagtaaaataagtgtgaacagttaggcgtgtttccaaatcattcataattaatgagaagcaatatttcagaagtctcaaaacaaaacatttactatctcgattgtgtttgagcaatagcacattctaaaactgtaattatggcttctcatggtacaaaatgagaaaggctgctaacatacttggggattgaatggggaagctgagcctcaaattttgctggcccatattgttcatggtttcttctggtggtagcagaagtctgatgaccttttccgcagcagcaatctgttcttcttgaaggtgatcgttatttattaagtcactgcaattacaaagtactagccagttaatgaacaagcacaataaaactgtaacattgagattcatgttaaattattagagttatttctaggagccatctgggtgcattaaagtagatgacggtgagcaaataatctgtagaacttgcagaccacatcgaaatatgttaaaggccaaaacatttgatgttactcatcattggaaatttttttcaacttctaagtatattttccatataattccactgaattgtgagctctcaatgaacttaaaaatgttaacgaggtaagaaactcaatcatagtggtagataagtaccacaagagatcaaatcccagactacctgcaaggaaactagggtctgaacattcattgaaatagttataaggcataaacattgtaagcagagcaatactgcattatatgttactcataaacatctgccatgctgcttaatcaataatcaatatcggagaaaaaaatgttttcaatggaagaaaaaaaaaagttgcttacgttaataatgtagccagttttgtgtgtgtgcatgaatggaagagagcttcagggatgatagctgaatccataagaatgttgggaagggaaacatagcatatctttgctttatatcgaataaaccactcagttaggaaatgggctcgataagctacaacacatggtacctgtgcaagctgcatctccacagcaactgtaccggatgtacatagtgaaaccttactcgcctgcaagttgtttagctttttttttaatataagacatttgacatattgacaatctaattaggtgtaaatagatacaagactaggaacttggtttcagctgaatcccattctttcttcctccataacatgttatatgttgatgctaaacagctcctaagataatcaatttcgaatttagagaaatttagaacatggcttagctaaataacaatgtttccagaccaccccttaatgggtcaacaacactacagagcattagaaccaggttaatatatagatccacaaactattggattattccaaagagaatttgccaattacacatttggtcacagaacaacaaggggacacaaacacacacactcataaagggtaaaatcagacatgcataattctgcaaacaatcttttgaattgactaatgtgattgggttagaaatcacacaaggagcttcttccagccacaataatcaacacagtatacttccataaaaaaaatcacttaaaagtaaacaaggtaaaacttattcaatgtataaataatattcactcacacaatactttttcttacacttaatgcatcatatttcaggtgatgggatccccctggaaccaatatggc

SEQ ID NO: 26801 - DNA, 3336 bp, Cannabis sativa
  modified_base (3239)..(3241): a, c, t, g, unknown or other
caatcaagcaagaaatcaaacttttcaaacttaacatacataacaaccccttcagcttccacaccctccttttgcataaatatcaactgcttttaatggctgcccacttcacacaaacccgatcataaaatccctttttgacattttattgaacaagctcactacatcatttattctcccacacttggcaatggcatactaaatacttgctaaacttattgacacaatatgaaatcagcacgatcctgaaggtaaaggtacgagcacgatctaaattggtacgatacgaaaaatataaacttaagcaggacacaatattataagtccagacatgacctgtaaacatgaatagactagtctaaaaatacaaatatattagtttgaaagtccgttcaaaaatctgataatttgataataataatgataaatatttagttatcaactatatataaattaaaataatattaaattctaataattataattttttatatgatcgtgtgtaactattgttgaaaattatattaaagtaatcagatcacgacctcgattctaaatttgggagtcgaacttatattggtgttgtggtactaaatcaaatacgtagcggaataatttttttttgattatcatcataccacatcctcaagatcaccatatatatatatacattaaatctaaaataaatagataaaaaaaaaatttacctcttgaaacctaccagggtatcgttgtttcttttcatatattgtatccttgaatgatgacaaagaactcacaccgtagtcttccaaatctttcaccacacacaaggactagtatgtgctagtaagatataatgtatacggagttcttagtttaattcttaacacataagtaagaactctttttggagtgatgatggaaaaaaaattaatgtgattaattgtttttagacttctcaaaaataatacttcatacactatacataaattaaaactaataaagcttttatttaatttaaatatttaaacacaaataaattattatataatagttaattatttgaattaatatttataactaattctgttcatctcttatagctgatttgaggaaatctctcaactacttgaaataatatttcaattacttggaaaaaatctctcaactactatgagagaatatctcaacgaatttaaatatctataactacttttcaaattcaaattcaaatagatatttattttttaaattaattaattaacccaaaaataacacagtacaaatcatgccacctatgtcttaataagatattggtagtgtcttttgtcaagacaacttttatctccccaatttatttaattaataaatttagaaataaaatacttactgcaaataactaattactatccctacccttgacagtgttttaaggtggtaatccgagggctatggacctataattctaagctccaataaattatattatttattgaatctcatcaaccaaataatattatttattaattctatgattactctactataaatatggaattgagctcttagtaattatagaattatatttgttgagttttactacagtgtccattgatataatcaattccactaattatccctccatatgtcggtttgtaattagttttggtgaaattaatgttttactcttctaattacttctatatcttttagtaccgttaattcactagtaaaaatataattaagatctaatttaagtttgtgtacaacttttcagttctagaattaacacttaaatgggaaccaacattcgatccgttaggaaagtcaggattctataattgtagattaagttcctagacatccatattattagattcctaaaatagaatttgtaagaatcatcttctttgagaaactttaatgagtgaataagagaaactaataacataaacagaagttcataattactcaggattaaggccgatctactattgatcatctttatgatatgaattaggtctttaaggtagacgatatgtttgtaaataacttaattacatatcggtccttatcatatataatcttgaatatatacacactttcacttagatgtcatactacatcagtaatctgaatcgagattacttgtaccgaataacgagcaccagtgaaccacgctatcaaccgttgattaaagatttcattatttaatttgttgttgactattttattcattgctaagtgatcttaattctccataactttaagcccctcttaaaactcgaaattaggatttaacaaccctaatttttgcattctgaccatagcgggccgcgacattgaccctccatgttgcggccattgaaggccatttttaggtagcaaacttcctaatgcaatgactgataatattttagacataactctatcaatattgatagaaaaatgatgattcaatatgttttagaaagttaaaagagagatctagaacttttattcacaattttttttttttaagtgagtcattcatagtcaaaaactagattgaagctttagacttgattttcgatcacaaactgagcgtgatgagcattcaaaacttaaactatttcacccattatatcttagaattccaagttccatgataaattcatcatattcatcttatttaacatgtttcttctcattttaaattcattatatgaattttaccatttaaacctgaaataagtaaaaaaaacaagtgtaattctgcacaaaatgaatataatcaattgaggcacatatctaaaacacttcataaaatgcaccttaaactagcttatcacccttaaaatattataatacatgttaatacataccattttttaagtattcaataatacgattcatgttaaaatttatgattgaaataactgataatacaatacaaaattcaaccttgttaatacatgttctgttaccatttttaagttaatacatgttctgttttttttttttttttgatacaatacaaccttgttatacgatatgccaaacgagtcttaagatataaaatatacacattatgacatgttatttaaacgtataattaaataataaatcacactaagaaatatagaagtttatgttgacgacatgcttgaaatttaagacatccgaagagcacaatatagacttcgaggaagccttctcagttctccaaccttaaagttttagtcgtgatcatatctattgtgacagtcagtagtccnnngatccgtaaggggaaatactgggtaagctatgcaatcccacatcgcttgggaaaggtcaagtgggatgattctgagactgtataggtatgggact

SEQ ID NO: 26802 - DNA, 4144 bp, Cannabis sativa
ggcaaggctaaggttgagcagccgtgagagcgagaggatgaagattgtacatgtcggggcggttaggcatggagcgtacggtgtttgggacaactgggcatcttttgtatagtcgctaggcgataacttttatactatgcactttaaaacttttgtaaatattttgttaacgggatcgcagtttaacataagtaaattattttgggtatttataaataatgaaataaagttttaattattcacgattttcaataaactcgttgttagcaatgagctgaataattaagttaaaaatcacattagcacacttaaaactagttgggtgtttcacttagttaaagtaaacagccttgctggagtgggttttgtagttgacttatgctcctctttcttaagctgcaggcaatctcttttatagtgtcttgacaacccacactgaaaacatccttgccctctacactgacccagattgttttttttttttttacaattgggacactctgagtaaatgtatcgagtttcagaaccaccttgacggttgcctcgaccgtggttccctcaaaaacttttattctgacttgagccaccgggtgcaaatggtgcctttcttttctgatcggtggtcgagccactaccaccctaccataactagaggtaggaggagtaggggctccaccaacaacttgagtccctcgagactactgggtgcactcaactgcgccctcagctcgcagtgccattcccaccatgtcagcatagttggtgttgtcattagtagtaatcacaagatcatgttttattttgggtttaatccatccaggtacttttctttcttattgaaatcggttggcatgattcttgaggccaacctagccaattgatcgaactgagttgtgtattcagtaactctcatattctccttctgtgtcaactgagtaaattcctttctttttgcacttctaccgcctcgttgtagtactttgcgttgaacaactcctggaattcttcccaggttacagtagtaacattatgagtcatggacaccatgtcctaccaaaccagggcatcctcttggaattgggatgtggcacaggccactatgtcgttgccggtgacgcccataaaattcaaaattcttataataaccgtcagccactacttggctttcatcaaatcgggacctcccagaaagattggccgtgcctgcttgcgaaacctttcatacaatggtttcatcgattcattacagcaatcagccctactagcacaacaggggcaggagccactggcatttctggactaggctttgcaggagctccctgctgcctcaagcatctgatttcttcctctttttcattgattctaacttgcattgctgcaaacctattttcccattcctgggcacactgcggtgggttaacatctctccgaccacgtgccctacttctagggcctctacctcagccacgaacatttgagggaatctgagctacctgaccgccactagatccgaccaagttaccctagctccaagtgtttcgcttggcgtccattctattagaacaacctacaaaataaagagtagtctagtcaaatcgtgatcaagaataacttactgattaccgcttattttggaaattaaaacatgcacctattcagctatcaggctactaacatgcttcctatcaggcttttcttaaatcatactattataataaggcttactgaaccgtgagtcgagctgatcgctgatgatggttgtatatgtcgtgataatctttggaagacaacctggcagctttgataccaaattgtaacaccttactattttaggcgtgttatcgtgattttttaacttaattctgtagctcattgctaatcaatgagtttattaacaatcgtgaataattaaaactttatttaactatttataaatacccaaaataatttacttatattaaatcgtgatcccattaacaaaatatttccaaaagttttacagtgtatagtacaaaagttttcacctagcgactatacaaaagatgcccaactatccctaagaccgtatgctctaggcctaaccgcctcgacatgtacaatcttcattcgctcgctgtcatggctgctcaaccttagccttgcctttacctacacatgcaaacagtatctgtgagttaatagactcattaagaaaatcataaacaatatcattccaataacccaaattataatcaggtgtccatacacccaactttaaccctatccctgtgtctaacatagtcctgagtcaagaacgttcgtacgacagtactattgaccattatatcagcctatacttggtacggtagtcatactctagtcgtaccaatgtgatactgtcaagtagtacagtactattgaccataatatcagcctatacttgatactctagtcgtaccgatgtgatactgtcgagtagtacttaagccacatacatttatcgatatacaatataatactaaatatactaatactgctaatataatgtaatctaacaagcttaactaacatgtacgctaaacatgtaaccacatatgcatatcgtcatactaatcttacctcatttccgagtttaggtgtgctgggcaacctgagtggagctgctgctcgatgatttacaggcccctaaatcacattattcgtaaaactaatgagtgacacactacatcacttttcaatgacttaaacttgaagcttaaagtttccatatcaatggataacatggtaatacgctaaatattgaaaaaagtggaaaaactagggttcacgaaaatgccccaactggcagaccggttccccaaccagaattccagttctgttggatttcttggggaccaaccggtcgaccggttcctataggtccctctgaactggaattccagtttagtggaggaaacacacaaaatcaccccacattttcaaattaacctcaaatcaaaccaaaccttctagacctgctaattacaccatagtgaacataaaccatgcaataaaaaaccctaacacatcaagaatcacgaaccaccattagagagcaaagctactgttcaaaaactccaacacaacaacaacctgtaaaatcaatataacagagcctgaataacacaagcacaacactagaactcaaattaaacacacctttataaatatagaaccctaactcattatttcatgcaacaatcttaactttaagattaagaaataaaaaataaaggtactaagggattataccttcgattgaaacactacaagcctgttaaaatcgttgaattggagctggaaaactccttaacctcttgctggttctaaggtgcttgagagaaaaaaagagagtttggagagagagaagaattttcttcatttttccttattttaaataaatgaatcaatataatgtattaatctaactaatattaacattaatagatcaaattaaggcttaatttaactcacaaaaggacaaaagtaagaaatgccaaaaagacaattttgcccttacacacaccagaaagcacccttgtcacttaagggtattttggtcatttcaactagctcgaatagttcccgatattctcaatgtctaactaacttgccctgctactacttaaatactaaaatgtgattatactagccaaacgccacgttccaatgttgctgagtacataacatacaaaaacataaaatatcatatatgacataaaaaatacaccctgaatttaaataaatctccataaaatgataatttataattaatattctagttttataattaaaccctaattatctactaatttccaaaaacaaaactaagcggtctttacattttagctccaactgcttaaacttggattgctatctagcgagttgagtcatatggttggacagaagggtgaagattgtccaagttgaagatgaagctcgttatcttctttaatttctgaattaattgttgtagttattaaataatttaatttcaattattagtataggtattttattccctatttcataaatttccaaacaattcattatgacaattttgagagtattaataaatttttctctttaagaggttttcattatgaattacttttttttttttttt

SEQ ID NO: 26803 - DNA, 5016 bp, Cannabis sativa
  modified_base (4352)..(4352): a, c, t, g, unknown or other
tcaattttgtatgcattctaaattttattccattcccattcctattcttatatttttattcctccctactcatttctcaatctatatgcagcttttccattcaatctaaaataagttaaatgaagaacaacaataacattaatgatgacaaaaaataataataataacattaatagatgaaagggattgaagattgtgtccttgttattcatcccaaatcagctaaatatttatctcataaacaagtaactttttttttttggctttttacaaaaccaaataacttgttagtgaataatatgatatgcaaaatttgtttatcaaatgttctctacttgggatttttcactatgatctcttgaacatatagaagtaaagcaaaatagatttttttaattatatttgtcagttttacttatataggaatggaatggaataaaatttagaatgcatacaaaattgacgccacccggcctctatgtgggtccgctcctatttttattggccttaacaactttgtgtataacgtgcctaccaaactttaaagaaaaacaagattttactttttcatatgaaagaaaataaatttattttattttttgtaagatgtaagagaaattacaaatcataataggtgttgaagataattattaagaaagctatttcactcgtaaaaattttcataaagactattttcacaaaacactcataatgggaaattaacaacaacaacaacccaggtgaatgcaatgatagcttattcttttcaaatatgtttggaagtatagcttcagatttataagcataccagtagtgaagtatgtgttatatatctttgttctttgatgtttttggcaacatataagtgaaacatgtttttccattcataaagagggaactgtttttgtctctgactctctttggacaatgttatgcaatgatatgaaattttgtacttgtgtttatatattttgactcactgacaaaaattccctccttccattaatgataagactgtaattaaggattgtttaaattctaccacatatttctttgtctcctcccttgaaccttattgaactaagattcccactatctgtctaacttgtcttgttatatagattttatttctaaagctgtcaactttttccactctgtgacactaggaaacaatcttcttcatgctctttttactctattattttttcacaagattcttcaagatggtacatttatataatgtcaagacaaattcataaagcattatcagtttttattgctctgttaatctacatatagctacaacatactgaaattcttctgtaatgcttgcttttacagaagggttttttctaaaaattatgaagcaaatggccaaaccccataactctcccactttttttaaaaaaatttaacagtacataaccacatgttcgatagtcctttgtacttggctgcaacatctctatttacaacccaaatctattgctactcctagtcctagtattgcattgagattcagaagtagctgaaatgccaagctaacaaagtaccttttttgttggagtttttggggactttgtagccagtaataagaatttgtatgggattatcttatcaagctctgatatgtgaatatggattatccagttgttttgatttgagttctcaaatacttgggacttggacttggtctttggctctgaaatctagtgaagccagaggaattcttaacaagtggaattagtgactgtacaacatcagtcattagaggtctataatctgcttctggctgtacacacatggctgcaatagcagctatctataaaatcaatgaaatgagaagaaaataaagttagttgtctgaataataatgggaccattttcaaaggaaaaagaaaagtctggtgttagtgggagaagcagactttacctgaattagatccttctttgagtagtggccttttaaagctgggtcaaccatctccactagtttttctctgttggttaatcctggaagagcctgaaaacacaaaccaaacaaaaaacttacacaaatcaataagtgggaaaaacagaaaaacaagaaccacatgagtccatgaccaaggctattaatgcttctacctgaatttgtacaagtcacaaccaataactaaataaacatggcaatgtatttattgcattgattattagtttttttttagtattattgttgttgttgttgaacatgtactttatatctttagtaaaatctatgccattcaaactgatactttattcagaagaaaaatgaccagttgtgtaaactaacccaagaaacaaggacatgttctccagggggtcttttggtatcaactggaacacgacccgttagcagctctagaagaacaactccatagctgtacacatcagattttgttgtaagcttccctgttgaagcatacctacatttaccaaaatcagcttaatcagttcacaacttaaccatatagctttctttgtttgtttcaatagaaaaaaggtggcagtttagtcaaaagggtagctagctgtgatttcttagtagacattaaactattttgtttctatctttttttttctataaattatgtttcatgtcatgtcatgtacatggttttagttttagaacattgcattcatgatgctataatgataatgagaaaagacataggctctcactctggtgccaaatatcctgtggtccccaacacacgcgttgaaatctgaccgttgatcttatccgaccccattttggccagtccgaaatctgatacttttgccctgaaattagtatccaagagaacattgctgcacttgaaatcacgatggatgattggtgggatagcatgctcatggagtgtctcaagagccatggcacaatcaagggctatcctcaatcgagttccccaatccaacggctgatgttcttcgtgaagataatggtggagagttccactgggcatatattcaaatataaggagcctatgatgttggtcagcacaatagccaagcaactccactaagtatggagagtgcaacatgcttagcaagtctacctgcaatgacaagcatctttaggcttcattaaaatacacttttcattcacatccatgtgcatttgcattgcatatactatattactattaaataatgtggcttaagagaaagaaaagcattaaaagtcaaacatcaaggcttgtttttcaatttcaagtgaatataatacactatattatatactagggaaggtaggaggcttgtgagttttgttttcttgtataaagatctattctgcatggggtatcaatctcttctaatctatcttaaattatttgtttgaccttctgatgaaggtattaaactacatatctaataatgacaaaacaacaaaagataacaaaagctaataaatgaagtgacttacctcaaccctgaaagcacgctctccttgcttaccagccctatgaagcatcttaatagctgcctctgtaccatcactaaggacccccctatacaccaccccaaaacctcctctgccaataacatttgcttcactaaaacctgttgtggccacttcaagctctttgtatgtgaaaatttgaactgccttgtatctttgtggttgagtcttgcctaaatgacctccatagaggcaaccacctctcagttctgcaacattttcaaatacccagatcagaaatccgtagttaaaatgaatggaaaatatcaaaaatggaaaaaagtttagacctttttctaatttagaaatatgggtttctttaagaagggtaaaataaaggtgtttcctttatcactcatttgtggtccatattatgtttgtgttctgtattgggaaataaggaatgataataataataataatcttacttgaaaacaatggagtaaatttaattcatctaccaaattggaatataaaagttgtgaaaggaaaggtacacttacctgggctagagttgaagtttatggaagtttgagtaataaaactgccacttccattgttgatgctattactttcattgtaaagggcactgttttttttgggtgctgatttgagtcgtttaagcattaatatgatgagaaaaatggcaagaaggaccagaactgagaagactgatatgatgattatgacaagggattttgaaggaaaagttccatggtggtggtgatgatgatggtggccttggttattatgaaaatgtgaagagtgttgtttaagggtattgttggccagaccaggtggctctgcagcttcaccagttgtgttaacttccatgaatgtaagagagaaaatgagagagagagagagngagagagagagagagatttgcttggaaaattgtgagtatacaacttcacaagtttgtatatttagtagaggagttgggttggtttcccttaagggaaggaagtcattctttttctctctcttgttaccctttaaaaatggtcatatttcttcttcacatgaatctctctctttcatttcgtcccttctattgtagtttcttaaggaattgtctttctctaaatcagaagactttgaagcttttgtcagtttgcatattccaagcacataattatctactcattaataaacaaaatccacagctcttgaataaagcatcatctttacttacttgactatgtagatattagataatgacttattaagaaagaaagagttggcaactgtgccagctagctttgtcaccaccaataatataatatcatgggccacataaattagagagagagagagagagatatctattgaaaagatttgtgaaatgagctcccctatattctgaattttcagtcacatgatttcaaaacaccatagcaggtaatgcaatcactttctaaaatcattagaatgaaaagtgaaaaagtctataaatagctaattgattggtgaaagcattaatgatgacctgaaagtcaaaaatcatcatttcggcagaattgattacc

SEQ ID NO: 26804 - DNA, 1614 bp, Cannabis sativa
tttttttttttaaaaaaaagtaaactttatgaagaagggaatcaagggatattgtccaaaaattaccaaatattttatgtaacattgcacataggtatgatttaaatactataaaataagtgatgtttatatatataaaatattgtagcatattatctgcaatgctaaaagagtaatattaaattgtcaaattaccaagttgatagggtcaaaattcttaattttcaatttttatttttgatggtactattatatgctttgaagaacaaatcatcgtcataatgtgttggagatgctcttgatgaaggtaaattttcctctatggttgaatttgtttggcctttttttaaaaagacagccatataattttgaagaatatttattaaataatagtcaattttcagtttcctctatacttgtcataagcatttcatcttgacctgcacctctcttgggttttgggtttgcaaattacaggtttgaccttgtccacatgtaagctaacattatactaatttattttgtttttaaataattctttctgtatatcatagcaaaatacacataatttaatcaatttgccgtcttaagccacctttcttggaacatttcgaaacttcctaaggactctttattatagacgagaaacttcgcacgggataatagtttattatgtcttttaaattttataattgttttggataaagttggtttgcatcaaaatgcattaattataattttcatgactcgtgatctagtcttaaatctcagttaagcatcaagaaaatcgtgtatctatatactgtggtcaaaattgctattcaatttttagcctattttctatgaagtagtttttcaaatttaattaaaaaaaattatgaccgagtgaagaaaggaggaaaaaaaaagatatatgtcggttgatttaggatttcttcaaataacatttttgtagaaaagaaaaataattgatgatatatggtatgacgtatgaacataataggcttaaagttggcgtaggattcttctcacgcaggtgttgtgttgtgttgtgtatgtatcttagccgcgtatggtatgtatgggttaagatgagtatcaaaatactcaaacactgtattcgctttttgaccttacacgttgaatagtttattatgatatcagcagtgacggacacatgtcatgattcaattgattgggactttcctatgaaatcatttggttggtcccccatttgactcactattaatactcatatttttaaagaaaattaagtactttttttcttcaccaaaagtagcaaatgtccaacttctcattagattagtattggttggttatatttttgaaaaaaatttgtacaacaccaccttaaatgttgtttcgacacacacccgtatttgttccgctatccagaaaagaaatttagttattgataaaaataaaaatgaaataaattcaagaatatctttttatttatttatttatttattaatcaaaaatacttctaaattatatttgtgacagtcacgtgatccgtaaagagaaactgtaggactacacagttgaagaaggcttaaatggattaattggtactacctatatcaacaaggt

SEQ ID NO: 26805 - DNA, 2860 bp, Cannabis sativa
ttatcattagggcaaaaaaagaaaaagttgatattttgattgattgagacaaaatcatcatcaaaagaaacaaacccaaatcacaattcaccttttctcaaattgggattctctcaaaatccaatctttccaaccatgagtcgccggattctcgatgcagctctaacagttccgtcgccggcaacggcaacaacaaccactaacggaaacagaaccagagattccttcatcagcgaaacgaatttcgacaccaacatggtaataatcttagccgctttgctctgcgctttgatctgtgctctgggtctgaactcaatcgttcgatgtgttcttcgttgtagtaaccggttaaccgaaacgccggagcaagctgcggcgagacttgcgagaactgggttgaaaaaaagccgactccggcaattacccgtggctgtttacgggtctgggatggagattccgagcagtgaatgtccgatctgtttgggggattttgaagatggtgagaaagttagggttttgccgaaatgtaatcatgggtttcatgtgaggtgtattgatacttggttggtttcgaattcttcttgtccgaattgtcgtcattcgcttttggaacagaagcaaacgacgtcgtttttggttagggaaagaaatgaaaatgaaaacccagaaaatggaggagaaagttcgtcggaaaatgaaagaaaagagttgccggaaaatgtttccggtggtgaagaaggtagggttgttataacggttcatgatgagttaagctaagtttaagctttgttattattattagaaaatgtttttttttttcttgaaaaaaaaaaattaatgaaggaaaagggttgttgtgattattgttatgataatcatgattagtctttgattttttttttttttttaagattttagaagtaagggaagatttagtagagagtggtgaaaaagtgtagtattttgagttaatttatgtaattaaattttgattgaaatgaaaattatgaaatgatatttataaatatatatcattattgaacttacttctttaaatttaaattttaagtaaaatcttattgaattattactaaatttaaagtatcatcaaacttatttatatttaatatttttatttcaaaatatattttaaaattaaaaaaaattataaaaataaaaaaatattataaattttgaaataaatttttataatttttaaataataatattataatttatatgtactaatataaatatagttagttaattttaaaaaatagatgatactttaaatttattaataaatcagtaactttgaaagactaactacaaatagattaataaactttttttatgataatactttttaagtttatttttattttgtttgtaaatttaatcatttaataattaaattataactgtatacatttgtatattaatatatttggtatgtttttattgaatttgaagtttaagtattcacagcaacaatattctcaagtgatatttaatagtgaaatctaattaacagttcaaatttacaatttaaaggtgtattgctaaaaaaaaaaataaaaaattaagtgtacaaaaacttaaagcaactaattatttttttaataaacaattatgaaaagatagttgtggagatattttgtacttatgaaaaagattgattatataatgaaacaacaaattttgtatttttctatatatacaaaataaaaagacattatgatatcattatgtttaattattaagattttgtggtgatattttagggatggttatcaatattttccaactaatattgatatttgtgggtatattttagcatttcttatgcattatttaagtatgtttgtgtttagaagtaagttaagtaggtgagaatgtgagatgatgagattagcactaaaagcaaagaaaagaaaatggtttattgtaatttaatacttcttaaattgatttagtagtttttttttttttttgggatacatggggaccatgttatcttaaagtgtatacacaaaccaaatattttttaaagtaataataaataaatttatataaaccaattagagtttgacaagattgagtcattttacacttttagactattgtttgaaaaatgagtattttgtataaatattcacaaaagacaaaacaccatcaaaatattcttcttcttctttttcccctaaaatagaccataaattataatagagagaagcactataaatttaattttcttaacatttaatgtgaacttgcttgtttagtgtgataatgtagacactaaacaatgctaaataaagatttgtttgtagtaaaaatgtgtaacctattcaccttttgcatttaagtccctaacacctttttctttacatattagtctccgacctattaaaaagatagcaatattggtcttttttagttcttcatttattttttttattaaatatatagaggatatagtttggtatgaggagatcacgatttttgttttattaaaaaagttgaaatgggtgatttaataatctataactgcaataggtgtgctactaaataattaaattttatttttagcactgtaaattataaataattttttttttgtataagtgattttagaaaattagaatgtacacgattttgaaagaaaaaaatattagactaagcacgacggtttttgaaggtgtgttataaaattaccctaaaaatcataactctacaaagttatagttagtgaaaaatcttattttcttaaatcaaaaagggaaatttacatagtatactaacttttatcatttttttacaaaattattgccaaacggtattttttacttttttactg

SEQ ID NO: 26806 - DNA, 1738 bp, Cannabis sativa
acaaaaatcacaaattgttgtgactaaaactaaattagtgacaatttatatgtaaatattatatcttagtcacaagtaattttttgttgtcactaaaagtcatatttagtcacaaaaaatttattgtaactaaaaagttattactaaaagtaatttttaatagtgtatatttgtaaatactagctaaatttcacctaaataccaattgatattattattgtatggacatatggtatatttttattagtttaaataatattaattatttataaattatattattttatatagttgatagttaatggtgaaatttaaccgatattttaaatttataaataaaaattaaattaaaaaaatattatcaaaaaaactaaaaaaattatctataaattgaaacgtaagaaaatttggttgaaaattattcatattaaaaaaaagttaattagaaatgttaaaaaattatttcaatttgatggcacataatttaagatgatagaccaaaaataaaaaagataatgcattatttataagcaattactaagaaagaaaaaagtttgcttataaattcaaaccatgtaatttataaacaattcaaaaacgtggtatggagccaataaagttaatggtatccaaaaattcgaagagaatatgcttatcaacattaatgtttatatttcatataagattatttatgatctgtaatagtatataatataaaaaaatatatatttttttagtaaaaatacaacgaacaaatgaagcatagatgattgtggtttgtgtatgaagtttgactaataatattgaaaaaattaaaaaaatatatatatattatattatatttgtcggtattactctgaacatgttataatgccagataaaaatgagttatatatatatattattaattactaaaaatatttttcttgggagaagatattattatgtgatatcacgtggaaaccacgtgaggggaggccgtagtcatggcgcctatgacgtgacgtggaccattttttcgttgaggtgggacccggccaagtaggaagaggcctgagtgtgacacgtgtcattgagtccgtacagtgaagaaaatggaagagttggtgggacgaggaaaatggttggagggaaaactgagctgagccccctctcctcccaacacattatttcatttatttataaaataaataaattaaaatgtgaaacgtgtctcctcaactttatccacttttaacaacctcttccaataattacacttgttctttatgataattaccattaatgccattcatagtaataagaattttttaatttaagaaaattgcctataaattggatgtgttgatttataatttggtgttttaatatttttataaaattttgtgaaattataaataatttaatatgtcaaaactaaagttaaaataatttcttgtattgtgaaataaaataattagatttttttttttaaaacttcacataaattgttaatataaattttagttgagagtatcaaaagaatagaattgagagaagtaatttggtaagtatatttaaataaatacgataatggtaagaatagattagattgaattgaatctaaaatataaaatttacatttaatgtgaatttgatgtactatgagtaaaataatacaaatcaaattagataaacactcttattactaacatatcttaaaaaaaaatatatatatcagtatcaactcaaataaata

SEQ ID NO: 26807 - DNA, 5105 bp, Cannabis sativa
tatacagtccctcaaaccccgaatctcaatctcatctgttaaagaatcattacaaactatagttaacgttttgatatgacagaacctggatttttcaaatgacgaagttcattgagacttcacattttgattcgatgtttaaattcactcgttccaatctgccagctagatattgaatatgggatttgtgtgctcctaaatcttgtcgaagttgatttagagttgcttcccttgtagccttttcaagtacgagccctctgtatgaagaaaacaaaaaagtttcataaccaacataacagagtaatgcatcgttataatcttttacgagtcaactcacctgatctgcgtttctaggtccgaaatctttttagcatactcttgtttaactgactcctcaatcttccggcgctcctgcttacagaattcagcttctaagttctaagctgtaatatttatcatggatagagcttgtagtaaatgtttttcatcataaaaacatcttccccaaaatagttgacctccagtctatacgatagtttgatagagaaaaggcctggtcactaaaccaagccccaaattccattagctggattctttctgatcagaaaaaattattagatcaagcagggtggtggtttacatcttctttactgagacatccatcattcattctcttcaattgctcttttaagctctggcatgtagtacggtgttccaactataaaaccaaaatgaaagcggaaggggaaaaaaaggctttgtaagaacacaaaaccaaagcatgaacacaagcaaatctattgtaagaccaatatatgagtgaagaaaaaaatgatggacacacctgatcaacaacattgttaagtgattctgtgtagagcttagcaagtcgctcattttctgcaaggtgacagaacactctatttgagattgaaccaatatcatttagattagcaaagagtgcctttgaataagcaccagtcagtcatgcatgttatgaaagattgataacataaaaattagcaactagaagtttcttccctcttttttctgctgtgaaacctgcatagagctaatacatacaacactttccacaatcaacccactatctaacacacaatcaacccatctttatgtattgaagttaacaaatcaacatttggtaaatataatctaaaagcattaaaattttagttacaactttaaacatcgaatcttggtgcaaagtatgagtctgatccttcagcattgtcaaccaattagatttgttcactcagatagttaaaaaaggagttagcctactaactttatttatctctcactttaaagattggaacttggtttgtgaggcactttataaatcaggttcccaggaacctttattgattgatcagcctctgtagattggattagcttcggtactagtgtgtgagaatcagaaagagtgttacctaattctgaatgatttgtgaattcttcaagcctaagacaactttgcaaggctcgagtattctctcttgagggtgtaatctctttcttttgatagtggatttgactacaagcaatagcttttgaattaaatatcattgtcatccaccccataaatttcagcttctacaactggaaagactttagacaagtattgattcgaatccaacttggcaaaatttagtggcaagatacaaacggattcttggagtatctaataataacagttgaaagtgaattggaaaaaaaggcaaagaataatctacgaaaataagctgaagcaacaaaagttggaaatttaaagagagggaattttctgaccttgtttgagacttttgcaagcaagttccagagcttcacgcttcttgatttctccattggaattcgatttcagccgctggatctccattagggcgctcttaaagtccttacaaacgatcaaattcaccattgcaaccattaacacttggagttaactaaactttctgtttggttaccaagaaagcctatgaaactataataaaaatctcaatcattcaggaacctgatataattgatctgatctttctgtttcaaaatattaacaataaacgatgataatttgaaaactagaagggaattacctcttggatatggtcgaacgtggagagaagagaatccacttcttcaccaatcgttgcacttatagttcccgccattttcactgccctgtgtttgagtaggagattgtgagatggagatgtaggcagtgaaattgcaaaataccactcttattacttataaaacgacaattatatagaaaacgacaattgtctagaaacggcattatctacaaaaacgacaactgtgtgttagtctctttatatcatctctttcaaaacgacaattatctagaaaaacgacaactgtaaaaagtattgaaaatgaaaacggcaaatatcttgggcaacgacaactttaatgaaaaacgacaattgtattagaaaatttatgcatttgatttttttttttttttttttcccattaaaacacaccaaatatgtcatttagttaattaccaaaaccccttaattatccatttggaacttggaatggttaattctgaccaaatttaaatagtatcattcaattttctcaaaaaaaaaaaaagaaaaagaaaaatatatcattcaaaaaaagaaaaaattaaaacagtaaaatttacatagcaaccaaataaaaacaaaaattgaaataaaaataatttctattccgttttttaattagccgaaatatagactttcatagctaaatccttgtagttagttgtattgttccctttaaggcttctctcgcatggtggtctggtctggtctggtcccgcactggtaattggacatggccactattggcgccaccaattgcaagtactcatgtgagacagccgcccagacacttcaatggatccacgccatcgttgatttccttaaaccttattctttcttcgtgaatgctcatgtcgtcaattttttcaaggcagaagagaccccccactttctgtttgtttctcttgaaaaaacgcaggaaatttgtttcagtatgtttaagctgcatcgcttatagttattatttttatttttttcaggatagactgtgggaagcaattgacaaggaatggattgagtgtctacgcaaagaaccagtcgagaatcttcttcaaattccttctggagcagttcaggtttattttattgcattctgatttgaatttccgttgcattatgtgtattctcacatttcatacgtttttcattagtgctactactcgaatggtagaattttcattttttttttcttttcttttcccgatggaaggatcactggcctgcttcacttaggaactttattcttactttaagatctctggtgtttcctcgagaacaagcagatttacaaacggtatgttatccgagctctgtggtagtaactggtgtgaaacgattatttttcctttgctgggaagattcatattacaaagtcgcttaagagaacggtaataactggcttggttttgttttcataccatatacttaatttgacatatttaaaaacaccacgttgagttttgatgcgtttctactgtctagggagaaaaacgggcgtaagtgcaccctgaacactctaatttcttctagatgattaagaaaatgtgtctaatgttatcaggctttattttagataaggatgtgatttgtagtatgttgaaaagtgtgtaaggtttacaagtgttggagggttggaagtgtgaactgagaaatggaattgggattgtgtaaagcatgagggttggagtagattgttgaattgggagatgcagatttgtcaattttaattaattatttatttgttaaatattgtttgggaatgcatcttcttttgtaggaatttcaattactaatgtggtaacctatttcatttctgggtttggcaggtattacctgatctgaacatatgttcacttagtactgttcttgcacaaggcatgaatcagaagaaaaaacatgaagtaggttattaccttattgaatttgtgcctgacattttttatggtttgagaacctgattttcaagatgagcttttaaaagatatgttattgacatacttatctctgaaagagatatattttttgttttgagcaatgaatgttagtgatacttactgaagccaaatagttttatatgagcaggttgaagttctttctgcggtcgtcagttccatcactaactctgttacagctcacacaatagttgatgttggcgctggtcaggtacatttgcttttaaagaatctgtgtgatgactagtttgattgatgattaaacctgcttaaatgtttcattgtcttgcacctttttttttagttgcctaccttgtaagaaatgcgatcacgtcttacatagtaaaagtacccaataagatggatggtataactttaaaaggccactgggagactgaaatgttcccttgtggatacattagagtcctagcagttttaacagtaaagcagtgtgtcaaaagatttcctataaattataatgaaagtatttgagtagtttcttattttaagagaaatttattagctgtttcagccgtactttttttttcatcagaaaattgcaataaaataaaccctgtatttatttgtttttgtttatgtacaatgccatgttgttaatcaggttgctcttttagggttatcttgcacaagttctttcattccactaccagcactctgtaattgcaatagatgcttcttctcatcacggaagtgttacagatgcacgtgcagaacgaataaagagacattatacttctcagatgcgtaaatctgagtatgatattgaatctgtttcttgttttcttttcttttggaattcttttgtccagtttcatattcttctgtagtttaaattcttgttggatgattatgcctatttcatttattgtgcctcctaatcatggagttacatatctgttattccaaggagtcgtttgatgggttgaataacttgagttggaattttaatggtttattgttttgggagcatcttgatttgttattggaagtaggctgctta

SEQ ID NO: 26808 - DNA, 2378 bp, Cannabis sativa
atattcatggcgattggcgaggctaagcagcagccttcgccaaagaagcatcatcgccatcagccttcaaagaattactgtgaaattcagaagaagggtccggttgctggtgcataggaaaatttgtagtatccgctaagggtgaagctctggtgcaacatctcttcaaaatggtacagacatttcctcccgaagtggtaagctgtcttttattgaagaaggacgagagtcggttttctgttggcaaagttgaatcaacagggacggtcatggcagcaggagcatcagacatttggggcataagtgatgatgagttggttatgtgtaagtatgctggtggtatattcatggggataggaacaaaattatttgatataggtgtagtgggaggaggataagtggcaataggaatgggtggagtgggggctactggtggaatttcttgaggaagagaatggggagagaaggtagtggaatgtatgtccatgacttttttggtctgagatacaacattgcacgatttagtgcaaggaatggacttctgtaaagtatgattagtggtattctgggtatcatgcttatcaatgacaatgtctctcgatccagaagaggaagccagatcagtgttgaagttaccagcagatgtaggagggctaatcaattgcaaatgttggaaactcttattagcagtttcaaagatctgagtagactccataactcctttgcctttttcagtattagtaacccgaacaggagtagcaggcagtctcgggtgattgattatgggattgatagtatttcgagcaagacgagtaatgaatggccatggcccctcctttgagaaatcttggcgatatttgtcataactagacttaggcaaagacgatccttccatccagggaccataaggaagatcgggatgaagaccttcatctaacttttccaaaaaagaagggcatttgtcaaaaacatgaccaattataccacattcataatagaaatccggcagtcgttcatagcggtaatccaaccacatctcattagccatccaaggaaaggaaacaagttggccacggagcaaaggcttagacacatcaatacccactctcattctaagaaaaggtccccaaccttcgttaagcgagtcttcatgtacttctaagaaagtaccaaccatgttacccaggatttttgccaaagcttcagatttactaagaaaaggcagacgatatacttgtatccaaaagggagttatagtgtaagagtccattgaggcattttgcagaacacttggtggacataagatcatgtgttgattgtggaaatgccaaggttccttagagaggacccttcttaaatcaccttcacagccgaaggaaacagtgtatgaatcagtgttggaatcataatcagagatagacacttcaaatcgacccaaccattgagatatgatgaaattcttaaactgtttaggattataccctctcttagaaaagattcgacatagaagtcgatgaacaataggcctcggtggtggagtattaagaccagatagattgattacttccttctctctcacagacaaagcactagacatagttggaataaaattatccatggtgaataatcaaacaaaagcaatcagatagaagtgtagatggggaagacgaacatgaaggaattcaaaaacagaggaaggcgggagtagttatggtatagttatgaaagaagataatgggaagaacagttaaaaagaaaaaacagaataaactgccacagagcgacataaagggcagacaacgctcaatctgatcagatcaaattcagagtattcgatgttatatctcgcttgtatagttttcactcaaataaaatgaatctagttataatttaaataaaattaatattaagtctatatttttttaaggaaagaagattcaatgaaaataaaagaaaggggtaatataaaagagaataaaagatacaattatgaagcagtgtatattagaatcttttaatactaaattcataatataccttgaaacgatatttaaatatttttttttggaaaatgcgatatatatttaaatattagaaattgaaagtttttagcttatataaatagaaattagtctatacatttttaattatatatttagattttttttcaatggttagtaaaaaaactttaaatataaatgcttggttagatttacacaacttatttagttagaatatattctataatttatttttttactttttgtttatctttttcataggaattgttgctccagaattcgtccaaaatacgtggaccagtcgagagaggacacgtgggtcagataacttggaaagatttgctaagtctttgtgcg

SEQ ID NO: 26809 - DNA, 3804 bp, Cannabis sativa
  modified_base (2059)..(2059): a, c, t, g, unknown or other
  modified_base (3588)..(3600): a, c, t, g, unknown or other
aaacaaggttgctatccaaggcaggtcgcgcttgtcttattcaatcggtaggctcttcaatggctacttatgtagcagtctctgatgtcatccccaaaaaaatagcaagaagagtggataaagaactgcgtgacttctggtggggcgactcggcgacgaaaaaaacttggcatacaattgattggagctcaatctgtcaatcaaagttgcgggggggcctcgggtttagaagaattgaaactataaatacagcttttatccttaaatggggatggaaggctcttacggataaagacagcatgtgggggaccattatccaggcgaaataccttaatggaaggagtttcttggatgctgagattaataatggggactcaagcttttggaaagccatacaaagagctagatctctacttgttaatcaagtgtgtagaaagattggtaatggaaaggaaacgtctatttggttcgatccgtgggtgccttcttcaaactgaagacctacccctctcctagatgccactcatggagtggcatgggtgaatcagttcatgagggataatcggacatggaatgtgaacatggtgaaaagattgttcaatcgtagtgatgcaaaggcaattctgaatattcaacttccggaggacgatacaaaggatggctggatgtggatgggggaaccaagtggcctcttctcaattagattggcgtgccgtactattaggggtggcacttctatcactcaagcggatactaaatggaagataatatggaaatctgcgattcacccccgtttgaagctcatttggtggcagctggagagggatgtatttcaaactagaggtaaactagcaaactttatggatctaaatactgtgcactgccctatgtgtggtgaagatgtggagactatttttcacttgctgtggaaatgctccctggccaaagccatatggtttaactcatccatgggtcttcgagtagagttgatagatgtgaatgggtgggatcaatggaaagattggtttatggtggacactcacagaccaccaaacttaactttccttgagattattgtcacggctctttgtgtggtggaaactgtttggcaagagagaaactctatagtgcatagtcaattaagaagaccgatttcgaaggtggcgttcactgtcaacagtaaaattcgagatcatatcatggttgcatccaatgccgtggttgatttctgtgagtggcgtcccccgcctgagtcgtggctttgctgcaactatgacatagcctatgatgaagatggagtgatattagcgactgtggttcgagatgatcaaggctagattgttaccattaaaacacagagaagctcaactacggatctgctgattggggaagggcttgcggtgtgtatggcagccgagctgatgatagaaatgagggccaagtatgtcattttccagagtgataatgtggaggttaccagagatttatccacagacatcgggatagacatccactttaaattgactcatctcagagtatgtactatgtacatactgttgcaaaatgggaaaaggagacaaaggtaactggattttctaagagtggtgatatggatccaaatgtacagaatgattacattgagtggatgaagcatgcaggttaaggaaccgctgcaacgccgtgtgctagttttttcttactttgtatttggtttaatgtctgtagtgttgtttttctttactgtttgttgaagtttatgctaagtttgtattctgtttgtagactttctattttgttttaatgaattggtctggggtgtttacaccccctcccttaagaaaaaagaaaaaaaaaagtgggccaacggagccacccaataattttattttttaatataactaactttaagaaaatttttaacacgaacagatatagattatataatcaattttatcataacatctctagattaaattattattaagttttattttaacaaaaaatcagttcatgatcctatttgtacaattttacaaaatacaaggtctattttgtcatntaacaaaacagagagtctaattgataacttttacaaaatacataatccaaaatggtatctacccaagtttttaactttactaacatgacatcaatataaattttcatgttcttctctaatatatttttgaacattttgttgaccaatttttaagaagttgctctaacgttctttaatttaaaaggcatgaacttgtagcagtaaatgcctttgtcggtctgaaagctcgtgtgttcttggtcagctacatacattttgatatgattgtagctagagtatgtattcatgaagcttaaaagtttgtagcctgaagtattacgtcgaccatctgatcaatttgtggaagtgaaaaatagtctttccagcaaactttgtttagatctgtgaaatctatacacattctccatgtatcattagattttaggaccaaaatcggattgggtagccatatgggatatagagcttcccttaagaattggatgttagcttgtctacttttgtttttgctgcttccgctctcattagatctaaaagtctttgcttttttcggaatggatatgcctcgggatctatgttcagtgcgtgatagattacatgaggaataattccagttatgtcaaaatgactccaagctaatacattattgttcttcttgactatggagactattctttctttaacaactggaggcagattatttcccaccttgatgaatctagtgggatctgtatcactgattcacacttcttctacctcttccataagttcaattattcgttctacacctatccgtggatctagttcatcctcttctcggaccacccccaatgctgtcttagaaaatgttccgacttaccattatatttccctcataaaccacgaggatagttctagatgaaacattataacaacttcttgcacctagttgttccaacacttccagtatcgcttgtgaattttaaacacagatggcggatggatgttactgcccaaaagtgaattagaaaaggtcgtcctagaatgactaagagatttaacttttttcgtttttaacataattacgtaatttattcaaaaaaaaaaaagaattttttagatattatagttgctttttgtgtagtataaataggaacttggatcctcaaggtgtgtgtttgaacaagtatgatccaaaaagtaatccaagtgagtctaaataatgtgtgtaggctaagtactctaaagaacgtgtaaatgccttaataacctaagtgtgagtgtcaagtcaaaattaagccactagcacaacttttggaaaagctaaaagctgcttttgaaaaagctatgataaaaatgtgtttggtaaactactaaaaaatagctttttgaagaatttttggaaaagctacagctaaaagctgtagctgctccaacccaacttttagaagaatttgttttgattaaaagagtataataatttttttttactaaaaccatatttacttatttattacatattaaaaaaattaaaaataaactaattataatannnnnnnnnnnnnttaaatctcttatttttttttaaaaaaaattatattttattttattattaacaaacaacatcaacctataatttttcttatatacttgagtttctaatttttttacaaatgataaaacataataaaaaaaatattataaattatttttatcaaaggtatataaatttatatttgaaaaaatattaaaaatatataaaaaataaa

SEQ ID NO: 26810 - DNA, 3248 bp, Cannabis sativa
tagttagcaattattacataaaattttaatattatttagtaattaatatacaaaatattccaataaaaagattaatatataagatagaggaagaaaacttggattgctgctaccagaacgaacaccaaaaaagtcacaggtgagaataacataatttttacactttgttaggagttatgaaaattgaaaaacaaaattgaaattctttaattactacaaaatgttacataattaagaaaacacgcaaatttaataattactttaaattacacttaaatagttaaattcaataaccgacccaacttctcttttgaaaaatgaactttgccctttcctttttttttttttttttacaaatgttgtattttaatttttttccttatatttttcttttgaaaacataatacaaagtagcaataatgtgaaaataacattagttaaacaatgtaaaaaaaaacattaaaaatattatagattcatatttttgattttttttttatcattttttagatatttataaaataataataataaaaaaactattatacatttataaattcaatttcaattttttatttgaaaaaaatatcacattttaaatttcttttagcaaaaatatataattataatatttgacatgaaaacacttgattgaaagcctttaatactaagctcgctcaaaaagagtaggagaacaccattggccacaccacaccttaccttctccaaatttctcaaccaatctagggtttcgaatccacccccaatttcgcctccttctttatcggaattaggttacgcttctattttccaccaatcccctttttcaattttatatataaaaaccttgttttgccctctatctcactttttattccttaacaaactatctctctttctcgccggcgtcggcgacatgccgatgatgcaattcttttccggctagattctccgctgcatcgagactgagatcggacctttcatccatacagtacggtaaggagacattgacttccctatcgatttatgtaatttattcaataaaagtgtctcatttatttatttataataatttgtttgaattttgatccagaaagttcgttttcctggattagatagattttctttttgagagaaatttcgtgcttattctgtgaaaaccgatttttttctttctattttttgtttttgaaaagctgtttggatagctggaaatcgagggagaaagttttctaggatttcttggtagttcggtagtctaaaatcactttgaactttgttttctatttctccatatgtaagacgagtttttgatgagaatttaccaatcttttttatttctaaaaaaataaaaataaattattatcgttgtcagtcgtgattgatggcgtctgctttttccttcctcctagacgtgtccttttttatgaaatttcctaattttctagggtttggtacaatcttataatattgatattataatattgatcctaattttctagggtttggtacaatcttatatttttaatattattctcctctcaataatagggtgagtcctgtacttaatacaggacaaggtcaacttattgttggttggagggttcttggatttgtacctgagttggatgaccttaattggattcatcacaatgctgggtttgaaaagtacagatgggtttattcgtacgagctctttttcccatttggctgaatggcatccgctggaatagcaaagctcattcgggctccaggccccttctcctcctgtaaaatcaggttttaatttctttggacaatgtttatgtatgcacttttgcgttgaagaatctagaaacttgtattgtcatattgtcgtagttgaagtttttgatgggagttttgaaggttgattacttgatttgttttttgttaggtagtttctttgttgggattttgagagaaattacttttgtgctcttttacaggtttttaaattgaagtattttgcagttggaagttctaattactaaccaccgaaaacaccaagtttctcatgttgagtaagagttgttctattgctaaaatgatgggttgctgtagttgttttggctttaccagaaagcgtaaaccagccaagccttcttctggctttaataatcgcctttcacaagagttattattggaaggaggaggagatacggaagatgatgataattgttcatcaaatgacgatttaattaacagcgaccattgtgaagagagtgagccacaaactcgcaccaaacgttcagaagatatccttcacataagggcagagaatggaatgatttgcaggcaatgccctgtcaaggaaacccatagacttgttcgagcagaggtaaatgaaattcaattgctacagttacatacttggggctgtagattattactgcaaaagctgcgtgcagtgattattattatgtatgtgtcaatagtggaatagtttggctcttaagttttgtattgtgtttaaggaataaatctccatgctttacagtttattgcagcttaatatcacttacaatgcgtaggcaattagtcacatgtttgaggggcgagattaaatttaactaatatttttacttggttgttcatcatgtgtcttaattagtaacttatagtgtactactgtttacttggctgtcatgaaagtttggatgtttagtgtatactatgatccctttggacttgcatgcattattggttttccttagcccctaaggacttgagtgatgatatctgattttttctgaacattctccaggacgaatatgggaataagacaatcaatgaatatgtccgcgagtgtaagattggtgccggtagctacgggaaagtggtaagtatagaatgcacaaattatttcatccttcttcttactgagatctttaacattttctggccttaatgtgctctgcaggttctttatcgaagccgcgttgatggaaagcattatgcaatcaaggtatacttctttgtcttgatatatggaattcatacatttttttttcattaatgtgatgtaggtaatagttgttaacaatcatattctatttatttatttttttaaaaaattaatatctgaatcgctatgacaacttgaacttataaaccaattaaattgctcttctgcatgttattgtttgtgcatatttgattgaacttcgagatttgggtcaaactaagaaaatctgatcttatcgtaatctaacctttttttttcttcc

SEQ ID NO: 26811 - DNA, 3081 bp, Cannabis sativa
cttttcagggaaaattttaaaaagttcccaccagagaatcaaatggtggaggtattgagcattggactgcatttattttttctttatatcaaaattaatgttcatgaatctatcttcgaaagataaggtagatttggtttcgattttgtggcaagatcgagattgggcatggtgttggaagtagttcagcaaagtcgtgagggaagattgcagttggccatggttgaagctattggtctcgaagaagctctgagttggattaaaaatcatgtttggtccgatgtggttgtcgaaatagattgccttacatttgttaatgatttgaaatgttttaaacatatggtctctccttatgactatattacttctgattgtaagactttgattgatgaacttgtgtctgttactttgtgttttgttaaacgttcaacaaattgtgtagctcacgccttagcgcaaacttcgagttttgatgctgatcatgtcttcagttgggattctcttccttttggtttgacattcataattttggataatataatttaataaagagtatctttatttcaaaaaaacaataaaattatataagatccgaggcaccaataatacctttcaacatttcttttattattatatggtggtatttttagttattgagtttgtcaaaatgaatgatgagattttcataattgggtttgagttttgaaatgtactctaattgactattaaacatgatctacaatcaatgagattagcctataatcaattaatatgattaatcaagtatagagtattctcacacagaattgaacattaagacatttcttgagctttgtttgattaatcaacacaaatcataatcatatatagaattaagatcttatttaaaatgggtttttcatatattctaacttacaatattaaaaattaatacatttaaactctcacaaaatggtgttgagcattatagcaaataaaaagtacaacactaaacatgggcattaattacatcaacattaactaattcatttatttgcttaagaaaaaaggagcgatctattggagatttttccctatctcttcgatagtttagacaatttcagagaccacatgccagtattagggttctagggttcatcccatcaaggcttattaaatttgacttgtaataagaacagaaaatagaatagtcccatcttgctttgccttcttcaacaagtttcccttttaatgagtcaattactctattttggagcatatattgacttggtccatagtaatgacatagcataaaaacacccatacagtacaataatatgagaaataattaacttaatattaggtttagaaaaagaaaaacagagaagtggataaccaaactagttggacaactagttcatattaaaaaaaagttactttgatatatactatgatagaacaatgttcacacttggcattatataaagacaattcagttttgtttgtcttatatttagccgtatcaaacaatcaaccaagaacatatatagaatagtagagaatttcttgttttgtggagcagaaaagatgaaggtaaaaatgatctaacttcaatatatcatttaagagtataatttattttcttcccaagtcctaacttctttatgtgctttttccttaacagcaaaaagtagtggttgaagtgagtatgaaatgccaaaaatgcaggtccaaggccttagagatagcagctgtaaaaaatggtaactttaatttcatcacaatcatcttgatttttctttcggggtaaccatattaggttagagagtataatgccgaaaggccaaagtgaagagattccttatatgggccgcaacattaaaatgttgcgacttacataataaagagatgtccccagaaagcaagacaataaaacttcaatatcagaaatatttctaaatttggttttggagagaaagaaacatgacttgttttgtgcaatgttgttgttgttgttaggtgttatctcagtggctttgaaaggagaaagcaaaaatcaaattgaagtgattggagagggaattgatgcagttgggttggctaaaactttgaggaaaaaggttggatatgcaagcatattgacagtggaacaactcaaataaaggaattcaaaattatgattttgtttacttagaagaattatatgtatgtctataaaaaaaacccatcaaagattttgaatcaataattcatgtgtgtgttatttaatcattaatgaatggatacacaaaaacctggattgattaataatttgattctcaaagaacaagatccacatggaagtagaattgaggctggtggtggtaaagcatcacaaccatcttcactattatcatcattcattgttgtttgtaaagatattatcttggtcccacctttcctcttcatcaacaaaggataccccattttcgataactctgaagaatcaacagagaagtaatcaccacaccggcattggttaaaaaattgaatcgtatttctttcttcttcatcttcatcttcaagttcaaccatcatatcttctaagatcacttcttcttctgtatcatcatcatcctgccttaaagctcgtcgtaactcattatcataaaccgagcgtgactttggattgctgagtatttcccaagccttctgtaccttgagaaaattttcctctgaagtcaaacaaccattgccattgccattgcctcctagaggagaaatcatctcagattcgttttgcaacttatcgggatgagacttgagaatagcagatcggtagcatttgcgtatttcgtcataagttgcatcttctttgacagataaaatgtcatagtgagtctcctgaatgctgctcttgtcaaacagcataattgttgcttatttttttttttgttctttttggtttttatcagattttgctgaaaattcacatagcaatgaaccatttagaaaaaaacacacaaattcacacaaggttgcagatatttatactgatgaatcaataaaaaaagaaaaagaattacagcaacaaatacaacatcaaacccaatcctcagtaga

SEQ ID NO: 26812 - DNA, 4669 bp, Cannabis sativa
ttccttaccaaaaaaaaaaaaaaaaggaggatttttaaaaatatttttttttatgttttgtttttaattttatgatctaaactttttacgtacaaaaatatactttgtaccattttaaaattataaaaatatactttgttcagcaaaaaaagtaagaaaataactaagaaaaacaataataaattaatctataaataaactataaaacaattagaaaaataacttcataataattataaataataaaacaaccgaaaaaataatttattgcttttacttaagatgcatttttataactaaaaaaatttaaagcgtcaaaataaaaaaaatcgtgttaatgtatttttaatttttttttttgatttattatataaatttttcaataaattatatgaaattatgaattgtaaactttgatatttaggaactattacatttatgtattcattttgatttttgagttaagtaattatttggttattttattttattttatttttttaaaaaattattctaagtactctaatttattcattgcaaaaaaaaaaaaagtactctaatttattaatccaattagaggttgtaattttgattttaaaagtaaaaatactttttctttttgaaagatttgagtaagtaatgaaatagaatatttttttttaaatcagaaataaaattgattaatattggccaataacatttaccacctttgaaaaaaattatattattggaaaaataatatatataaattttgtacatccttatttattttatacttgtcttcataatctataaagaaaagtacacgtatatattaacaattttatattctaataaatacaaaattttatgtaagtcaaaatgaattgactagtgatcttttcatttcactatttttgtttttgaaaaaaaaaaaaaattcattatttgtttggtagaaaatcactagcaaaattgccaccaaacaagaattaaaaaaaaaaacttataaaataataatttcaaccaattatttaattgactatttaatgtgcaaattattattacatttgacaagctattaattaaatttgtattaattgtcttttataacactaattttgaaatcatgtcacttaatatatttatatttattttaatgggacagtttgtgataaatgtaaaatttttacattttaattttttcaactattattatttattatttattattcgatttaatgtatgaaattaaaacatatgaaagatttacagtgccttaaaaaatatgtatcaatgcaccctatataaaaaaaattgctatttatgtctatatttatattaataaaaatacatgaattttaatttatacattagaattcttttttaataaaggataaatttttaattaacaaacacaatcttaagagtgaactctaactcttggataacttgacctgggaaaagaaaaaacccctaacaataacattgataactttgaacaaaagtaacgacaacgatttgataaatgagcaataaagctctacaatcttgaactaaaagaccaaattgagaaagcatagaaacatcattataaaaagcctggacacacacaagactatcgatttttataaacaatatttgaccacttatttctatcaacccaacttaagacttccatgacaccaaaaatttcaataatgactggatcaactcgaccaaccttaccacaagaaaacattctcattactgctccgagccacacaacttaccctaaaatgacaatttgcagcaaagagagtcctatccacattgattttcacttaatttattgcttgttttttttccaacactcatctctaattgttaaagtcgcaacaaataaggcttcatgcctttttgattgaacaaattttcattgttcaagtaaaatttgagcagataacactattattctggtacattataaattatttaatttacatgcaaataaatttataatcatttcaaaaaaaatataaatatttagcaacaacaataaaagaataaaattgcatgaccatgatgtaattttgaattaaaatgtgagttttattatcagtagtactctcactaaattggcgacatgaaccaaaaaaaaaactacgagcaataaaatgtgaaaccttattttttaatatctaacaaggttaaagtctaaaatgtgaaacttcgatcttttaatatctaacattgttaaagtctcttttaataatatactcattttcgataaattagtttagacggataatttcttttttaaaaaaataaaattaacctaatatgagaaatctaccaaaaaaatcacaaaatcataattttttttaaagggccacaaatttataattagaaattgtaaaaataattaaacccaattaatgaatttttgtcataaaaattaataaataacctttaaaaaaatgtaaacttgaaaaacaaaagaaagggagaaacgttacatttgttctctctggtcacagattcatcataaacattatcaacctgaaaccaaaaactcataaaggtataagctttatctctctctttgccctttcgaaaccccaaattccaccattgaagactactgtgtatgtgtatgtagcttcttctttatgacgcgtttgtgaccaaaaaggtcgtccttttatacccttttctttgttgggttccttgcttctctctttcagatcgacgacgacgacaacaatggagattttctacttcttactctttggggttttggcactggtggtggtgaccttagagctcacaaaaacaagcaaagatcgactcagtacatcccctgctttcaatgccttcaagaataattacatcctcgtttactctattatgatgggtaagctttgatctaacattttgttgtcttagctcatctgggttataattattttgttgtacttttactttgattttggttttttgatgcttttcttgatctgggttgttctgcatttcatgggttttgttattttcttgatccatttgtagctttgtatacatcgttgtattttgtttaaaccagctaaagtttgtgtttttattccaatggggttgcttaagtttttagcttttgggttgatttgggtggttggaatgttttcattttcagatgttatgaagattcggttgttttaatcaaatgtaattttatttgttttggtaattaatgcattgaagaattgtaggtgtgtttcactgtactgtggtcttgattgatgtttttggttgaaatgtagtaaaatttagtgcattatttattatcaacagcagcttcattagtgtctaagatttgctaggtaacacaaacaagagttgacaatgtttttgattgaatgattgcggctatagccggggattggttgcagggtccatatgtttactatctttatagccaatatggatttggaaagggagagattggtcagctttttatagctggattcggatcgtctatgattttcgggacaattgttggatctcttgctgacaaacagtaagttcttttgcttggttcctgtagttttgtttccttttgatcaacttaccaattattgttaattcaggggccggaagagggcgtgtattacttactgcattagttatattttaagttgtgtcaccaaacattcttcggactacaaagttttaatgctgggacgggttttgggaggcatttcaacttctttactctgctcggcttttgaatcttggcttgttgctgaacacaacaaggtaggttccttactgatataaacaaactaatgtaaattgcaaatgttggagatcttgatcacttagtatcttgtacttttttaatctctttgagttgatttgctttttcgctgtttgggctgtcttcttaactaattgagtagttttttctttcgaagttcttttgagtgatgcatgatgtaaatccttagatgatgatatttactgcagagaggctttgatcagaaatggctttcaataacattttccaaagcaatatttgttggtaacggtctggttgccattgtatctgggctgttcgggaatcttctagtacatacacttgaatttggtcctgtagcaccatttgatgctgctggatgttttcttgcaattgggatgggcattataatgtattcatggactgaaaattatggagatccatcagaaaataagagcctttttgcccaatttaagggtgctgctgtggttatcgcttctggtagttccctagtgatttcattttttttttcttattgtggtgtttgctttctcatggttgaaatgtgtaactatcgtctttccatgtggtggcagatgagaaaattgcgttgctcggtgctattcagtccctatttgagggttctatgtatatagttgtgtttctttggacccctgctttgagtccaaacgatgaggaaattccgcatggattcatttttgcaacattcatgctggcctcaatgcttggtagctctattgcatctcgattgatggctcgttcatctttcaaagttgaaagctacatggagattgtgtttgtaatctctgcagcatccctcctacttccgatcgtaacaaatgtatgtcacgtgttatcattattcgaccttcatcattttacattaattttccttct

SEQ ID NO: 26813 - DNA, 2857 bp, Cannabis sativa
  modified_base (2472)..(2481): a, c, t, g, unknown or other
aaataaaaaatatatttttaatatatagtggtcgttgttgaataattatgctttatatataggcccaatatgcatacgtaacacattcactaatgattctaagatatttgacaattacataatgtgttggtctttctttatcactacattttattataattttaatttttaaccaaaaaataagtgttaatataaagtttcaaactttaaattgacacctctgaatttctcacattattttacactattcccctttattcttccatatgctttagcttagttttctaaagtttgtttggactaataatattactttattgtaaaatatatattcgtgagaaataatatattaaaaagtaaataaaatgaattaatccaaagttgaataaggaaggtaccttagaaattgggaagaggtgtcttgatgacttgtttctataaaaaagaaaaaaaaaggtcaaattaatattattattcacacattataataataaatattaattatataaatttattttttataatgtttttagaatgtgcataataagaattaataatatataagttaaagcattcaccaatcacaaatatatatatacatatatacatatattaattattaaaaatatatgtttcttaagaaactcttacttaattaattaccattaccaaaaataaaaggaaaagaactatatattaatctttcgtcatttgtaagaaaatcgatgaaaaaattcgattttcttacctaatttttcttacaaaaataacgagaaagatctcattttattttgtgagataaaaaagataagaaaggtatccaattcttttgttgcttttttaatatattatttttggtcttttgttttgttatttaattataaaataatatttatataataattatttttaaaaaaattattttatatattattttctaatttttttttaatttacaatttagattgttcttgtagttttaatatgagttgctatacagattttggttgcgatttaaattgttccgttagttgttatatgaatttctatgtgaaattccataaaaaatattaaaaaaaaactcttttaaaatgtaaaaaaaaaattgttttaattaagttttagtttgacaaaaatataattattggattaaattacattacattttgttatggacaacaaaaatatgatcactataggataattaggcatgaggaacacgtgcatattaatatgtagtagtaattaattaattaattaaacaattaaacatacacaagattaattaacccaattagatataattaatggattaaaaggtaaataattaagcactttttacttttactaaagaggctatatatatagggacatgattttgtctcatatttttacggaatgtattatgtgatgtacggtagccggtagctgttagatgatggatttatttgatctgaatgttgagattgatctagaggtaattagagttaattaaaaaatagcaatataacctaacactcatctaatgtaccctgagacccatctaatgtaccacggaatatattccgtaaaagtacatcagaggacaaaatcgtatccatatatatatctaaatacatattattgtataatttaattcaattagtagaaaagagattagagacgagtgagtaggtttaacaagctgcccactcaaatgtaataatatttagctttataggttgagaatgtgatatgtggggatacctttgtcttaactttttgacacataaaatactatctttattataatatatatatgccatttttttttattattattctatatacatattatgaagaatatttagaaacaaaagccatcacaaattattccaagcttatttttatttttacttttaactttttattgagttaaaaggataagggggcagttctctccttaaatttaccaactaaatagaaacaccgacacataagacaacacaaacatattatattcttatctaactcacactactctcataatatataataaatttatatataaatatctttatatgtataattgctctttgtttttttctaacatatgctccacctgtaaggatctcatttacatatgtatatatctcataatcatggtattgttttctttttctttttaattaaattatcagaatttcaggaagaaaaatattattgatattgattttttttttattaagaaaatgttaactttgatgtgtactaaatcatgttttttgaacttttaagatcgttaaaaatactccctggactattgagattgttaaatttaagtacttttgtctaatttcattctattttactatttcagtcatgattgtttatatactaaaatatgctccccaaactttgatatctactaaatcatgtctctcgaattttgacatgtattaaatcatgacctctgaactttcattcatgttnnnnnnnnnnactaaaattggaaaaaaaaaatccttaaatccaataatctcaatagttcatagagcatttttaacgactttaaaagttcagggaacaaaaatcataataagccttaagaaaaaaatcttcaagtgatccaaaaaatataaaattaattgttggtgttttgaccactttcaagaagtcaactaattgtttttctaacacctcaacaagttgattatgtttggcttttaactatcataacatcctatatatacacatacatttggctcactcaagacacggttttggagaacaaccatttaatgcagaactaagttagtaatagtatagggttgtgctagagagagttctacaaggagaataggaagagagaaattga

SEQ ID NO: 26814 - DNA, 1397 bp, Cannabis sativa
ttcttttttttttcattatttttttaaaggataataattttactatgaaagaggtaaaatctcaaatacccaaagggtcaacaatatacatttagtattcttaacattgcatatcagcttttaccgagttttcaaaaattgattataaaataaatagagcttaagaaatcaacaaaacaaagaagaataagaacactaagatttttatatgattgagactgagttttaatccataagttaatattattagctgaaaatttttgatgtgttacacaaagatatataatgttcttacttgagcttaagaaacctaatttcagaattagtgtttgaagcacgattttctaactatttgcatgaatatatataatctcctatttataggctaaggtttagactgttaggatttccttacgaagctagacacactatatagggtaaatacatttaatattgactatggatgtatttcttttagtgttgtaaaattatactctttatttatttttattatttttactgttttgtttcttcttactagctattcaaagagtttcttactagtttttgtactatttttgatggttttgatgtcttttatcacttctgtgccttttatggcttttgtgccattttttagcttgtccttattttttagggtagttttgtggtatggtcaatggctatgagaagtgatccttcttgtcccatgatttctacttcaacgaccttttcatttttaatagataagtttttctagtcttttaagtccttatatttattttggattgatttaccatcattactattgtgtggtaatagagttttatttttctgttattttgtagaaagtcttcaattactgagaattcaccgttaagtttaactttaaatataatctgaaagatattgatttttagtaattttaaattagggtgttagtatgttgttactagccaaaggttttacctttggctagttatacttagaattttgttggtcttttagtttttaatattgttgagctagtgatgtgtaattatgtgttaatttctaaagttgctttttaatttttttcttgaagattgtcattctaatataactttattttttggtttggtgttgtgatattttttcagatttggtgacaactattatttatgggaaggtgttatttcaatgggatgaggctctgtttgaagttgttatagctttattgtctaaatttccggaggcagttttgtcccatgtggcacgtgattagatttttgcagctcatggtttgacaaaacatgcctttcggttagacaatgagctatcctggttcgaggaggttccaccaccgactctagtttgctgcattgttaatcttgtgtgactctgttcaccacgtcaaa

SEQ ID NO: 26815 - DNA, 2708 bp, Cannabis sativa
tagcccgcctatgcctaaggccggccctgttggcaatattttgcgtatttagcgatgatattagcaatttatttgtgatatgagactaaaaaaatgcacagcacatcgctaaacatcgttaatcatcgcaaaaacttgattatgatttcacgacatttagcaatgtgtttcgcgatgtttcgtgatatagagacatttagcgatgtttcacgatatatcaacatttagcgatatttcgcgacatcatcaaaaactgtataaaaaaatgcaaaaataatcgagttgagaactccaacgatgagtagggatttcggggtggttgagctcatagatttttgggctttggatttcacgatttctctttgtggtttcgcgatatcctccttagttttgtcctacgttttgtgtttggagtgggtttcgctggaggtggtgcggtggtcgtaagtttggtttgagcctggttcagtctagttatgtggtcgtgggtatcggttgagtttggtgagagttaaagagagagggagtgagggccaagagaaagagggaaggtatgaggaggatattttaggatttaattaattttagagtattaaattcctatacattttaatgtggcatactaaaagaccatgcacaatttttaagcatgaattgtcaaatttctcttttaaaaagattaaatagtggtcaaacccttagaactttacttactctagcaactaacctttgttcttcttatttaaggtgaaacctctcaaatcacacttttgttaacaattaatttttttatccattagattttgttaactgtaaaggtgaattgtccatgtatacacaatgtatatatggcacagttatattgatctatctattattattattttaaaaacataaaaaaattaattttaaaattatttttaataataaataaataatttttttaaataatattttttttaaagaaatacacgcacaatatataatataattgtgtcacgtggacatccaacttggcacataaacggtagaagtttgatgaaaaagtaaaattgctaatagaagtgtagtttgggaggtttgctcgtaaataaataaataaataaattgagggttagttgcaagagattgtaaaatcagggggtttgactactaatttctattttaaaaatgttatatttttgtattttttataatatttactgaaaattataattgtttaccaatttttaaaaaattgatttaaaaatagaaaaagctaacgaaaatgtgtttgaaaaggaagtgagatgagaatttacgtggtttggacatcaatgagtcttagtccacgagtcaatatgattaagctatttggttctggagtattttacaagtacgttcttgtttaaatttctaacctcgaaatttctaattataaaaatccaatcctttgcgtgaagggttcctagccttttttataggtaaggagttgggttctcgggctgacctgaacctggtaggatttgtaaaatagaattaagctcactgatggagaaaatacaattgaatgttgactattaggtcgagtaggtgatgcccaatttggattgtggtcgttgttcgtacgggactgtaccatttgataaaaaacacagggtaccaaatatattttttttaaaaaatacagcgtcctaaatgtgtatattcctaactctaagtggaaattacattgtatactaactttactttatttgttttcatttttaccttcattttttatattctttaaaatatacccacttttataaatgattttcctattataccccttagtttaatataaatcatgtactacacttaagtgtagagcagtggtatattaggcaatccactcataaaagtaggtagatttaaataaaatatagtattatgagggtatttttgattaattaatacaaaaaagaggtattcctcaacttattcctaaaacagctgacggcccaagtattattatgggcctaaagcccaaagtgaaaatcaccacaaaaacaccgaaataccaaactcattacactagtcactattctctctctctcccctctctctctctctctctctctctctctctctagaatccatgggtggttctgtgaaagatgttcaatcgaagcaggagctcgacgaccttgtccgtaccggtgctccggtcatcctccatttctgggcttcctggtgtgaagcttcaaagcacatggacaaagtcttctcccacctcgccatcgatttccctcttgctaatttcttaagggtttctctcttttcctctttttgtcaatttgggtacgaaatcttttttttttaatgatgttgattgatctcctttgaatgttttaggttgaggctgaagagcaagctgaaatttctgaggcttattccatttcggctgtgccattctttgtcttcgccaaggtatggtttttgtgtgctgttaatcagagttttgttttgggcatttcggaatttgagttgttctaaggctatgggttgatcttgttgttgttgttaattattacagtgattttgtcgggattgtatcactttctttatttagctgattttcttaggtacataaattactgctctttcacttgaataatagtttttgttaaaaaataaaactttggtttttaacattctggtgtttgataaagtaaaggccttgattc

SEQ ID NO: 26816 - DNA, 4813 bp, Cannabis sativa
  modified_base (3919)..(3922): a, c, t, g, unknown or other
attcaaatgttaatctatatacagaattcagcaacatagcaatggcatcataagtaccttggcaggattcgcaacaaaaatgcgagaaatgagatgcctgcaatcctgagatatgtgaacatattctggaatcttgtactgaacagccattattcgctgcagcggaatgaagaatattaagctaaaagatggaaatagttatttcaagtggtttgtaagaataataccgtacattaatggttttcctgaaattctttgggtcttcttgatcttcaaaggggtatgctcctaccagcataacataaagagtgaccccgcatgaccatacatctgccaactgaaccatacaccaaaataaaaccagcagtcaataatttcctttgcagataatactcaatcatatccctaaggcaaagtctcaattaattggaactacaatcattataaaagagacttaacataactcagcaagtctatactattctcgaaaatttatatagagctagcatctacaattattataaaacaaaagaagcaaaaaaactatttgtcaacagaacatcaacaaaaacaatgattgtactaaatgaattgcttgacaataatataaactcattattgatggttaaaatacataaatggtaaataattagccgtatatgatatttgataaatcattgtttgtccattatttccattttagattgaaggaaaggaaattcatttggattctaaagaactatggcatttagttccaaattttgaaatcatatgatgtgagtccaactcacaaaatattgaataagttccggatggcatataaacttgattccaaaagtcattttgagaaagaaagaatgaaacacgtttctcttaccataatatttttcaaaaatattcggttttaagaaatgggaacagggtatgttattttagttcccagttaatagtccttcaagcacgtcaataaaatcctaggacttaattctaattgttttaactacagattcataaatatggcaagtgattaaaaaaactatttgaagtccgaatacatggtttatgaatacaaaataatataaattactaaattaccttgccatcatactcccttcgagagagaacctcaggtgcaatatatgctggagttcctacagttgatttgggtcttgaatgcagcagggaagactgcacaagtaaagcttatgagagtaggaaagttcggtttatctttatgtatttcattttttcaatcaaacagaagaaaaggtttaaatctggtttttatcgacatgagtgttttatatcgaaaaaaattccaactctttgttttgaaaccatttctggattaacattaaaatacaatgcttccaccactaagttgacaaataatttaaaccttagaataaccaaagtcacaaattttcagtcgaggagcagggcttccatccagcaaagtattttccaacttcagatctcgatggcatatttgctacagcatatcaagatgatcccaaaaaaaaaaaattatcagcaacagcaagtaaagaaaggatggattgattttcacagattatgaaacagcattgatttaaattttcttaccatagaatgacaataattaactcctgagataagctgctggaaaaaatatcttgcctgaaaacaccaaaaaggatagtaaaattttctaaacttcaaaacaaatttcctgtctctgatgattaacaaaacagagccaaaaaaaacatggtcaaatcaaaactaatcttcttctatgagaccctatttttttttaccagaaagaatagcagcaagccatattggattcacacggtacattttctataatgacctagcataacatgagtagtgtcactgtcaacaaaaatcaacatcagacctcatcttcgctgaatcttccagcggtgcagattcgctcgaagagctctccacctgcagcatactccatgacaatagcgagatgagtaggagtcaagacgacctgcaactccggcacacaagtgagagtactgcatttgcaaaaataatctatactcatcagtggaaacataacaaacccacattaaacacttgcacatacctccttgaaccggattatgtttggatggcgaagggatctatggtttatgatttctcttgccacattttcatcaatctacaaaccaaataatttgttttaatcacaaccattactaaaatgtattcatacaagcatgtgtacaaagatacaaaaccacagaaacttttcgagggctacagtaataaaaagaaaactcaaaaatcagacatttctactacttttgtgcccaaacccgtaatttaattctatttttttttaatatataaaaaaatttgaaatttgatttttgtatttatacataaacaggatatattatctcatcaactttctgggtaaatcaaattcagtctttacaaaacctcaaattaaaaatacacccacaattacacacataacatatatcatccatgcatatgaactaaaaaagaaaacaaaataccttgtggccgcgctcgatatatttcatggcaacgagctctttggtctctttgtttctcataagcctagcaaccccgaaattcccagatcctatgtctttcacaagctcatatttttccatcttttatataatttttataaatatatatatgtaaaataaaatttttaaaatattataaatatgggaattttctttgaacttagataataaagggaggatcgaagtgggtttttctcaaaggttatagaaattgaagactctgaatttcaggtgtctaactcaatggtcagctcagatatagagaaagaacaatgaaatggaacaaaatcagaaattgcagagagagagagagagatgaatataataaaaagggaaattggagaattgagaagtggagaaaaggagtgagatttctatgggcaaagcaaagaatctctctactaattatttttcattctctctcttttttatttatttatttaagaattaataagagtagacaaaggaatcttcctcagaatacatactcactatcagtttttcttcttctttatcttttattttttttaattttctaagcaaatataaagaaaaaaacttttcagaatagagagagaaaaatagggtatgaaaatatggaagctgatattattattattagttttcctttttttagaatttttattatcatcattcgaattggaatggagagaagtacccttttatctgacgagtaaaatatgtggaaaattttaattttaagaagagagagagagagaaacatttatgtgtgatttgtcattttctcatgttacctagcttttttttcttcaaaacttccttttttaaaaaaaaaaatattatttttttaataaaaagtaagagtgttcatcaaatcgttcatacggtacaaattgtccgcactgcataaaaaattttgtttgaaatcttttgcggtgtagttgcgtttgcatttttttcaaaccgctcagtgtagtgcggtttgtagttttaaatttaataattgcggttaaaactgcaccgcactatattttacaaagataccaatttttacaatatagtttttattatttttacatataaaaacaaatatatgtaatatatgtatatattacattattttttagagacaattcaatataacgatttgatgaatagtatctatgttatgatgttaaaattttaataagattttttttttttgtattgttgattgatttttaaatttttattataatgttcgataatgatgatagtgtaaaccgctcaaactgtatcgcaccacatcacaccgcattttcgcgatgtatttttgcggttttaaaatctcgcggtgcagttgcagtttgagaaannnnaaaaactgcatatgcggtttggtttgaaaaaaaggttataaccctcaccatccgcaccgcaaacacccctaataaaaagtatccttcgcaaatcaactataagattaacttggaaatcagagacaaacctcctactataactacaacttgagtataaacaagcagcctgaactaaataattagcgatattgttcgcatatcgttcaagaataagagacacattgctcaaaacaaaatattaagaagtactttataatgagatacaagtaaacaaaaggagaatacatttgaccttattacaattagcatttattaacacctagcagtctcatttaataataatacttggaaaacctttatctttcaaccaatttaaaacttccttcaatccgacttctcccactattgctagatccacacacacccctctctagaagttgcataagcataaatcaaactcccctttacgatcacggacaagccaatcaacctcaaaggatctgtccaagctaaaaatagaggcatctactttgattttaatcgtgttatcacaagaaagcatcaagtgcgcttcagcaacaacatcagtgaatgaggtgcttgcaaaagattgagaattcacacttttctattgattaaaataagctaacagtaacgacacaacaatatttataataggatgtttaccattccacacaacatcatttcttgccctccataaggtccaacatatcatagcaacatgactaagggtggaggaagtcattgcagaaagagaaaaaaattagtcaacaaaagaactgagcccagtacaatctagcaaacgtgcagtcatcaagaacatgggatacagtttcactctcattttgacaaaagggatagtactaggga

SEQ ID NO: 26817 - DNA, 1848 bp, Cannabis sativa
  modified_base (782)..(783): a, c, t, g, unknown or other
ggccttgatatatttcaacagaaacaacttgggctaaaaagaaggctttttatcaaaaatacaaaaggttccttttcttattcatttctgtacaattattgtaaatatatacaataataacacatattattagataacactatacactataatgatgtaaaatatattccaaaatgtaaaaaaaatcagtcaacaatcaattttttttttcaaatgaaggtcattattttacgattaactcagttactaagcttggtaacaactcaacaagaatattgtctaaattgaaaaagcgattagggtagaatatagaggttctagcgaaagagtgagccactatatttgctgatcgctttacaaagtgaaaaaaaaacattacacaaagcacataataaggtcttacattaatcactttgccaaacatagaaatcatgaccggagaactatggatggcttgaaccactaaaaggcagtctgtttccaatgtcacatgaggccatcatctggccatggatggtctttgatctagctcaacgggaccccaatagcttcgaccacctcaggagatatcgaaccttagaacaactttgtactgccttccacaaagacatcacgggagtctctagccacaaagccaactccatagttagaggtatcgcaaaacactgccgcatcgatattaactttaatggtattaacacctggagcaatccattgctcagccccgtcccccggtatgtaatcagtgaacaacaaatcattgcttgatttttgagcaatannccattgattaagatagttcattactgaaaccactctcaacccccactgtcttgttctgccatactttattattcgttgcattccaaattgcgaaattgatcatatttgaaaaaaattaagtcttgattatacaaactaaatctaactaattaatataaaacattaaataaaatattaagtagtctatttcaaaactaaaaatataattaaggcaaattgaccaattaataaaacataatctatccttaaacaacctgaaacataccaatccttaattgtaaggtttttatttccttacacaaatattgttatttatgttgatctagataaaaaaatattgttttgttttgacaatattatgatcataatatcgaaccgtgtaatgtgttatacaccctaatcaatcaagttataaataatacttaattttacttaaataaaagtttaatgagacctttgagcccaaaaaatgtgggccctaaatatgagtctagtctagcccgccatgtgcctaaagctaaccctgtatagagtaaatgttactatgaaagctcaaatctcgctcaagaatattcactgtgacgtttggttagaggtaatgaaatgactttttcactattttggtggaatgactattatatttagaaagaaagatcattctaatggatgaagagaaaaatttttaataatttttttatgcattttaaattttattcaattctattatatttttattcctatattctcattcccatttctattcttattttatatctctttgcaccaaacgttaccttaaagatacgtttagttggggtaatagaatggaatggaatagaatcgaattttatattattcttttatttaattagttacatttgaaaatacaggattgatttttactatttcggtggaataaatattctatttcgatcgaaataagttgacacacaattttatttcaatgcaatataatacgtggataatgaggatatttaaccgacggaaatttcagaaatataacttaagtgctattattacaactaaaaattaaaattaaatatt

SEQ ID NO: 26818 - DNA, 7715 bp, Cannabis sativa
tagatttcggtcagtaaactaaggtaactaacacgtatgagaacataatattgcattgctacaaagtgttagtgatgtctaacaccaccataaagtaacatgataatatgtaaattcgatactttattacatttacaccaatagtgatattatgacacattgtgctagcggtagtcaccacatcaagttgtgttagacaccatatgatgcgacaccaaaaccaaaaccgagttctcgaagggcgccaataaggcaagaataacttatctttagataaaatgaatgtttatgataaggtgcaaaagaggaagccttacctatccatctcccctgattggtgtgtttgctacaaagcccgcagagaagacgttgggcatttgttctttggttgtagtttcacccgtcaattatgggttagattgataaaggaatttaagctatcgtgtgttatgccaagatttgtaccacaactgatagttagcaaattaaatggcagcaaacgtaaaacaaagatttggagaacgacaatactagcaataatttgagttgtgtggttggaaagaaatgctagaattttcgaaggggttgggaattcagtagaggacgtgtgagagaaagttataaattctggatagctacttgagttttcaaaaccatactttttgaaggcttgtctttcttagatttatgtagagattgaaattcactgtcataggggaagtccttaaaaaactcttactgttttttcagcaacctatggcgtgctaacttttctaaatgtctttgtaatatggtttttctctgccataagcgaggcttcttaatatatatctaggagggtcatgtctaagacttgaggaccctttctcttttaaaaaaaaaaaatcaaatggttaatccaaatccttgtttactatacatgaaatccatcatcaacacaactcaaaatcattctcaaaaaaaaaaaaagatcaatttttttcacaatggttagttttgttattggtgcccccataatatgaatcaaagttattttcagatttctaaaatttgaaccaacagaatatgtagaactatcattattttgtgagagagaacaagacatttacatgagtctaataataataaactttttgtaatgaaaaacaaacaacaaatctttctcttcttttaccaatgaaaacataaataaagtagttaaacctgtatttcatttccatgtgaagttaatattatatatatatataactacaaaaacatgacaaactcacaaatctgcttcaacactaccctcgagtctccatcatcatcgtcgaaagaaagactgctatagccgaaatctgtttgttggaatcgaaaatagtaaacaaacttgaacattcgggttcaattatctctaaaagtttaagtgaaaaaagaagtaatacctctaagcttgatgattatgaggagtaaccactgtcggacgagagtgacttctgttatcgtttctctccaaagctctatctataatcgcggcactatcaagagactctcgtactctttctcttgcaggagagttttgcacttgcatatcatcttcttcttcactatctattctcacattcacaccagaggaatctttttcttcgtcttcaacaggcaaatacgagtccaaaccaagtcttcggtcttcttcagggttcttctctatatcatcgtaatccaaatctctcaaaatagcaggaagtgggaaagcaccgtcctctgactgcctagcccccatctcgatatcaattttctccttcgaactcatagcactttctccgaaatctggagtcaaagatgtcaccatcacgtgctcatcttccacgaaaaatgatcgaaatttgttcaatgaaggtgggattttagagaagaaagtttctccacagttgcctgaaactcccttgttatatggattctctttcttgtcatatcggtatcggaagttctcataagtagtttggtttgtggatatgaggtaaagatggaaagctgtaagaccaccaacgaaccaaacagctataaagcagtatgctattaggaaatccgaaaggtaatcaactttcatagcttctaaaacttttccatgtctcctaattatgtgaatccatgaaaacgtgaacacgtaaacgcataggatcgttgaagttgaaatgaatgcaaagaagaaccgataattacgctgcagcataatcaattcatcacaacaattaaaatcaatacaccataacagagcaaataaacccaaccatttcttccattgattattctgattctgatcacaatttagtaaacgtgctgcaatagttcaaattttcatgaatgttggcaagtggcatgaaaatgaaattagatttcgaaataagcaactccattttgaaattttgtttgtcaaattagtgtgtttaaggagaagaaaacaatgtgtataataataacttactattccgatgcattgaccgacccaaggacaatgatgatcgaatctcagaacacagttgttgcaaatggaacaatgagaagcacggggagggcggtatagcaaacaagtgtcacagtacttcacttttactgagtgaccattcacaagaatatcttttgttcggggtagtttcaaatgtggtgtcctgccattaacccattccatggatggtgttggaacatcggcttcatctggctcaagaggcctcgtatttctaggaacaatgcccggatctctactagatgttaggaagagaaatgtcaagtcctgcagatttttccatttgttaaattatatattaaggaaacgacataaacaaacacatcgagttccacatactctctcacaattacattcattctaagaaaaagacagatagttatcccaagattattacattcataagaaaatgaatcataactgtgaatcagagttcatggaaagaatgagaggaaatcgagagagaagaaatatattgctcaatcttgagctgattggcacctgagatatttatattactgagtttttacaaagctttgtcaaagcataacagaaaagtatcacaacaaacttaactaactttctgtttttgatataaagagctaactaatttgttctcctaataataactaagaggaaactattctgaccacttttaggatctaaaaggacagaagcattgagtcaattttcaaaaactaaacttgtcttacaatgtcataacggttttgaaaattcttagaacaccaatatacaccttcaactttgaaaaaggtaagcttaagatgctagttatgaaaaaaggatttctctttctttttttcttttctttattttaccatacagactttggcctattaagtaaagactaaagttatttcgagatcgaaactggaccagttgtgccactgccaaaagaaaatacttgaagtgataaattttttaacagaaatcatcaaatgtacattgcaaattaccttactatactatttaatagggtaaataatttttctatactatacctaaccgatttggaattttaaaaaaatccttggaagaagattaccataattcgaaaatgtttcctctttaaagatatcaatgctagaaagaataattaaaagcttaccaaaagagtaagaaatacgccgatgaccaatacgagactccagttactatgatagtagtaccgcatgtgatctatttcataataaacctttacacaaaaggcgattgcaggcccagctataaggaatacagatagaagaacagatgctgcatcggggccaaaaattaatcgcccgccacagaaaaatttctgtcatagaacaagaaagttgtgttaatgaaagtaggacaataactgccatagcaatgttagctccatacaaactatgcttccttaaattcaacagaagatatcaaatcaaagactaactaatgtgcaactaagaaaacaaagagaaaagaactctaaaaatgacaaagaactttgtaagaccaaaacttttcgtcttaaaagattcctttctaagaattgtgtttaaagaaaacagaaaaaaaaaatgcaccgtttcattaacacgaagaaacaacaaaaactctgaaaccactagggtggtcgttttgcattcaacataggcaaaacgtccaactaagactgagaaataactagcttatcatatggatgacgtggaccgagcaatttgagttcttatcttcatagttagttagatttttcctataaatagtagaagtacaacatgtgaataggaccctttaattcattttacattattacttgatcatcggagtccattttcacacgatgtttccatctttgtttaaacactatgatcgatttagccaataagaagaaccatttactatgcactaattactttcataattggatcttaccacttatgaaaagtaattaagtatctcaattttcggattcaataaactttaaaaatgtaaactttgttctatccttaatcactgttatttgacaagattagccataatgctaagaacactagaacaggactgagtacaggacaatccactcaacaagaaatgtaagtaagctatctaagatttctctattcagttcaaaaacatgaaaattgatctatacgcataaaaataactcaatctcacagaacaacacatcattaagaactttagtctagcaaaatgatgaccaaaaaagtcagcaccttcatcctgaactcaaatcatgcaataataataatcataataatctatctatgttttctgctttaattaaatcagctgcataattatgagtacttttcaacagtttcaccactaaaattgatcatataaacataatcaaaggttacaaaaccacaaacaaacaaaaatccaaaaacattggagctcataaccaatcaatcattaataaataagcaaaataaagaaaacccaactgagatagaaaagagaaaaacttacattgcttcccttccaaacttgatagaccctattgggtttaactttctcctgaggagtagccataaattagaacccaacccaaccccagattctgactttttcttcttttttgtttaacagttctcacctataacttttttgtttaatcaaaaccccacttctccttcctccataaccccaaaaaagaacaaaacccctttaaaaaaaaaaaaaaaacccaccttgaaaacaatttcagaactcaaaaactcaagctgggtagttacaattttccaaaaaaaaaaaaaaaaaacagctttttaatgagctgtgtacagaagaaaacaaagttgtaatctttcttctgcaagtaaagcccttctcctcctcagctcaaagaccaaaaaaaaaaaaatatatgtttttgggactgagatgagaggagtcttttcagaaaacagaggaaaatgaaagaaggattataccgaagaaaagaagacaactagatactcatcttgtctttctctctctctcctaaaataataaaaattcattctttttgtgatattattaatgaaagtttcaatctttttctcactctctctctctctaaaacgctggcaaattaaaatgggtttggtttggtttggtttgggcggatgtttcaatttgttgcggcttttacgcacttaaccaacgtcccataattataaaatttatatcctacttttattcttgttttgatttgtttaatgttaatattcacaaataccatatagttgcattttggaaattttattcaatattttagtttttaatatttagatagttttaattttatagttatttaagaaatttgataaatttagaaaaattaaacatacccaaagtaaaaaaaaatttacacgtttttttttattttatatatatatataaaataaaattgaatcgattttctatataaaaaattgaattttttttatctaattatttttttatttattgtgttgtaattaacaataattaatttgtgtattttatgttatttttgaaattatctataacgtgcttacacaacttataaacttgtacgtccacacgctctaatttattaattattttcctgtctttattttttttttctaataattttgggaagttgttaatttctttttaaaaggaataataatatttgtataaaaggaaaataattaagaagaaaataattagaggtgtggagtggcactaaacagatggataatatattgtttaaaaaaaaaggataatatcaaaattgtgttttttttcacagctgacaacaaaataaaaaattatatcttatttaggattctaaaaacaaagagttaattaattaattattttaagtatttttattatttagatactcttacaacaaaatgaacaaaccaaaaataattttatatgcacaacaataacaaaataatagtatagttgattccaaataagtaattacataactattggcacaataaaattactcattccagctataaaattaattaatgtgatgatattcttacttagagatataattgttatttgttaactattgccaatacttagagatataattaatgtgatgatataattgttattccagctattgccttaagactatggccaatagtgttaaatttttcttaactaattttttttttttttttttttaagaagaagaagaagagatagccaatagtgttaaaaataaatatgactattagtgacaattaactagttttgcagcattcacatttgtcatggtgtgattcaaatcacttttattgtgtctttttttttttgttacgaaaagagaaatatctcattgaatcaatataaaaattacatcaaactatatactaatatagtcaaagctaattaagacaatctcaaaaaaacactatcaactatttacaatttagctataagcttattttagaggttattttccttctacttaaacaaccaaaacgagtttttatttcatgtttggtcatatcactaacatattgatcacactgaaagaactagactaaaaaaaaataaaaatttctattaaccaagatattttaaattactgcaccacagcaatcaacacctgacattgtaaatcagactacaactatccaattccacacttcccacaatgggtcaagttataaagcctacgcatccatgaattttgcacggtaacgtaacagagagtgagcaaattaaaaacaagtcaattataatttttatcattcgatttgatccgatctaattaattgcagtcattcgatcgaatttatccaatttagacctaatatttttttggatcggatcagatcgtatttatccaattttttaaatctagtatttagatctaatccaatctaaaagaaaaaataaaattgtaatcataattttcatatatgcatttatattttcagtataacaacataaattttaattactcatctaaattaaataaaaatactaataattaaatgtaatatatttttgactcaaaaaaaaatgtaatatattttttggacgctccatctaatattcaatctggtcaaattagatatttaaaaataaggtctactctaatttaattaaaattagatatctaatatataatagtcagttgtagtaattgatagaattttaattttatatgcacacctctaaactaatgcaaagattaaatacttctatatatata

SEQ ID NO: 26819 - DNA, 1319 bp, Cannabis sativa
atatgtaattattccttatttttttcaaagtaaaagtactttgaattattatgttataacataagtacctaatttattttttagccaaaattcttaagtttgtagcatttaagtaataagtactcaaattattttttggggtttttttataaatacgttttttatttacatttttacgacttatatttcttttttataattatataatttaaatttaagaaaaataaataaaagttttgaaattacaaaatatatttttctcaacaaaaagtaaagagtgtaaaaaaataactaaacaaacaacgagaaattaatcccacaataagtataaataaacggtaaaataaccaaaaaatatcgagaaaagcaataatcaaaaaataatatcgaatatttattatttttattgaagaacgtatttttataaataaaaaaaattcgtttataattttttcttttttccaaattaacgtatttttgtattttttttttcatttcgaatttgaagtgtattatgtaaaagtttcttttttccgcaacataagtgtacccaaattaaaaggaaagtgtaggtagacttaagcaccaaacaataatcaaccgaattctttattattattcaaagatatcttaagaataattatagacatatactttttccaaacatcataaatagttttaagaattacatcatttttaattgtatagtcaaaatttataatgtattattgtgtaaaaaaaatgtttaaatgtataatttcattatgtcacaatcattactattattttaatcttttgattctttatacattgcacataaaaataaaaatagttctttttaataattaggtttctattttattttttgataactctatatgtttttcttcactcatgttgattacaaattacaattttaatattatggtcaaggtcggtcctgaaattaattggaccctaagtagtaacgaaattattatgtattttcaaagaaaaatgtggtagattaaaaaattactaaaataaatatttattattttatattatatttttgtttttgggtcctaagtggatacctagcttgccttagctcaaatcaatcctaattatggtccataagttgaataatcacaatcctaagcaactagacaatcttaataatgataccatggaaaatggtttaaatggctaactagtaaatattcacttagaaaaatagcagctttacattgttgtcattgatatatgagtcaatacaagattaacacaaaattatgagcattgctattaggcagtagtagtgcctagcacctttgcga

SEQ ID NO: 26820 - DNA, 4396 bp, Cannabis sativa
aggagaggcaagaacaataataagtaccaagggaaagtttgttggaaatggatggtggccttattagaacaactacccaagcccaagcccaaatcaaagcccaataccaacaccactactccaaaagtcatgactatgtggaatcaatttgaagaccacattttttttcctttggctaatatttcaagagcacaattactacaattagcatagaatacattatgtgaagtttggatattattatttagttttaaagtttacattagctatcatatgttggcaatgtcaattagaatagagtaaatttatcatacaatatgtcctatttttggaattatattcatattaacaaaataaataccaaatagaatatatttaatattaagaataataactatcatgtttctacaagtaaaagaaaacaaaacaaaaccacatccaaaactttatttttaggacagacaaaggaaaactatgaggttagtttacctataacatcatctagcccatgcctcaattctacttttacatatgcatttttatttttataactattattcccttatcatctccaactacaacctctcttcttcacccaaaaaaaaaaaaaaattaaattaaattaaaattctcagcgcgagccctcgagtccaagccttgaaataagccagttgcagacttcatccatttctctaggaattgtataatgaccaagcctgcatatggttaagatgaaactaattatagttttgcttgtgtttaatctattcatgtcaatttgttgaaaataacaagttgttatgttacccttcatatggttttagtgtaaggtatcgaaatcctgctgaacttaaacattgtgctgacttttctccatacttgtaaggaactacatcatcacctatataataacaataataagattagagtcatatcatgagattcatctacatgttgaaagtacagaagttatgcatttgcttacagtttccatgacagagaaaaataggtaacgatgcagctcgccttgcagcctcgtgagatgcttctattttgctcctcaagttcctgcacatgaaatttttaattgtattctgttatggaaaagagagtgtgaatagggtggtttgtgaagcctctttcaccaactcataccttgatcctggaagccagccacttagaccgatgactgcccttaagttcacattgtataggttgccatttccatatcttcccatggcaaaacaagttgcagaatatagggccatagcagctcccatactaaagcctccaataccaactttaactgtcatcagataagaacatgataccattatgaaaaagtttcttcttaatcaaatggattgatagctttcatataatacaggatatatagaaagtaccatctgggggttcagttgacaacaaatttgcaatatgtgctgctgaagcatctaaaccctccgaatcatcaggaccatcttctgaaagctcgccaacatcaaaccctgatagaaatttcacttatcaatattaaaacttgagagtttcttttaagccgataagaattataaaaaggcgatcgatcttacaagcagtgcatggaaaaccaccaaggactgcaacaggacgagtaggagctgttgggcatatccatttgatctgcaccaaagtgaaaaagtttaatataggaaacaaaacaacttatgaatgaaagaaaatagtattaagttttttgggctgagaacatatatatatatatatattcttacatttgggaggggaagtgattccataagctgagatgagctgcaaacaacaggaacagttatgagacaacttgtctatgtatacaataatagtttatcaagcctttcaaactcttgacaaaatatatcaaaactttaccaaaagatctaattttgattgctttgatgaatagaagagccacatatttgatggaaaacagcagaaccagaaaaactaaccacaaatatgctaatacatgtagttaacttaataataagaagataatcataaaagctataaagagccaaaataaacactctgggggtccaaaaaagtatcgtttaaactaataaatatccttcattagaagtttattatggttagttggacatttcaatgagctaatgggcaaaaatttggtatatacttattccccctgaaacagttcttgaaaattaagctttagaagaaataaaaaggaaaaattagttgagttatgtatttgcaatttacttagcacacagctctagtttttctaatgagaatcttcataggaaagaagcttagaatggaaaagaaaaaaacatgtatcacatggacccgccaccattgagatgttgacattctcaaaatcctttcttttaattaaatagcaaaaacagtaaacagtgcaactacttaaaaacaaaacaaaagaataccccattcaactgtagatgacaagtcagggaatatattagagagaagaaaaaagaaaagaaaaaaagacaaattatcattatttttgagttctcacctatacttctcaaattaaagtttactaagaaaaaggtaaatgatttgattctcttataaacatgatcatgctcccattactgttatcctatcctaaagagaaaatttcattagagattgcaactagtacaactactttttctaaaacaatctttttgaaaaacattactcacatgatatctttagctagccacaatgtcattaaagagtttgtacaaaggaaaagcaaaaaaaaagaataccttaagccgttatcactaaggccatgtagccagattattgttgcttgatgctttcctttgggtttcaccacatgggtccttccaaactccaatgtccttctagcagttctactacctgaaaaatcccaaaaccaacaacttataccataacttgatttacaatagagaatagaaaaggaaaaacaagaaaccaaaaaggttataacttttaagtaaataaggagaagaagaagaagaagaaggaaacaaaccagaactcatgttggaatgtgcatagctcatcttgggaaaatgggggaaaggggtattgtattgtattgcaatgtgatgaagaaaaggacaatgaaatgaagatgtagaaaactgtgaatggggaaaggggtatttataaggagatggaggggagtgagagaagggaataaaatgtatgaatatgcatccttttttgcaagagaagagagtattgtgtacaccagctacgtactactatgcctaaaaactcaaaaagggggaagagggcatcaatgaaaaggagaggtaaagacaaggacaaaagcaagaaatctttttaatgagcttagagaatccaacctcagcagggtcatattcatccattgctaagctaagccactcactctaataagcctggtagagagggagagagggctctggattttgcatagagaggaatttatgcttttgggcagtggccagaaaataaagcaaaccaaaactaagaatattgctgaaaacaagaaaaggggtaatctaaatttgcaaaagaaatatcttttttcaatcattagtttatgaatttctgatgattgacagatacccattaacaaaaataaagtatattttcatgacatgacttcatttttacttatttaatttatttctctaaaatttttataaaaaaaaaaaaagatgtaatttttatttttgttttcttgttataaaaaataatagaataatctagaattcacagatggcagaggacatgggaaatggggtataataataaggtttctctattccaagttggttttttttttcactttcaaaaaagtttaataaaatttacattttcatttacttttgataatatcctttgcttagatattcttttcatttatttatacttctataaagatcaccaaccttgatttatttatatcatgtggaagagacaaagagaaaagcaagtgaacttttttctctctttccatcctttttcttgctttgttgcttgccactcatattttttttttctgttcttctcactcaagccccacccctaaaatatttttttgtataagctcaaaaaaacagataccaaacaatacttacattaattagaacagaacaaggccaaaactagactttctatattctcacttaataataaaatgtgacaaaatcccctcctcaaactaaagtattctctctttatttctttcaatatttttaggtgtgaaagtgtgtgtgtgtgttaggttagaaatttacaaaggtcgatctaatatgaaatttaaaaataaataaatagagaataaagagaaaaatattgctttcttttcttgcatggtttgggaaaacactatacaaat

SEQ ID NO: 26821 - DNA, 10518 bp, Cannabis sativa
tgagtttgtggtttgggccaagtcctcgtccggggcggggccgggtctagggtagggccaaggtcaggttcaggcccggtccgaggtccgagtttgtgtctgggtccaggttttgggtccgagttcgattcgggtccaggtctgagtctagagtgggtacgagtccatgtctagtcccagtgcgtgtcttggtctgggggtccaggtcctaattgagtcttgttcatatcgaggctcaaagtattgaagtgtttttcaaaaaataaaataaattaaaataaaaattattttttgaaaactttagccaaacacgacttgtgtaaattcatttttattctcattttttaaaataaaagatagaaaacaatgccaaacatacgactttctgtttttatttggatccaaagtttttattttattaatattataagttcataactagttaactacttcataaactactttaatattattggactcacaaaaaccgttcacccatggcatatagatcttctagtcctctgaaaacactgcaaagagagtaaagattatatcactggagttgaagaggaaaagcactcccaagtgctttgagctgaataaacgcataaggaggagtcaatgctttgagcggttatcagtacagaagtaaacaaagctcatggtgtcctgcgtttatgacatactaaacaagtagtggaacttgcaacaaatgatgagagataaaactactaatgaatcagatgcatgatattggaataacactatactcaggctacttaaagcattactgtctcatacccttccaacaaaaatttagtcatacttaatcgtgaaattcaactcatagcaagatgatgagaaagatacaaaagtaaaataactgaaagttcattaccagctaaaaaaactgttaacagccaaaaacgttatatgataataataattaaaaaaaaaggatgcaattaagttcctagtcgaccactggcaactccagtttatattttaagtacttggtagagtttatcaattccacaagcttacatgctttctcatccttatcctgcttgaccaatccattaaccacttgtgtaaacatctccttctttaaacgcatttcctgattaattgcctcggagcaaagctcaaaagccatatcgaagtcatctgcctcaaaaaataatggaataagcatctggtaagtcaccaagtctggattacattcactttcctgaagttgaccgtaccattcttttgcttcctccaagttcttaccatcacaaaatcctttaagtagagcattataactaaacacatcaggaataatatgcttacttttcatttcatccattaactgaacggcctcggatactctgccatccagcaccattcctcgcagctttgtattataacttctaacatcaggtacaacattcttgctctccatcattgcccaaattttgtctccctcagaaaactgaccattcctatacaacacattgagaattgtattgaaagtgaccaaatcaggctctttcccaatgttatcaagctcatgaaacatcgaaagagcatcatccaaagaacccatctcgcacaatgctttaatgacaatgttatacgataccaagtctggttctatcgaaacacgagaaggcaactctttaaaaatctcgacaactttgtcgtatttctttgatgcaacaccagcctttaaaagggcattgaaagaactcacagtgcgaggacagttcagctcaggcaattcatcgaacaccttctgtgcgtgatcaaacatgccagattgaccgtacaagctaatgaggcgcattgcgaaaccttggctggagatgttatagtattgtttctggtcttctaggatatcttcgatcatagagaacttcttggcaccggcaagacgggccaccgtgcgcctgtaaatgctttgattgtgtcgaaagcgtgaggacttagaggacttcttgaactcatctaccaatttctggagctgggtttcagtggtggaagcggaagtgttctttaccaatcgtttattgccaagggtttcagtggtgcagaagttggcgctgggttttgaaggaactctcgtaaagatagctcgaacacgacgacacagagaagacatttttatgtgtctttgtttgcagacactcactcgcttacaatacttgtttttctgtgtaaacctttattataacaggcatcaaatgaaggctccccaagcccaacaggtcagctaaacctaagcctagtttgggctttttacgccattacagtccctcatgagtgatgagtttgatgacatggtgaagctcatgctcatgtaattatccttttcactttattttagtgaatgcatacttctttcataaaaaggatttattggaacaaatagagagaactttaatattattttaatgtatatttgtagtttataagatattttattgtacgcctaaatgtggtttctataactataaaatatgaagaaaaaaaaaatcttgctatgatgtcaggtctaccaactttaacaaaaataaacaaatgtatgtgaagccagataagtttttatttgttaattttccttctctgttttgtatgtttttttttcagttctaaaacatttctcaaatatccatggatacttacttaaaaaagaaataactataaatatcaattttagaaaatcaatcaaaaacagaatgtagataacttcgagttgaaaagctaggccatttttgccatctgaattggtcaagtgaaaatcagtggtgagtctcatattaagagttcctgtatctctgttgcgtggtgttactctatccaacaacatcaacaatgtggacgaaaaatcctaaagaacttgatagaatggttgtgatttactaacttggtcccaaaatttgataatacactttcttctgtcgccaaaccttcaagttcgacatcaaataaccatatggatcatgacgtgaatcaattctactcgtaatgagtaacaaagttgaatttcaattcatgtacaaatgaaaatgctgagccaactcacaagctagccaagctaatgcagcagggtaagcaggctgaaatgaagtgtacacctcacaagtacactacttcactgctaaacccacaaaatatgccagaagtagtcttactataaagagagtaatagattctggttactgaagtttcttcacagttttcctgagaagcagaaaacttcaaagcttaaagcttaaaccagtgacacctaaaaaatagttaactttgcgctacttataaatacacaagcagagaagttggttctatgcaaacaagaaatatagtatatcagcaacacaaagtggcatacaattctcataaattattaaggagtgaccaaccaaaattgacaactggagtgtactacttgacttgtctagtgggccagcggtctagtttgaggcaagagctaagaaataatttaaacttccaactaggaaaagacaatcgtctgtctcttcaaaatattcttgtagaacaaaaagacaattagcaagcaaagcaagataataaaagtaaaggcaggcgctacttgtctgaaggaacctctgattctgaaggcaattcaggcaacttcaggcgatagcgacggtaatcgttagtctttccaagctccactagtttctttgcttcctcaatcttggacgccttagccaattcttccaccacccgctgcaataatgccacatctaaaaggaatcgccttttgaaaacttcctcgcaaagctcaaaagcaaactccaaatcgccctgcttcctaaggaagggaatgagtttttcaaaggtagttttatttggcacacactcgcacttcttcatttcattgtaccactgcttagcttcctccaagttctcacttttgacaaaactttcaatcaccagattgaagctaaacacatctggttcaattcccttagccctcatttcaccgatcaagtcaacaacttcttttgttttcttgtccttaaacaatccgagcaacttggcattatagctcctaatgtcaggggagacataattcttctccattagatcccatatcctttcaccatcagcaaatcgaccttttccataaaatgcattcaataatgtattaaacgaaatcacatccggcttcagacccttcgttttcatctcatccagtacagaaacagccgaatccaaagaatccatcccgcaaaacgccttgataacggtgttgtaggataccaaatctggttcaatcgccaacttctcgggcaggtctctaaaaaccccatcaaccttatcgaacttcctggagtttacacaagccgctaaaagagcattaaacgacaacaatgtacgctcgcagttcctctcaggcatttcatcgaacaccttctgggcattgtcgaacatccccgatttcccatagagagaaatgagccggaccgcaaaaccttctttggagatatcgctgtacttcttctggtcttcgaggatctcttcaatccatttgaaccgtttagcagaggcaaggcggcgaaccgtgtcttcataaatcccagatttggttcggaaacggtaagcctcggaggacttcttgaacttctcgacgaggcgtttgaggttacgctccttgtagacgacagtgaagagggagttgttggtggcggcggcgcaactcgcctgggtcgtggttgagaaggcgcgctgaaggagttgagagaacgacattgctcttctatgggactttaggggttttggggtttgggtttggggtttattgatgaaattacgcttcgctcacagtctaaagtaatttagttttttttttttttttttttgaaacgcagtaatttagtattcataaaactaaattaaaacaaaatgaatgtaataattgagtgtaaaataataaaaagaaaaatatctgaatttaaaattagacatatataataatctaaaaattttaaacaatattttctcaaacataaataaatggataggattaatacatttgcaaatattttaataaatttatgggatatgagtataactctattaaaattatattaaaataattatagccttgaaatatttttcttttaaatatataatcaccaatttgtagttattcttgaactttattagtagacatggtccaaaatatgacattattttaaagaaaaattacaatttaaaagtatttattaattaaattagcaaaaattaattgcaaagataaattatactataactatattaattcacgaaaaatcaaaagtaatacacaccatggatgaactatattttatttttataaatgttttttaactatatataaattttgtttataaaaaaaattattcaactatcatttatgtttcttcacatcattttatgtatacatataaacaaattaatgaataggtttaataaaatatttgtatataaattagaaagaaacaaaaacatatatatatcatacaatttaaatgtaaaataattaataatacttcttaactcaacgattaatccttcattaagaacccaatcctccatgctggttgcggttaaaactcctttcgattaacacaccacaactttggcattgctttacacaaatgaattgtacttttcaggaatatgccagctccaacaacctcactctcttgtacttatcaagtcaatagaagactaaccaccatgacatgaacaccaaatcagaaaagcaaagagtaaagaccatctcccaccaatgctcacaagacaaccccagtcgttttttttagccttttaaaatataatatatttatatatatatatatatttatataaaatttgctattgaaacacatcaaagatggagactttatggctttaaaacacattccaatattgagtgtggtgtgttagattaactagagggtagaggggtttgcatattaggccccaaactttgtttgttttgtatataacccataacaaaatttggaatagcttaactgattcgcacgtacggaaatcttattctctctcttgccaaaattagttgggctatgaggaattgtgcctatctaattgtgtattataatcatatccgtagcatctcattacctctctcttccacacacgaaagaacatgttacccttgtgaagaccaatttcaatataaatatttatagatatatatatatacatatatttatacatataacttgtctcccagaaacactacttaacgaaatactgccgcaaaaggggctctctccctccctcacttggtgaaactaagagctcccaatacttgcaggatatggaccagtttatcctgagctctggtttggatgaaatgtgcattggcgaaaatggaaggattagtcgaaagaaacccgaaaacgagcagactgaatccaatttcaagtccaagaatctccacgctgagaggaggaggagggagaagctcaacgacaagctgctgcggttgcgtggcttagtccctaaaataacaaatgtaattttaacgaactaaaggagaaaactttttgccttctacattttccctcatttcagtgatttcacagatcacttttgcagtgtaaaactaatagcattggtctgtgatttattacagatgaagaaggcaaccattgtggacgatgcaattgcgtatattagcgagctgcaacatactgtggccactcttcagcaccagcttttgggtatagaaacttcatctgcggagggaacagtaccaaagaaagacggcatacatattcgtgctgcagaacggaataaagagctctggcttcaggtttagtaaaaaagtttcacctatagtaatttccaaacattaacgccagcaacgttctttaacttgatgtttgtgtttatagccagatattactgtggctcaaatctttgaaaacaaactttggataaaggtgatttttgagaagaaaccaggtgggtttactaagctgatagaggccttaagtgctttaggcttcgaaatcactgataccaatttaacaaccttcaaaggagtaatgcaagttacattatgtctacaggtaaaacacaacaacaaatgtgtaaccctccgttgtctttaattttgtattgtttagttatccaaaatgttatatttaagttcatttgttacagggattttctcgtgaattgcttgccgttgaagaaattaaggaactgttgcttaaggttgttatttaaggcacatacaagaatacagactggatagatgattaggcatggccatgggctcttagcattagaggaatgttataatctaaaataatattttgtgaggtaacaattaagaaaaatcgacactaattcatacatttaaacatatataattataatgaatgggttatagaaagaatattatttatttggtgaagaatctaaactccattagtctattttgatccataccatttcacaataatgaagaaatgaatgaagttttaccaaatccatcgtagccagcaaattaatgaaaccatgtacagattgattttgtgatctcagcccccatatttggtatagaatcctcccagaaaatatgattttccccaagatgtaagaggtttttcaataaaatcaaagtactggattctcaggttagccaaaaaaaagcaatgttaagaaaatagaaaattccaaatttcgttcgattccaaagtccaaaccttatacacatttacatatattctaactatccttaactccttatagcttcaatcaacatgaaaaaacatatgtacctgtcaagaaatcaaaaatcaaaaacatacaatagcactggaaaaaatatctgaaggtggatatcatgatatgaaatgttctctccttttcatctctgaacttgaaatcccatactcttccttatccctgcaattccaaaattcatattttaattctactatatagcaaaagagcccaacaaacactactttttacccaaaacccctgttttggcagtatctaaaatatcctcgattttttttttgttagcaatacaaaaacaaaactttaacttgaattttagtattgattctattgaagagaagtttccaagaacaaacccaggaagaaaaaaaaaaaaccaaactttcaaatttaaaaatccttaaaataataataataataataataataataataagagagatcagaagaagagagtagtaccctgaggtttacagacaggaggatcttcaaagagagaaagagaaagtcgcttatgggcaacaccaatatcgaacaaaattagaccagaggaagggtcatttacagatatgcccttgacgggcagccatagaaatagctcctcctgagaaagaccctcaagcccttgaagccctccgaaggtaaggttggctctgacgacgctttcatagtatacccttgtctcgaattttgagaggcaaggccattcgaggtgcacttctaggcgacccaagtggtccagatcgtatgattttacggtgtccgggaagagcccagcgggcaagccctggcttcggagcaggttatggagtgaagaagtggccgtcagagaatgaaaaactagaatcaaaagaagaagatggaggatcggggtgagacaagatttgggtgtttcggacattttcttttcttccttggagatacaaacaagaacgataaccttgtttctccgctatatgagtttttgaggtattaaagaagaagagagggttttaattttaaggttgtttcgtcttttaagaagttactatgatgaaaagtggaccccctcaacaagaggagaggacagtgtaaattattttattggccaagttttaaacaaattaaccacagcttttgtttaacttgtctattttaaaggaaaagttttattaccaacttattattattatattacaataaaatataattacttttatcactgtggaattgaaagagtcaagactgaagaagaggctataatttataaatttgcttagctggtttttcgggagggaatcattggcataataattccaaaagtttgccgatttggttttggaataattggttttgaaggtaatgctggatatatatgatatggattatgcttgagaaaacaggccaccttactttgtctataaaacaataatacaacaaatgtattatacaagacactaaaatcatcaacctgtgcttcattttgccttttttttttccttaaaaaataattaaacaacgattacgaagctatctggaaattaaaagcaatttatgaagaaatgcaatactttcggcactagaactggaacacaaggataaagaaagccaatgtctttgtaaaactcttgagtaacttgaatgttgtttggtttgacatgtacgcgtaccttttgctttggtggactacttgattatatattttttttaagaaattatacaattttattaatagcaatcttcaattcaatgttaacatctctctcgtagaaacttaaataaagaattagaattagaaaaatgagttaactaatcagttgtctgatttccgaatcgttttataaaattaaaataacagatgaaaaagattgcaacatcacagtttaactttaaaaacacttatattcaatttactccaccgctgacacaatgatagatctgttgcagtaaattcattcgtgcaaagtacgtaactacaccactaacaactcattcagcttaaagaacttgttgttcttaaccactaacaacaatttgatggtgagctatcgaagaacaaaaaaagaaccaacaacgaaataaaacaaaacaaaactatatcacaaaagactaatcacactaacttaaacaaaaggcactcaaaactataacagagacaagactaatcatattagtaaaatttcagactccaaccaaaccacgcctaaacccaaagagggctagcaagtttggccagagaaaagaataacctcatcgacttcagtattaggaagcgaaacctagcaaataatataaaatttattcataatatctttttatgtatatttatttggtatggttttgtgttaaattcaataatgtttttatctatttattaaaagtaataaatttttatttttattctaataataaatatatttatgttttatttttcttgtcttcatatttaaaaataaataaatacattatatttttatatgtatttttctaaaatgtaaaaaaagggaaaaagtataggtgcttttataatgtataggtgcaaaaaaaaattgttgactatcaaattcatagatatattttgttaaatctttgtatacattgattacattgtgtagttaactacactaaatatgattggatatctatttaattaaaaaaaaaatcaaagacaaattcatccgtcaataattgtaggtcaatccaaccttagttgtcccaagtagatacctgaacacccatttcatggctagccag

SEQ ID NO: 26822 - DNA, 1589 bp, Cannabis sativa
aaaaattaaataatagtaaataataagaaagactatatacattaaagtttaattgttataaaataataagcatgcatgagagattttttattttcttacgataaagattagatctttctaaagatagaaataagaaaatgtaataatgaattagtggtcttaagcctatactaattgggttttaaaataataataagacactagtgactactcattactcattagtcaaccaatataaatattctagtgtcccttccattacaaaactctaattgaaattaaaatatgcatgttatttaattaactataataagatttacttattaccaaacttaatttaaataatggttattatgctttaaatagattttaaatgtcatttatatatattttaataatcttaattaatttgattatggtttcatatttatagagagttagcatatgatcttccttagtactttgtttactacattaaaataactgcaattaaggtaatttgatgaaataagtataatatatatgcatgatttatgttttcttcgaaattattaaaaattggaaaggtgcttttttgaagtccttagaggtttaattgcttgagtatacttatttataattgatatatagtgtagatatgagcaattagcttggaccccaagggatatccatttttgtagaagaggaagaagtcacacaaaaattcacttgaacaccacacacgcactgccgtccgaccgagttgagctggtatggtgtgtaccttattttttgaagaaaatttatttattaattagtgtttttatttaattaattaaaatcatttttaaacgggtcggtttaactaattagtaaacagagacgttttcttgtctattttcagcatcgttctcacgatctcaccttctaacattcccatgatcagataacgtctttcttcctgttactatcttttgtactttctctttatataatgcattaaaaccaacaagcgaaaaatatctttttctaacaaaaaattatatacataaaaatatacgattatattacaatatgtattccaagcagtagtgttttgttgggtgtggtatttcgacgattttctatcgtgcaatagagctctcatacagtagtttgactgggatgttttatcttggggatgatgagtctaatagtctgcttgcacaattctaggtagtgatgtgaacgtcttaaagatagcgacctagttagcgactcaatccagattttaattcgataaatttaatcttttttatttactgcaacgtactatttcaacatgtttttgactcaatatttaagtacctttaataaatttctagatggatcataatactaataaaatctcataattaacacttttcataatcattcatcataaatagagacgttttctcgtcttgattttttagcattgttcatacaatctcactttctatcattctcatgatcaaataacgtcttttttcccgttactactttctgtgcttttcctatataatacatttgaactaatgagagaaaaacatctttttctaacaaaaaaattatatacagttatataagat

SEQ ID NO: 26823 - DNA, 3578 bp, Cannabis sativa
ttttttttttttttgcaatttaatgaaatattaaataatttaacattaaaaaaaagcggattggattggatttaaactgtcatgcggattggattggatggagtttgtttttattggatttcactatcttatatttgttgtttcagatttcttagtataaaatatatatatttatatatatgtatattgggtgaacaataatctgcaatacattctaacagaagaaagaaaaactagttaatcatttgatcctaaagttcataatagctactagaaatttcaaacataaaaaagaaaaaaaaaaaggggtattaagaattagagggtttctatcacagaatcatagatgcccatttgtacataaacaaaatagaaaactcacaggggagccttgactggtggcctggttaaaacatgagtccccaacactttggacttaatccccttttccaggttactttccatcttctctctgtcccttttatattattttatttttgctttgctttgctttcttcagcctagtttgaactttatctagttgcctacgatcacagctcactctgttttagggaaactatttttataaccggataaatatgaatatgatttgaactatggtattggacccaccttttcagcggcaatgtacaagatggggtattcctaaatgcccattatgtttttctttctttctaaatgcaaggaatttggtttttgatgttgagtagtattgggtttagaggtatatatataatagtgtataccattacttttttagctagtggatatgacatatctggaggatgaaagtgaaaccctaatctcaataccatttcttcgattctgtctctgttgttaccctagaaagtattacagatcggagatcggagattggagagaaactttgtctagttgtttgagttagttttctcaagttttgattctctctgctttgctgtgtagagttgttttgcatttgcattgatatgggaatttgttattattcatcctattctctctctctttttgatgatagttttatttttgtcgtaattagtttatactgttaattagtacagttcttagattggtatttgttcctatgtgtatatgttattatttcattactgtgtttaagttgtttggtgttgatgatgatgatgatgaagtgtttggtgacattgtgaaatttgtctttaaataaaatctaattgatgaaaagttacatagaatagaacaaacaatgttgtgttgttgattggagagataatttgtagttggtttcaaattttatctgctgttttaattggagaatcaaaatatgcaatgcttcttcattggagaagagatgatgataatttgtagttaccaattaataacaattatgatttgttcatttgcatctctttagcattgttgttagcacttgagttcaattttaatgttgttttatatcatcaagaacttttgtaaattgtttccctttttctagttttaatgcaatgaaaaggacaataagtaacttgagagaaaattagctctcctgttgaattcttctatagtatgaataatttaagcaatgttaggtaatagattccattgatgatatctaatatcaggatcaggatcaggataaaagcattggctggctattagttttctggataatttaggacttattcaaatttaaagtgtttattcatgatttgttacatttttttttgaagaatttatagttactattagctctgttttctgatgtcatgtttgctacaatttcgtgttatcataaatatgaggcctctgggtccaaacattgtcctttccttaatctaaattgatgtcctatactgctttaatggttttcttctttcatgcttttcttttctttaagaaaaaaaaatcagtcatgtttatgcattgatattaattttgatatttgaagctatttgttgttttcctgagcttatgctgtttctcattttcggttttttgttaatgaggctacctgtgtttttatatcaaataaatagcaagaagaggcgaaacaagtcatcattctctaagcgtggaaagaggcaaaaaaaatcaatggctactttgaaggaaatcttaacacgacgccctgtgtccgccactattcgcctgactgtaccagcaggaggtgctcgtcctgcaccccctgttggtccagcactagggcagtaccgattgaacttgatggcattctgcaaggacttcaatgctcgtactcaaaagtacaagccagacacccctatgtctgtaactatcaccgccttcaaagacaacacattcgagttcacagttaaatcaccatcggtttcttggtaccttaagaaggcagctgggattgaatcaggaagcagccgtccaggccatgtaattgcatcgacactgccactcaagcacgtgtatgagatcgccaaagtgaagcaatctgatccttattgccagtacatgtcattggagtctatttgcaagtccatcattggtactgcaaataccatggggatcaaggttgttaaggacttggaggaggagtagatcatcaattcaatcgttgtccgaatccaaggtaggttttaaggtgtcctcataaacttttgttttcttccctttgtggaatttgttgctgaggaaagtaacatctttttaggcttagtttcaatccctttgtagaagatgcaaagaaaaagtaaaaaaaattacaaaagagaattgtttggtaaatttatccttgagccaaatgtgtgttttacataagtggtcaaacaatagtttaccatggtgagattataattttttttttttgaataaaagcgtaattatcttaaatggtaaatatggttagaccttatggtcattacaaaataagtttttcggtatgaaatctactgggataagaccaaacatttggtaagcaaatgcctatttagccacattatgagcggcaaaattataagttctactaacattaaaaaaattacaactaataaacaaaggagagagacttaatgagattttgaggttggttacccaaaattatgctatttgggtgctgaggaatctttcttaatccaaaggctttctcatgattcattatgttatgagaattctcatgtgtagttcaaagcatatttgtcaattgtagttgtgtgaatgtgaggccatcttaaaatgtgaaataatctcacttaatttgctatatacaactatttatggttaaataatgtaattcacagtctttttctacaaccataaaagattattttactaataaaaaaatttataaagactatttttatagaacacccttaaaatccaatgaaaacaattaggtgtgtttctaaatttgaaatatttgcatctaaaagtgaaagtactcattttattacatttgtaatatttaaatgttcatttttttcaggttttggtgttacatattactaattagtattaatatatgcacacataaattacacatagatttatattgcatttaattttaactattcaacgtattttacttcttaaaaatgacttgtgacataaat

SEQ ID NO: 26824 - DNA, 2333 bp, Cannabis sativa
  modified_base (66)..(75): a, c, t, g, unknown or other
  modified_base (263)..(264): a, c, t, g, unknown or other
  modified_base (572)..(573): a, c, t, g, unknown or other
aatattatgtcattatccacgtgttattttcttattggtatattaaatttaattttttttaaaaannnnnnnnnntaatgacttggaccaatcagaaatcgccacgtaacaattttcttaacaattaacagtcaagtatctacaaaagttccaaaattataacttaagtattatcaccgctaaaaattaaacttagatatttatttacaactggaagttaaacttaagtatttatgctacaaattactctaataataataatnntaataataataataatcaaattaagggtgagtttatggtctttggtttgtcactccaaaaaaatttatttttagtcacaacaaaatttctgactaaaagtgaaaaaattgtgagtaattataaattattatttttatgttgtgactaaaagggatccgtgactaaaggtattagtcgcaaaaatcacaatttattgtgactaaatatatttttagtcacaatacttgttctgactaaaattaaattagtgacaacttgtatctaaatatcatgttttagtcataagtaaatttttgttgtgactaaanntcacatttagttacaaaaaatttatgttataactaaaaaattgtcactaaaagtaaatttttttttttagcatgtgttatttttacttttgtaaagttacatatttcttagtttgagtttctgagttgggtttctccataatgaacattcttcattataaaaagaaaaaaataagaaagaaattaggtttcacataaaattatttttcatttagcttttttatttatatatttaagtgattttaataatttcttaatttttaaataatttggaccaatcaaaagttgccacatgtatacatgacactactagaaaatgaatattttatcccactttctatacttgaaataaaataaaataaaaatgggataaaggtctgctaagagtttttaccccacgtttgtataaggcacaaggatcatgtttgattgagcactaaaaaaagaaaaaattacactaaaaaaagttaaagattgttttcttattgactggccaaacacgcccttgatgggtcttctatcacactttggagcaagggttactgtttggctggtcaccaataagttaaattttcatcctttattgttttgtttgaaccaaacagggtgtaaaggagaaacccttttatcgctgtttttaacaagaaaaccatgataaaagagttttcctaattcttatatcccattagggttttatttggagtgatatattcctttctgacacatatttcttcagtcgctctttgtatctttctcccgattctatttcagctgcgcatgaaggctcctctccaaacgggctccacgccctctgaaacttctagttaccattcatcttcttcttttgtgttgttttgttcttgagagattcaagctccatgcccacttatctcgttcttctttttcctttttttttgaaacaccgatcagctcgatctctctacttctctcttttctcaggtgcaaaggtttgttgttgacggtggttctagttcgcggcttttcatggtggacacagcttcatttatgtatgattgtttatcttacaaaaaagattgtaaagttctaagattttttggtataaagtttagcttctattgtaaagattttaaaattctaaattgatataaattttcggtttctgattgtaaatacggtggtggctttcgtggaactgatataagtacttttgttgtagtttaattttttttattatatttgttgacatttaatccttatttttaaactaaaattgggataataaatgaggtctttaattatcccattttttttgtaaaaaccagaattaaaaattctttgttatcccttttttttgataagatgttttattgcatatatcccgatttttattttagtgaaaattgagataaaatgtccttattaaaatatgggataaaaagttcatttttatagtagtatgatatatagtgacaaactttcaaacaatataattccacaaagaatttgtggtagtaaagtagtagataagatatggctaataatgagggctcatcttgaagataaatctccgatcattaattaatattatctttgtatatagttgaggaaaagatatcaaaactcataaatgtcatgatagaataattaatatgatcaacatattcaattgaagtagttgtacgtagcatactattataaatagaatgttaatatatgtagaaatgatatacaaacacaaacatatatattgtgagatcatcaatcaagaaatcaaatcat

SEQ ID NO: 26825 - DNA, 3367 bp, Cannabis sativa
tccagcacccgcggtggccttaaagcctaagaaaaaatcgatggcatctactgaatcgtctgaatcaccctcgtcctcattaaaaccatcttcaacatctacatcatcatcgtcgccaacatcatcatcatcatcatcatcatccaatgataatgaaacagtagccacttcgacaaatacatctggtgctgaacggcggccagtatttgccacgatctccattcttgttgctgttgttgcattgttcctatgatacttatgcatatcatcattctccatattaattaatcaatatttgattttcaataataatcatatatacatgcatctttgtgttcgtgtaagtactaattaatattttttaattagtattcaatttaatttttgtgtttgctttttcatcattatcagcattatattgtgttaagagatatataattgaattcataatgtatcgaaaattaatttctatttgccaattaagttattatacatcaaaagtttattcctttgaactagtatttttctacctacgtgacgcatctaaaacaaaactaattacaaatatgatttaaaaaaaaaaatagaagtagaagtagaatatatattggaataatatacaataatatttaaataaggcatcactccaaaatattacaacgatcatatctaattgccacttgaattttatttttaccattaaaaatttcatccaaattatactaaactatagaaattttgtcaatttaatttaagaaatatttggttagtaaattcttctaatataagctagagttctataatctccaatcattacaattataataatattgtaggaccacaatggatggctgtcctaattgtctaaaggcagaggttctgctatagtatgagatcatttggttattattgtgcaccaataggggaattttctctttctcaacacttgccctcaaacggaagggtgaagttctcacaccgagtttatcaactagaaaataaaatttggatgctgaaagttctttggtaaataagtttgtgatttgatcatgtgaagggatgtatcgcacttcaagttgcttttgcaaaactttgtctcttacatagtgcatatcaatttctatattttttgtacgagcatggaagaataaattcgaagcacgtatactggaacttatgtaatcacaccatgcaattgatggcattaggagtggaaattttagttctttcagcagagaatccaagagatctttgatgcaacatgtaccaaagctttgtattcactttctgtgctagaccttgaaactactggttgcttcttagacgagctacacactaaggtttcaccccaaatacacacagtatcctgccacatatcacttttggacgacactcctagttcgcatttgaataacctatgacacttaacttgctactgttgctgatgtgaagcccctatgtctttgtgcctttaaaatacctcaatattctttttactgcactccaatgaactattgtgggagcttgtaagaattgacttagtttttttacattatatgttatatccgatcgtgtgtgacacgggtataaagtgcttcaataaatacttttataagttgatggattgctcattggttcaccatcattagtggacaatggttttccagcagtaataggtgtgggacaaggcttgaaattcgatatgtcaaatctttttaatacatcttcaatatattgagtttgagtcaagtagatacttgtttcatctctatgtacacttcaatccaaaaatagtgaaatggcccgaggtccttcaaaatgaaatacttatttaaatctgaaacaaacttttcaacatgactggtattattttctataaaaataatatcatctacataaatgagcacaatgatcgtttcagatttataaaagaataaagatgtgtctcacttagagttctcaaatttgcactccagcaaggtatttttcaatcgatcaaaccaatcttttggagcttgttttaggccatagattgacaagttcaatttacacaaacaaagttttctttccctttttcttcaaacccttgaggttgagccatgtacacttcttcttccaagatgtcattgagaaaggcattgttaatatttaattgtttgattttctatgcatccacttgaaactgtaattgtatgtataattctcacagttggtgccttaacgacggggttgaaagtttaataatcaaaattaatgccgggtctttgatgaaaacatttggccactaaccttgcttttaatctttccacagttccatcagcccttcttttgactctgaaaaatccacttacatccaacaagattttgaaattttgagggaggaactaagatccatgtcttgttgacttcgagagcatgaacctagtatatattcatagtagctttccattttttgtttttagcaaactcaacagaatctggtacatcacaatcagagatagcttttgaggcgttaaggtaagtttttagcttgaagatacctgccttagcacgagtaagcataggatgtgtgggccgtagtgatgacttgatagtttcaggagctagttctgcatgaatgagttttggtggaggctcatgttgaatttcaggaatattaccagcatcaaagtcatcaaaattatcaccaaaagtatccaaattagcacagttctcccctgcatgacctgaaacagaacagtgaagacctatagaagcaaaactgtgagggctagagggtcatgaatgtacttgctgtgatgcttcaatgggaggagatggatatgaacaggagttggatgaacattagttagaaagaggaacatgaagggaagaccatgaggagctatgaataatgagaggttgaggattttggtaattattgagaaaactagttgtgaagagaaattctatctcgttgaacataacctttcttgagatatacacacgacccgttggagtgaggcacttgtagcccttgtgagaatcattgtatcctaaactgacacattttaatttttaaaattgaaatttatgtgattggtaaggtcttatatatgcaggcaaagcatgcaattccaaaatttttgagaaagacatagttaggtttttgtttatgaatgatttcataagggtgattgatgttgtaggacatgtgttggcaatcgatttattaagtagacagtagtactgaaagcatcatacgaatatgtgagtggtatgtgtttttgtgtacactacaacaaattaatttattaggggcgacatattgtcgcctctaataatataggtattaggggcgactttgatttgtcgccccttatgtaat

SEQ ID NO: 26826 - DNA, 2104 bp, Cannabis sativa
ttgaacctcggtttgggcggtttatcttattcttttaactttaatattaataaaaaaataatatattattttcatattataagtaattataatacataaaaaaaaaacttaataatttaatatatatgcataacggtcggtttcggttttttcggccggtttattaccaaaaaaacccgaccgttcaatggcagttttaaccgttggcggtctttttcggttttcggtttcggttccaacggtgttcggtaggtcggtttgaacgattttttaaatttttgggattttatgctcacccctacttgagagtaatgatagtattagttcctcactatcacctcaatgaaggaaaataatttcctaacaatgtcactttgagtctatagcaactcttaagatgaagattcttaagacgaggaaaaactccaccttcgtttaatgaccactcttcgagaatatgcagtccattaaatttcaaggtctccaaggttccaaaaaataatggcattgtttgtattgcaacagaagaagagtcaacattagtagcagaataataaaacttcgtttctgggaagttgttttgatagttagcaagtcggatggtagtagaaggacttgtttatggaggatcgcaatcctggcagttctatgggctgtctggttagagatcataacagaatttttgaaggtgctagtgtacatcggatgatctttggcataagataagaccgttgacatttacttgggtgtataagactaagctttttgagcatttgtccttcttagacttaaagtagagatgggagatctttgttgtaattttttcttattggggcagttgaacctcagtgttgtatttgtactggtttggtgctattttgttttagttcgttttgagctaaagctttgtttcgatggtatttctccgctacaagtgagggttttaataacattttcggggatgggatcagccttatgatctctaagaaatccaaattctttattaagatcattatcttattttgtgaattttgcttaacaacacaatgaatcatcctattttgcttggggagatttaagaagcttggagagagatgttatcctaatttcttaagtgagtgtttactctattcttttataacagacttaatgatgaaataagaaactggatggattatagaacataggtaactggagagcttttgttaaggaaaaatcatgatgtaatgaatttgttgaatgacatgacagattttgattacgactggcactgggatccatccttcagggtcggtgtcaccaataccttctttgttacccaaattcaaccaaagaaaaagaagaatacactatcacttgaaaaaaaaaattaatcacatggtaaccatagtaagatttctatatgtgataatttaagggtgcataattacttcagaatgttttaatgacaataacttaaataacgaaagttatgagagttgtttgaataaagtagaagtacattgaataaactgaagagatgattttgatttgatcaatgaagcaactctcgtcttccctaaaagttattgaaaatcaagtcgattatatctttaattttcaatatataaaattaaaattaataaatactactttaaaaaagttaaggatgaatcatgaatgaacgatcatcataagatcatatctttatttttgtaaatgaaatataaaactgacaatacataacatttgatttattcaaatcaatagcacaatatataataactctacaacttagtgatgtgagtgagttgcagtgttattcattaatattattattttgcaacaaaataacaataccaatattttattctttagcacacatgcacacttatatattcttaggcgttggtggaggggttgatcaattccatgatccaggcgtccctggcacacttggtgtatcccatgcccccggcaccctcggcgcccctggcattcccgacgcccccggtattcccggcactccaggagtttctggcactcctggcatccctggtcctcccgacccccccggtatccccggcactccaggtgtttctggcactcctggcatccctggtcc

SEQ ID NO: 26827 - DNA, 6037 bp, Cannabis sativa
gctcttccgatcttgggagatcgattcttcttcaacagaacacacagggcagagagaatgagggactgcgtgtttgattcaaagttgcaccatagtggggagagagtttgtgcatgccctccacactaaatgaaaaaaaataaaaaaaaaatggtattagaaacacgttacattatatattttatttttttaagaaaaatatattatttatattctatatatatagaatattattaattgttctaaatgtaatttattaattattttgattatatgcgattcaaactgtgcatattataaaaattgccattagagaagtagccaagcaaacgaactccctatcctggttcatcaccgccgccctaagaccaattttctagtcttgttcttgaatatcgacacatctccaaataaattgagatcttccaacaccaaatcagtgtttgattctccatgagaagaccaactcgcacgtggagaacttggaaccacatccaaagacaaaggaatttgagcatcttagtacctcgaaagaaaactcaaagacttagctaaccataggacccgagagcaacttatggtcatggacaaaagtgtttcgtctatgccaaacttttgacattacgtctatgccaaacttctgacattactaaactatacttttgaatttttcagatcgttaaaagttctcttcaaattttgaaattattgaattgaaagacttccgttcacttttactaacgaacgtctattgtcgacgaaagttcgaaagcacaatttgatatctcaaagttaggggacacaattcagtacatagttatcacgttaagcgtcctttattaaagttgaacaaaatttgccaaaaattttcaaacccaataatcttaataatttggttttttttaacatattgaaaagttcgggacactaatttagtacataacaaaattatgagaaaattgaaaacttagtatatgtgatgccattaattagagttgttcattaaactgctcaaactgcccacatcacaaaaaaaaaaaatgcggcttaaaattctttgcgtgcggtcgcggtttgaatttttttaaaccgcgggtgcagtgcaatttgcgtttttaaattgttaatatacgattcaaactgcacatattataaaaatactaatttttatatttatttaggtctatgtgaaggtccagcttaaaacccactaattattgcattgttaaaacttgaaactttttttttcatatttattttcaagtcttatggtatttttgactagtgttgctcctcaagctttgttatatttgtgatagtttaattatttggtgatagtctaacgtctaaactgcagaaaccgcaccgcaccatttttttttacagtacggtatgcaatttgaaaaattaaaaaaactgcatgtgcagattgattttaaaaaatagtaaaaaaccgcaccacccgctctgcgtacaccccacaacattgattgttttgggatttattaacttttttttttcttccaaaaaccttcataaggacttctctctctgtctctagaccctccctacagtctctctcagctccaaccccagcctccgacagctcccacacaagacccaacgccgacgacggcgacaggcggggcaacaaagcttagacctaaggagtagcaaggaatctctcggtgacgcctccaagctccattgtctcgctctgtacagccttcgttttgctactgtaagtctcttattctctgtctcattcaatttttaaacttttttctgggtatttttaaaaagatttgcgtattttagaatctgtaattttatgtgataatgttgtgataattgaagtgtagaatcaaatctttagaaatcaatattaaggctatgtttgaatgttatattttggcgaggaaaaaaaaagtgtggagaatgaaaaaattaatttctcatgtttggtactgaaaattttgttgaattaagtatttctctatgcaatttttctttgataccaaacactaaaatttatttttcttgattttccacttgttatttccctacatgtttctttctcattatacatggtcataaatattacaaacaacagctttgaacaattaggtgttattgtatttgtgaatttgttgtaaatggaggtagcatatatattaagtctatgagtatattatataaagagaatggaatttgatgtgatgcaggttcatgcttcttggaagccattgtagcttatgcttataatggttggaaggttatcaactaggttaatgaatatttgtgtagcctcatgttgtaaagcccgaaacttggcaaaagctgaagcagttattgttgatggtataagattaggcatacttcccagtgtgatcacttacaatacattggttgatgcatattgtcggtttgttggactggatgtagcttattctattcttgaaagaatgaaagaagctgggataaaggcagatgttgttacttacaattctttgattgctggggccaccaggcggcgcttattatcacaagttctagatctgtttgatgaaatgattgaagcgaacattactccggatttatggagttacaatacactgatgcattgtttcttttgtttagggaaacctgatgaagccaataatatttttcgggatatcatactcagtgatttttctccctgctcaactacattcaatatcatgcttcatggtctttgtaaaaatggttatatcaacaatgccattatgttatttaggaatttacagcgtcagggatttatccctcagatagtgacgtataatattattatcaatggactttgcaagcgtggcagattgagggcagcgaggaaaatgctccaggagcttggagaatcttgtttagagccaaatgccatcacctacactacagttatgaaaagttgttttaggtcgaggaagtatgaagaagggcttgagatcatgtcgataatgaggagcaaaggttacacctttgatggcttttcatattgcacagttattggggctttagttaaaactggcaggatggatgaggcaaatttttacatggaagagatgttagcacatggcattgaacttgatctagtgtcatacaacacattgattaactggtattgtaaagaaggtgaaatggaagcagcctttaagctattggatgaggtagagaaaggtggttttgaatgcgatcagtacacacacacaattataattaatggattgtgcaaggctggtaatattgatggtgccttaagacacttacattatatggacatgatgggatttactataaatttggttgctttcaactgcttgcttgatggaatgtgtaaatccggtcagattgatcgtgcattgagggtgtttgagacaatggagatcaaggattcgtttacctataccatcttagtgtgcaatctttgcagggcaagaagatatcagagtgcatccaagctcttgctatcttgtgtaagaagtggcatgagaatactcaagtccgctcaacgggctgttcttgatggcctacgtagtacggggcttacaaatgaagcaaaaaagcttcagtccaaaatgcgattggctcggatgtacaatagtgacttgggtgtgaggtcctaagacatgctaccattctagggcctacaaggtacaaatttatttattatgaagaactgtcttggtgggaacgagttgttagtcagtggtaccatgaagaggaattttgtttcaaactcaagtagttttgggctaatataattgtaccaagacacaaagtagtagtaagcactactgctgaaactgcattaataaaatgtgcctaattacatgttccagcatgtacactactcatctgaatgctgctattgagtgcatatggccgaaaggtcaaattatgtgacattggaatacaaaattcggatccttcattcccaggtcaattggactatgttatgatggatggtgactgataacttctattaagttcaattgttcttggggaatttctttggcggggctgtgtaaaaagttcccaccggtggggctgttttagttacatcttattggttggtggatgtacggattagtaaagaaaccgggcatacagtgatattggttgcttcaagtgttcttttatgtgtttctgttcaatattaaattagtttttgaaatacatttatttatttatttattctgtaaaagagagaaagaaagaaaatgagacatccaaggaaaatgattttgcttcaggagagggggagaatcgatttgagaggaccagggaaacgattttgcttctgaagagggggaaaatcagtttaatttctatggaacccgaaactagtggttggccaaacaaattcgtacctagacgtttcttcgtaaagattctttgaggtacgtccctaccacaccattagatcagttaacttctataaagaattcatgattattgaaagatcattcttggcacttagtttgagctattgtgactattgtggtatacttttcattgtatgttccatgatattcaatgaagtccatgatatagcttcctccccaaaaaagaaccactagatacagttaaataattaatcatagctacaatatatatatatatatatttaattctctctctctctgagttggttactgttgttttatatccatatactgatatgtgttatgaaaatttgtttgtttgagtcgatttccaaagtgaaaattcagaggattttagtaaataacaggttttatgagtttgaaagttttaagtatttgtattcttaagtttctattgtttttttggcctctaaaacagcaggaatctaaccctttgtatctagttaaacacattagctttgttagaaaacagaaacaataaaaaaaacataggtaaatatagtgtgaaaaggcttgatagcagctatagttaagcttgagagttctttagcataaaatattatttatgtgatatttgcactttagtaacattcagtaacaacctttcttgcactttatgtaatatttgcattttatttataaatttgggaggaggtcaagtttggcctttgtctctttttcaaggaaaaagaaaagtaacaacctttccaagttgtaagcttgtataagaataagatgggtgtttttcctgctgcatcaagtcccaccattaaaattctcatttttttatttgcacaagccgagaaatcatcaaactcatctttcttgtcaagtaaaaaaaaaataaaaaacccatctttgaaattggttcaacaaaaggcacagattgaaacaagaccaaatcttctatataagaatgatgaagataaataaatggtaagcctttcgaccttgttatttgaccgaggaagcaatgtagtagagtcttactcttctttttttcctttctttctaatgtgtattatatgataagtttagattagaacaatgttcttttaaggcataaacatgcatgttaatagaattcttattaaaagttagaaaagaataaaagattcaaaagacaatatccttttgttctactttatgtgttcattttcatctgtaataaacttattgatatactacaaattcaataccaaaactttatgataatattacataatggtcactagaaaactcactaagaagtttggaaaaaaatacaaggagagctattagaatcactgttgtgctgtcttatttttcagaaaaggcatctttggcagactgaattgaactgcagcagcagcacaagatacaaggtatccttcattagttctcggttttcacttttcacaaatgcctgttatagaactcacgacctttttattttctttgttcgaaacatccaacacagctatggatttttaattgagaacagtttggtcttttacaggaaattgaggaacgggatatgatttctctcccaaaacacaagctgaaaggttatcctaagacaaaatggagtttggcctgctaaaaagattcgaatgctt

SEQ ID NO: 26828 - DNA, 1649 bp, Cannabis sativa
  modified_base (1468)..(1474): a, c, t, g, unknown or other
acaaaaattaaccttttaataattctctaagaaatgtaaatttctttaaaatgaaattgatgtgtaaatttttcttttgtttttcaattttaaatgtaggcaaactcaaagataggagagaagtagcagtgaagagattctatgagcacaactacaaaagagtagaacaattcatgaacgagataaaaatcctcacactcttgcgccacaaaaacttggtatccctctatggctgcacttcacgccgcagcagagaactcctccttgtctacgagtacatccccaatggcacagtcgccgaccatctccacggacaccatgcaaaaaccagccccttaacgtggccaattcgcctaagcattgccatagaaaccgcaactgctttggcttacctccacgcctcagacatagtccaccgcgatgtcaagaccaacaacattctcctagacaacaattttagtgtcaaagttgcggattttggcctatcaaggctttttcccaacgatgtaactcatgtttcaaccgcgccacaggggacccctggctacgttgatccagagtatcatcagtgttatcaactgacgagtaagagcgatgtttatagttttggagttgttcttgttgagctcttatcatctatgcctgctgttgatataacaagacatagagatgagatcaatctctctaacttagctatatgcaagattcaaaaaagggcttataatgagttgattgatgaacaacttgggtttggttcaaatattgaagttagaaatatgactattagtgttgcagagttggcttttgagtgtttacaacaagataaggaaatgaggcctacaatggatgaggttttggagagacttaagagaattgaaattgagaattatgaggttgttggtggaaatagttcttctgagttgatcaatatgagtaatgttggattgtcaaagaaaatgaaacatgagcaattgccatctcccaatgctgtgattgaaaattggcctagtactagtacgcctaccactcctaatttcagtgcctaaatttagttcttttgctaaaatttgaatagaagtgtataattagtcatgtttggttgattgtgctgttgagattaatgatacaattacacctagtaatagctaccaaaccataacccatgtagagttttgataattggataaattctattttagtgtaaaagtatcattgatgcactggatagttttcccttctattgtctttttttaacagaagctttggaagtgtctcacataagtcggatgtctacagttacgagtataaaatctcatattatatagagattattggaagacaataaaagatcttataactataatatatagctaagcaacaacctgcacacactacacaaacacacactgttgcacaggtttatcaagaacaatcatcaaaaatattaaggaggcgtttggttgggagnnnnnnnaatataggaataggaatggaatggaataaaatttaaaatgcataagaaaaattgataaaaaaatcattaattttttttctcttgttacctttctttttaaaatggaatagtcattctactaaaatggtggaaagagcattccattggaataccattccaatactttaaaatgcaa

SEQ ID NO: 26829 - DNA, 3618 bp, Cannabis sativa
  modified_base (1193)..(1195): a, c, t, g, unknown or other
  modified_base (1222)..(1224): a, c, t, g, unknown or other
  modified_base (1398)..(1410): a, c, t, g, unknown or other
  modified_base (1440)..(1452): a, c, t, g, unknown or other
  modified_base (1500)..(1514): a, c, t, g, unknown or other
  modified_base (2239)..(2243): a, c, t, g, unknown or other
  modified_base (2798)..(2803): a, c, t, g, unknown or other
  modified_base (3241)..(3241): a, c, t, g, unknown or other
cactctttccctacacgacgctcttccgatctataataagactccttaactatatatttttcatatatacttgtagtgatatgagactattgtgaatattaaacttaaaaaacatatattttactataatttattcaaaattagtattatttattttatatgtcagtgattgataaacgaaatcttcctcaattagtgaatggatgattgatattatttatttacacatattttttgtacttttttaatgtttgtcaattatttcaaagaaaatattcttaaagtattttaacaaataagaaaatatattttttatatttttattttaaattattaatttctgttgaaaatatatagtattattacgtgtataaaataattaaaagctataattattaataaaaatacatatttttataattttttttattttattctattaattttagttaaatatacataatactattacctatataaaaaaattaaaaattaaaatgatttattttattatttttaaaatataattacttttcataataattacttttaataacaaaatcttataggaattatctcgtgcattattgttactacagtccaaatcctacacactattgtaaaagctatcagcctatgtatttatgtaaatcaatatctaatttctatatatttatataaagaaaaaattttaaaaaataaggtatcatcctacaatattttaatctattttaagaaaattttagtaaatttagttcatttagctcattttatatatttgtagatgttgagatatatgattcagtaagttttttttttttttttttattatttgtaagaatttcacatggattaaaacctacattattagtatacttctatactataaataagagtattcttacattccttttgatttgtcgaaaaaaatatgggtgattgatgacatgatcctgctcaattaattataggttatgagttggtgtagatataaggattttaatatacacccttatcatctaacatataggtcactttcagagatctttcttgactgtctcctaatgttccttgtttgattacatcttagatggctcccactaaaaagtaggagtctggttaagttcgtacaaagaagtacattaacctcttactattggttctcagagacatcttgttgtgacatattatcnnngtctgaaactataagttccttctagannnagtcatcaacatagcattctagtagtaacattaatgtaaaatacttgcttaagattaggtaatcattagagataccataaaatatttcatgaggactagggattttgcgtaagtcactcgaatagacgttgcaaaattctcctatcttgtcctcaaaattctgataagttattnnnnnnnnnnnnnatggttagatttactttctcagatgaattnnnnnnnnnnnnntagatttactttctcagatgaattttaaagttcctatcatgatcatannnnnnnnnnnnnnnactagtgtcatccaaataaagatgggcttggaattttaaaattttcccactcaaataaggtactgtgatactatgtccaagaacttcattggtatcaatttctattactatagtaataagttaattggaacaattatacgataaggaataagttctaataatttgcaaatttgttcattatattacatccatgtctaatcaaaatatgtgtgtcatagagtttggtgtattgagcatagtctagaattcaaaatgaactacttatgtcaatagcttcttccacccctaagtgttatagagatcttgtggagttatgaagatagtccagagttcaaaatatataaaagatcattgaactgcatatatcacttcttaacttcttccacccctatcagatcaaaagatctttttatgaaaaaaaatcttaataattgcttaagaaataacaattattcataaacattgaatttaaattctaagtatttatgtggtattatctctttgcagagaataatatatcatagattttgtatcaataataaaatacaaacacatacgaaaacatgataaagataaaatataattggtattggcatgcataagttaaagtaaaatgaagctcaagtcataaatgcaattcataacaaaataacttaaagagaattttttttttaataatctcaaaattgtcataatgaattgtttgcaataatatgaaatagggnnnnnaatcccaaactaataattgaaactaaattgttcataaaccgaaacaattaaatcaaaaattttaaaaaatgagctttatcttcacttagacaatctccacccttctgtccaaccatccgactcaactcgacaggataacaatccaagtttaagcagttggagctgaaataagaagaaaacaaatatggttagtagatccagaattagtaacccaaggggataataattctctaaaacacatgagtttatagcatatttagaaataccttgtttttttgccaaaaacttaggacactggggtttccagtggcccttttcgttgcagtagaagcactttcctttttgctttgaattgggattagcagcctttttcttattagatgtgttagcagctttaagagacttcttgctattcttccacttcttcttgtggcttttgaaatagaggcaatgtttgcctcaaccttagtcgtaccattagtcgtgcaatgtttgcctcagccttagccgtacaattagcagtgcccgatctaggagttttagttcctcctttcnnnnnncctccaatcaaattttcaaatgtccgaagattgttgattaactcgtggaagtcaaaatttaacttggtcatgacataattttatgtaaagggtagaaaagctggagtcaaactattcaagatcaaactcatttgacttgtctgatctataatagatccatgattctcaacctcctggaagtaactagtcatttagagcaggtgatcacatacgttctgatgaggtttcatccgtgcattgatgcaattcttggccacctcaaaacgagcttgatttgacaccatcccaaacagttcagttaactggttcatgatatctgcagtggtgagagtattggaaaaccttgttttcaaggtgtcgaccatgctagacagcataaagtatcgagctttattgttagtattttgccaacactcgaacttttccttgactgccttngtcgcattctcacctggctgctcaggacttttcagtcaacacaaataggacattttcaccaatgagagcaatattaatgttctctctcaatttgacaaagttagctccagagacattgttgtcagtcaacagtgacaccatggggttgttcatagtcatattggatactacaaatatcaataatataaatcaagtaaggtttaatacaaaatcatacacattcagaaattattggcacttagcaaggaggaatgacaagtgaaaatacaaaaccatgcaatcataaataatttctaaggtttccaactaactgatagcagtgtcccatttaggcgagagttaaagatatcatccattgaatagagtagtcagctcat

SEQ ID NO: 26830 - DNA, 3084 bp, Cannabis sativa
aacacaatatgagcagtggatggagaaagcaagtatccataggcaaagagggtatgcatcatccttaacagagtcgggcctcataacttttcacattattgtcaaaacataaaagtgcatcgatccctttataagggattacaccaaaaaattacttactattaagtgaaaaataattaaagtctcaaatttggtgaaatgatatatattattaataatataaaaagagaagtagattaatgaatattaatgcttaaataataataaaaagtaatgaattaaatttggtgatgagtgggagtagccatgaccattgagctaagagggctagggccaagcttgttcctcttcatgagatttcctcttctaatgagttccatttggttccttcgcctaagtttcatcatagaagcctcttcatccaccacaaatcttctcatcaaaacatcttcacttaatgatttccctctaaatatcactcttctagaaccttccatgctatgcctcccacttgtactagaaaccctaatttgatgatcttgattattattgatatgcttaataatatgatgattagatgatgatgatgatgatgatcttggataactattgctccttctaggaggaatgttgttgttgttgttgttgttcatctcaactcttctaaacacttcattgtaggatgatatgggtgcacaaaggcataccctagtcaatgaagtggccactttaagggaactacatttccttagcttattattattggtagtagtagtattattttgtctatcagaatttgatgtcgttgtagtaccaccacttgacaattctgttgtcgttttggatattgtcttccatagtgttagtgtattagtagtgtcgtttgtggttgtggacttgtaattggaaattgttctccatagactccccacctccattgctttctgataccaaggcttcgtcctgtgtgtgtttctacattcattaatatacatttctattcaatatatgtgtcttatgttaccagtaataaataataacgatatgtggtcacataaatcacacacaaattaatttgacacacgtaagttactttaactaagtattgttatttagagtaatgctaaaaggtatcattagcagggtcggtcttgagttgaaataaatctaaaaaaaaattttgacctcttactataaaaataaatagtatttttataaattattaaaaaatatgcatatttttcaaaggaatttttttttttatttgagtccctcaaatgggtgggccctaggcacggtcctagccgccttagcctaaggtcgggcctgatcactggtacctaacaccctttttgatatcatatcgctattagtataattaagtatcaagtcttatataacttaatacaataactttatatgggaagtagcataactttatcatgtaaaaaagctcttattaatagaaacacccattttataaattttcaaaaaaaaattaaatagtataaaatactgaaattagagttggatttaaaaagaaacaattgaagcactagttatttttacataattgttcaacaaattagtaataacttgtacataaggtgattctaattgacctagcaaaccaaagcttgaccttttcactaattaataatttaaaactagaataacagatttgacaaattcaaccaaagtacataatataaaatataaataatgaatgaaacgcggagaacagaaatacaaacaacacgtattaaattctaagaataaattccaaatttctatgataatgatataatatcatatctgatgatggattcaatcaaatataaaataaaaatgtccctagctattttaaagactattctaaacgtcttcaaattttgattataataaattatggcttaatgttatgtccctattttaaatttgacacgaaaatgatagctgccttatgttctctagagactagttactcagatccaaatgtagttgtattatagtaatttaatcaacaaatttttattaatgactcaagggtggtgtaagtaattatattaataattttttattgactttaaggtataatttcaaattacaaagtagcaaataaatattattaaaaatataaatattaaatctgtacttcaataaaataccttacgtcactaataaggtatttagtaggagatttgagttactgagaaaaactaagttatgtttagtatagttttagcggtgagtttataattaagttggttttaattttaagtttattttaggataatctcaaactcggtttaaaatttcttaaatctcacctctctactaccacctagtcaaactcttacaccaaacacccctatcaatctttaccagtattttatttaaagaaatttataaaaatattagaattttggttaatttttataaaaatactgtcacttagaaaaatttctaaaaatactgtatttttataaaatactagtagaacacaaaacagaacaactcaaaacacagtaaaacaactaaaaaacactagtagaacaccaataaaaacttaacacaatatactgcagtatgaaacttataaaaaaaacacagtaaaaaagtaaaaaaataccgccgcgcaatattttttgtaaaataacaaaagttaggatactatgtaaattttcctttatttatttgacaaagaatatgggcctctacgtatccagtccaataatagataaatgtagtgaagctcatatcttaggccttctaattttgggcttaaaacaaaaactatattatccagggataattaagtaaagatttgtaaaaatttcacatgttgcatttttacggtacaaaaataataaaaataatctaaaaaaaaaaagagatttttttaagaatatactaaattaagtaactttttacaaaaatgacgttttttttaaaatgaaaacaaaataacgtgacacgtacaaagtgtgtgttttaaaaaattgggccgaaaaaaccgggattacaagcccaatatacaaatcgttaaaaatagaaaattaccataaaaacgtcaactacata

SEQ ID NO: 26831 - DNA, 5871 bp, Cannabis sativa
  modified_base (2418)..(2433): a, c, t, g, unknown or other
  modified_base (3548)..(3564): a, c, t, g, unknown or other
  modified_base (3681)..(3687): a, c, t, g, unknown or other
  modified_base (4199)..(4205): a, c, t, g, unknown or other
aaataatatatataaatatatcaatatgtataaaattatttaaataaattagataacaaatgtcatacctattttagtaattatatatttaacaactatttaatcgtttagcttaccaaacatttatatacaactttttcaactcacagctgttttaaaattatatttaccaaacattcagtagctttttctcacagcacagctacagctgttttttctcacagcacagctatagttactttttcccacagtacaactgtgccaaactggcccttagtaactcatttaccaaatataaaaataaaaatttatacataattaatacttcacatttaaacatatcttattttttaagatgaagtataattagaatgtttaataattgtctaattactttcaaatattttacaccctgtcctaagactgtctctaatgagagatataaaaattatattatatttgacacaacaaaaagtatttttgtagtatatttacattaatttttaacattatactttgatacacaattacaaaatttgatgcaaaatttaatatttttattaaaagtaaatagaaataataaattatcattaatttattatataaaacaataaaaatgaaatgtctaagggtttataatttaatgtaataattaaatttaataataaaatattaaaaataacaaataaatataaaagtaatatatatttattgtgatacaaattttgtatcttgccatataatttaaatttgaatcaatttttattatatgacaaatgtcaatcaacatttaacatactattaaatcaaactttttataataagagctatagtttaacaataaatccccagtttcatttaaacttctactttttattggacttctacttttgatttaaacttcttagctcttcttcataaagctattataaagtggctttgagctttatagaactgaaattcattccaatctaacaaataattaaagtgctttaggatttgaaagtccaaaaattacttcggaaataagacctactcacccataattaattttagtttgctagaaagcttaattatttttttttcttttaatttagttatagtaatataaattacataaatcttctcaaaaaaacaataatacataagactatatatgcaaaagataaatgagaaaactttaaacagcatttaaggtatccaacactctatatcattattggtgtaaataaagtcaaaaaatgtataatacactcctttaaaaaattcttttggcacaccttctatttgttttgacatgcatgaaagctttttaatatatttttttttttataatcacaaacattgtaatttttttggactattagtaaatttttaaaaatttcaaataatttacaatatcgaaaataaatttcaaacaaccacgtacttattacatataaaaaaaaaatcataggacaacaaaatattttaccttatttatggtaccataaattatttgtaattttctaaaaattaacagatgctctcaaataaatatttactatagaattatctaataattaacttcctacatatttatctatatttatatttaaaatgtgctcaacccctttttccaaaaaaaaaaaaaaagaaagaaaaaagaaaaaatatatgctcacccacaacaccagcatagtaacctatatcctcgtccttttttgcaacaccgaaatcctttatctgaaaacatcaatttgaaattgaaacacatattttgatgtcaacagcaattaattatatgaaatattgatacaataaatataatactcaccatgaaatacaggaaagggaacatagatgatattggcaatgctgcaaaagtgtaaccacaaaacaccctatcattattgctgaattttattattattattattattattattattaatgttcttttaatatttattaaaaatatagaaataataataatttttttctttatattttattgatgatagataaagttaataacaaaataataaagtaattttaatatttaattttaatgtgatatctaaataataaaataatgaaaaccgtataaaagtaaactaaaagagtagcatttaaattatggtgatacttaatatgcatcatgctacatgttatatgttaaatttgacacaatttttgataaaatattttttaaaataaattatattttaataatatatcactaatttagaatttcattggatatgttacaacagcatctccaatagaaggtgtaaatattatattatatttacgacaaacatttgatgcatgaattatgatgctccaatgcaaaatagtaaaatttaattaaaaaaataatttttcattaatatacattcaataatcattattaataatgataataataataataannnnnnnnnnnnnnnnaataataataataatttttctttatattttattaatgatagttaaatataatattaaaataataaaataaaaattttagtatttaatgtgaactaaaattaattatttgaaaggtataaaagtaaattaaaaagaatagatgtaaaatatgcattctatatttttaatattatattatttttggtatgtgctaaatttaataatatttttggcacattattatagcatatacttttctaaagtgggctatatttaaaatttttaaaaaatatatatattaacaatgaatcactaacttaccactatattaaagatgcataatgtaaaaaaaaaaaaaaagaagaagctaaatttgggggaaaaaaagtaaatgttatatttagcatactttacaattgtattttaatacacaataacaaattaagatgtgattcgacacaaaaaaaataattattattaatgttaattaatcaattaaatatatatattttaagaaataggatcatttgtaattataaaaaaagtgtattaaaggttttttttttaatataaaatcacaccacatagtatttatttactaaaattatgtaatgatgttaagactttgatgtaatacaaacaccacaaattacttacttatgagcaatgtaagataaatacacacacatttttttttttttttgataaagtcacaccaaacatagtgtattaagtcactccttagtactaaataataatattgtaagaagttgagatgtaaaataaccttaaatttagaaattatgttagtaaatgtctattttttaaaaaaaaaaattagtaaaatgatcaaatataataaattaactaataaaaattataaaaatacatttactacatattaattttttaaaatatatattataataattaaattaaattatataatttttttagtattttataataatatattgtaacaaaaataaataaatgtattaaatcattaaatatatacaacagtatttgatatatcgtatcatataccataataataaaattatataatataaaaaattgtaacaatactaaattaatactcaaaaattatatatattatgctaacaaaattatannnnnnnnnnnnnnnnnatgtatacataccaaaaaatttatatataatccttacatataataaaatagaaactaaatattatcttaaataaatgatatactacacaacaaaaactatatatcatacaacaaaannnnnnnacctacaataaaaaataaaataatataatagtattataaaaaaaattatactatattaacaaaattatatacaactataaaataattataccatacttacaaaattatattttacatttatatataataaaataataataaacatgcatgatctaaaataaaataatatactgtacaataaatcgtatatatcatataacaaaaaatatataccttacaataaaaacatatatataataacaacaaataaaaataaaaatatgtagcgtgctaataaaattatatgtcacatcaacaaaagtaccataaaaaatagaacttaaatatttttttaaaaaataacataccgtataataaaaaaatacatatatcattcaccaaaacatatatactaacaataataataaaataaaatatatattgctaatatatattataatattaaattatatattacatatatattatggtatataataaaatagaaattaattaaatattatttaaaatannnnnnntatcatacaattaaaatatataaatataataattaaataattaaatatatatatagcatgccaataaaattatattcatacattaaaatattaaaatatttgtattatgttaacaaaattatataccaatattatacttaaaaaataaaaaaattaatattatctaaaaataatattataaagtaaaataaaaatttattgcacaacaaaaattatataccaacaacccataaaaaataaaaaataaataacataaatttaaaataaaaaagttttcaacaaaactaatataaatataccataattttaagtaatttgcttctaattctaaaaaaatatggaaaagaaaattattgattttttttatatgataaaagataatataaataataaataatgtaaaatagttatttttctacaaattttaaaatgaagatatttatttatatagtattataatttgggctatttgctataattttcctattgtaaataaagaaagctcatcaattgcgtgctcatttgatacaatgcaatattttttgtcaaattttgtttaatatattaaatttaacacaagttttaacatactattagagaaatatttttttacaaaaatatcaaaatataccgttgtaccacttaattggcactttattaatagaaagtatgattcaaacagtttaaatagtctatttcacatgcgtacaaaataaaagagataagcgtgtaataaattatttaaatattatttttggcaaattaaattattttaaaatttttaaaaatttgtaagacatcaataattacatcatacattgtcatataaaaaaaataagatcaaaattattggaatgtcgaaaacacgaggtggtacatcaatggggtagtagtagaattttttagaagtgttcacggtgcgggcggtgtgaactttagctattttttcagaccaaactgcacatgtagtttttacaatttttcaaacagcaactgcatcacaagactttaaaactgcaaaaactacactgcaaaatacggtgcgattcaagcggtttacactatcgtcattatcaaatattataataaaaatataaaaattaatttaataaaatttcaacaatatgaaaaaaaattattaaacttttaatgtcacaatatatacactaatcaagtcactgtatttaaaataagaaatgagaataatttatatgaatgtttcttacatttaaatattgtatgacacgagctttgtaatgctataaattgttcgaaataaaaaacacattataaaaattagtataatatataatgtggtacggtttgaaccgcaattattaaaattaaaactataaatcataccatactacgcgatttggcaaaaatataaactgtaaccgtactataaaaaatttaaattatattttttatgaaaaaatttccaaaacttatatatgataaaagaaaaaataagtaaatttatatatattaagttgtaataatatccttttcaaaaaaaaaattgcaataatattcattattaaaaaattaaatttatatatcttattagatgttataatgtgaggaaaaaattaataaatttaaagatgtttaaccaaataaagtattaaaatgaagttaaattataagatccaagtgatctcaa

SEQ ID NO: 26832 - DNA, 4459 bp, Cannabis sativa
  modified_base (31)..(33): a, c, t, g, unknown or other
atataatactgacttgtatctaggtgcccannnacctatttacaaggcttaacaaataagtaagaacgttctttactagggtacaaccattgtaccgcatacactacgtatcgacattgtacgagtgttggtagggtttgtttcgtaccctaagtacaactaagtgatataccacacacacattgtactttcacgtacttgtgcttgtaacactgtaatatactcttaaacatcatatactataccattgcactatgtatcacttccgtacaagtgttggtagtgtattaagcaatacaagcatacatatatatttcacacatacatacattcacatatacatatattatatatattttatgcagttcttacctcgtttccgaatttaagtgagttggccgacctgaacggagaatttcacgctggatagataccctaatcacatgatataatcgggtaaataacatgcccaaaaccctaatctaggaaacccgaccttcaactaaaggttctgccacagataattgaaactacaataccctaagaaagagggaatcacccaaccaaggctctgaaatggacaagaatcgacgaaatggattgctcgggaaacctgttccaaaactggttaaccggttttacaggacctggcatcccagttaatcggtttgcaccaggtttccccaaacaatctaaaacctgctcaaaccgtgtccaaacttcaccaaaacttccagttgacctatattgacctcccacaacatattccaagcaacaaaattcagaaatttacacagaactaaaacatgcaatggatgaaccaagattgagttttcaaactcaaacgtgtgcatccaccacaccaaactcctaaatcagcagcaagaactcaaattaaactcaaattgaacatataaaaatgaacctcaactcatacagaccctaacagcccctatacttcaaaattgcatattcaagctaaatttcaagcttaaagaaactaaagaattatggtgctaggcttacctccacttggaaacacttagattcctgctgaattcagaagaaaaaaggtgaagattgctggttcctcttggtcttatggtggtcgagcaaaggaaatgatgaaagagaggtttttccttaatttttctttattttttctttattcctcaaatgaataaattaaattgattaatctcaattattttggctgaaaacaaacaaaatgaccagctgccactgtcccatgcagccaccaaaatctccatttaaaattactaaaatacccttttagtttaaaactaaacaatttaaagtctggggtaagagggtcaaaaaccataaccccactcgatcgcggtattctatgtatctctaatatttattccactaagaaaagattctagacttactcatgtgactcaaatggccatccatcgcatttttcgtcgtcaccgagcaattataaaatagcataatttatgtataacacaaataatacttctagagtttaataaaatctctggaattgagaaattataactctagagcccacttttaataatgagacccacaattaaataaattcatgaataattataaaaaaaaatattaataattcacgctaattgcccttactaatctatattctaaaacgcggtcattacatcaccactaaccttacgacagctagaggtaaattgtgggacgattgacagggtcgtccagtgagaaatatcaatgcgttcaatgaaagagttcaagtgtttgtacagaaagaggaacgaggaatgagatgaaattgttaaagactggcttaggaagcaaacccagcacaagtaccaccacaacaagtaccatctcaacaaagactgataaaccaagtggctcgaacactaagagaaaagatgactcaagagaatcatctaaaaataagaagaaaaaaaatagaagaagcacgataagtatgtaccaatttactctatttataccgagctaaatgaaacttgagaaaacatctttctcgcaaatgagtataaagttgcattttgcaagcctgagccaatgagacatgcgagacacaaaagagattcaacaaaattttgttgatttcataagaacatatggcatacattggaagaatgctgacagttgaaagacgagatagagagccttatctcacgaggttatttttggcaatatgtaagacgtcaaggcaatgaacaaaaccacccaaatctgcccaataacccagacaaccaaaggttacaacctcctcctgtggaaggaaatgatatactagttatctcgagagggtcgcatctcgctagagagagtagtaatgcccagaagagatatgacaatgaaattaagaacgaaaaattagtgtttgctccagaaccatcaaagaaagtcaaaactgaagaacctccaattgtattctcggcagaagatgcaaagcacgtgaggtatccacacgtcgatcctctcgttatcacaattcaacttgccaacaaaagaataaaaaaagtgttggtggataatggaagctcagtgaatatcctttacaaggatacgctgaggaaaatggggttgcaaaatgcaaaattaaaaccttgcatggtgaacttgtgtggatttactggagatagtgtcgcgagtcaaggcattattgaactcctattaaccataggcgagccaccattatctacaacgttgatgaaagattttttggttgttgacctaccatcattttataacatactgatgggtcgcccgacattaattggactaggggcagttagttcaattaaacacctatctttaaaatttcaaacaccagcaggagtaggtgtagtgcgaggtgaccaactattggcttgcgaatgctatcgtatagaactttagaatagaagaaccaactatcagttaatgtggtcataacagaagaaagcgagaagcgagaaaaggatatggatccttgaattcaagataagaaaaactagttaaaaccaattaaagaactggaagaagttgttttagatccaaacaatcccactagatgtgtatttattgggaaaaatttggataaaaaactaaaatagcagttaacaaattttatgaaggcaaaccatgataaatttgcctggagccattcagacatgatagggattgaccctaaataatcacccatcacttgaatatcgaccccaattacccagccaaaagacaaaaaagacgacccctagattcagagagacaatgggcacttaaagaagaagtagacaagttattaaacaaagattttatccgcgaggcattttatccttggtggatttcaaatcccgttcatgtcccgaaactaaacgacacttggagaacttgtattgattttcatatttgaataaggcatacccaaaagattactttccactacccaagatcgaccagttagtggatgcaacggcaggacacgagttgatgacattcatggatgcatattttggatataaccagatcaaaatgcatgtccctgatcaagaacatacaagttttgtaaccaacatgggactttattgttataaattcataccgtttggtttgaagaatgctggggcaacatatcaacgactagtaaatggaatgttcgaaaagaaaattggaagaaacatgaaagtctatgtcgatgatatgttggtaaagtcggtataatgtgaagaccatagtcgccatacaaaggacctcgcagaatgtttcgaaattctaaaaaagtacaatatgaagctcaacccgaagaagtgttctttttgagtctccttaggaaaatttttgggcttcatagttaatgcaaggggaattgaagcaaatcctaaaaaaattaaggctttaatagagatgccatttcccataaagtcgaaggaagtccaagccttaacaggaagaatggtagcactaaatagattcatctcgaaatcaactgataaatgcctaccattcttcaatgtattgcgaggcaacaagaagttcgaatggacagatgagtgcgaggaagcctttagaggcataaagaaacatttatcgacacctccaattttggctaaaccaataacttaagagactttatacctctacttggctgtcttggaaagttcaatcaacgtagctttggtgcgagaagagggaaaactacggccttatttacaagcacatcccataaaagtgttaaccgatcaaccattaacccaagttttgtcaaagttagatgcttctggaaggtagataaaatggtcaatcgaactagggcaattcgatataacctatgacctgagaacatctatcaagggccaggctttggctgatttcttaatagaagggatagtttcaaatgaaactccacctgttgttggaatttattttaccaagaccttagatctgctcacaagtatgttgtttaaca

SEQ ID NO: 26833 - DNA, 8932 bp, Cannabis sativa
tgccattactgcgatgtgtgctacctatagaagctaatgaaattataaaagagattcaggaaggcttttgcaaagaccatgcaggatggcagagtttatctaagaaaataattcgccagggttattattggtcgaccatcaacaaggacacacataaatttgttaaaaggtgtgacaagtgccaacagttctcgcatatactaagaatacctcctaccgaactaagaatgatgacctcgccatacctatttgcaatatggggaataaacctgattggatccttacaaccaaggcaaagtggtgcaaaatacgttatagtcgcagttgatttctttacaaagtggacagaattcaaacatttggtgtccatcacatgcaaaaaaaattcttgattttgtaattaagaacattattcactgagttctgtgaaaggaataaaattattaaaagtttcccatatgtatcaagaccacaggcttatggaaaagtcgaggctgtcaataaaaccttaaaggaaactataagaaaaaaagttagactcagctaaaggaagatgggttactaccacaagtgctctgggcccatagaacaacaaaaaaataacaactaaacatacttcattttcactagtatttggctcaaaagcaatgttgacagtagaagtgaacattgcaacgtacagtgtgagttctacgatcaagaacaaaaccaagaacttctcaattttttcttcgatcgacttgatgaaaaatacaatgagtcgcaagtcacaaatgtttcttatcaacatcgcatcacaaaatattttaacaaaagagtttaaaaagactattcaaagtatgtgatttggtattaagatgcgtgtttgctaatacacaagatctagcagtaggagtatttaacccgaattaggaaggcccttacatcattgaagttgtcgttagaacgggagtttataaattggtgtggctcaatatctcgctactaaaaaactattggaatagtaaacatttaaggtcatattactagtagcatattctgttgtattatgtttgtctttgtaaaaacgttttttattttaataaagttgtacatttcaagtagtcataaagtcttagtttctttaaaattacttagagagcatataatatacaataactacgttttacctagaggtatatattaataaaaaaaattgcaaaaagaaaggtgtttgattataagctggtcagtaacagcataaagtcgaataatttgaaatctttcttaaagtagaaatggaaatagtagttgtaagcgagacctttaagtcttgtaaacaacatcaagctaagtacaatctgaataaataacagcttgcataacatagcatgtactataaatgagataccctagtgtgtcttgataaatagtacacaagttaaagtgtgaatagaagattaactgttcacacgaacaatcaaggaatgtttaaagaagttttaaatactattcaaaatatttaaagtttgctcttaaaaattattttagttgtatactaactactcgagcataattggtatagcaaaatactaactgctcgcgcataactggcgtagcataataaaaactactcatatataggcgatcaaaaagtgttcaaaaatattcaattgtgtaaggacatttaagttcatcatttaccctaagtcaagttgagaaaagtgttttgttgtgaaaataaaatttacttgtgagcaaaaaatacaacactcaaaacattcataagtcaaacaaagcggggtaaaatggcataaaaaatgtaattaaaaaagtgttgaccatccaatagtgaaaattaaaaattaaattacataataaatgctacaaaggacaaaatattgtctcgtccaaatggctattgttcaaaagttataaagaaaaaactaagtctacattgttagagacttaaagagatcttcttcttcttcttctcttgcttcgacctcagcttcctcagcgtcgccaacttcatccttctaggtctgctcaaaataagccagcatcgcatcggcatattacctaaaaagctcaaattcattttaggattcgctatcaaggccttgtagatagaatgattggccatcaagttggctctctctttagcatctaatttggcttctttaagcttcttgttggtctcttcaaggttcttctaggccagttggttagcctcgcaaagttcctcatttttagttttaaggcttcagttttttttttcagagctttctcagatttctccagatttttgacatttgtcttttgtcaagagaattctgattgggcatcgttccattgtttagccaagagctcgcgttgaccgttggacttgcgaagctctgtgctaagttgactgatgctctgaaaacctctttgtagagtcatgaaggatagaaaggaagcctgcatagcatgaggacagaagaggagatcaaaatatataacaaaaaataataatatgttagaagtttgaactaaccgactgcatgaggtcaacactcctcattataaggctttgataatttcctttgttcataagatcccattcctcgttctgaaaggtcttgaagtggcgccaactttgtgtagcatactacgagcatgcttgagaactctcgacacgtgcatatgttggtagggggcaagaaggctctaagatggtcatctcgggttgagtgccagagaatttgagctgatggatagaccctgagggttgcccaccaatgctcgcagacactagcacagaagaagtgactagagcacttgttctagaatttatgggtatgtcaatcgagttagccttcttgttagccgccttcttcattttctttggaacctttgggtttgactcaaaagttactttcaaaggagcagtcctctttttgcgtcacttgaatgacagtgagggcatgaaattttaaaaaggggagtggttgagatttttttgagttctaaaagcttcgtgaacgataattgcgaaagtgaaggaattttttaaatttatatccaaaaggcaataatcattcgatcacggtaaggatacatcgaatgggtgggaactaatggaaagagaacggttagaacattaatgctaaaatgatttggctcgaaattttgaactgccaaaataaaagcatgtaatttttaaacgaggaaaatacgattgtacccttaaggcaattaaaaagtcctttttattttaaaaaaataccttttaggggcaatattttgttatactcatattttgaacagtaatttgaaactgacacgtgtaacaaagctggaatatgaaccagctcaaattatgcatcaataaatgcattcagatgactcgcctcaagaaatgcagttaatagaaatactcgaactccccatcacataggcaatggcgagacacaaataataactactgactgataagaccacgagtgaacaaatccatctcgggataaacaaaatacattataaaattatttggaatatgtagataatgagttttgcaactgattgacccacatactcgtgagtatgttaaaaggaaaaagacgacttcaacattattcaccttgctattgacgcgttgaagtaaatatctcgcatatacttcaatcaacattaacaaaaaagagtgagatatactataactatacacttagacattattctacagagaggtttaagaaaaatattgattgaatgacgagatcaacaaagcacaatcaacataaccgtttataaataaagataaagagcagttatacggttgtatataattatctcatgttcataaatatgaaacgtgaaaaatattcacgtttcatgaacggttgaaaatgatcagaccctaagagaataactgtcatcttaaactcctataaatagggacaaaactcgaggcacaaaggacagccaacctttagaaaaatagagaacattgtatttatagtccatttttgaaaaacagttaattgtgttctgtatataatcttctaaccctgaataagatgaattcataggactatatatatgaaaatttaacttcaaaactacgctaaagaacccttttgttatttattgttattcttattattattatataattaattctaaaacaaaaaaagtttattatttaattaataaaaatttactttaacagaacttgattttaattgtatcaaaactcaaatcattagacaaaataacaaaactcgatctacacaagttttcatcgcccaacttgatcaaactttattaaaaggttctgagcacgacaattttataaaaaaaaaagttactaatttaattaaattacttgctgcatttttccacaaacacaagattttctcactattgaatacaaataaataactcattccaatagaagaggaagaagaatataaataaaaattaatttttggtttgtcgctccaaatttattttgtttttagtaaatgtaacatgtatacttgagttgtttaatctaatacagattaagaactcaaaaaaaaaaaaagaactcaaattcaacgttaaaatttgagtagatcttctaatgaatatgactagtattatctaaatcaaatttaacataggtactagcaggatctacttaataaaattggttttctctatgaatgaattaaaaacaaaacctttattcaacctttccttgtggccaatactgcatataaactatcaattacgttctagaagaaattattcaaagtttgagactcaattttccaagcaacttcaatttttcaaggtagaatcacatacacaggaataatgagtaatgatagatctttttgactaccctgaccaaagctacaccacattatcaacacggcagaaaagccaaccaatcgaaagccattttagcctacacatttttttcaataatcaaagattgaattattttgttgcattggaaaaattactcatcatcatttaatacagtcacattatttttaactactctagtttctttgtagctccgcaaatatttctgagcctcgttaactagaaagatactctcattggactttatttgttgaaactaggaattttcaactctatagaaaaagaaaattcaacaaagggacaaggaataaaccacaaaaaatcagcataattcaaaataagtatattttacggtgatgcttttaagctgaataacttgcaaactttttcctttttttcatcacaaaatatttctaataaaacttgacgaagacaagtgtaagaaaaatagcaagaatgagacatttacttgctccttcccatcaaagacggcaattgacttaaggccctatattaaaacatattgtccaataaacgacataaactaagtccctcttccatatatactccattgctcacacaccataatatcacaaacaaactataacctttctcaacaaagcatgcttattcaccaacaaaaattccatgaagctcacctttgttcttctgttctaaccttgaagatgcacgccagaccaagcagcaccagtgagcaagaattcgcattctggggtgatgagcatcctgatcattttagcagtggtggcagagaaccagagtttcaaggtaacgccaattctgaagaagaagaagaagaagaaggctttagagtttactcacctccattatggaagactaaccgttctagtagtaaaaaagaatctttacctttgcttccacataaccatcattacagtaatctctcttcaaattcaaggagacaagcaataatagatggtagaaaagagcttatggagatggttcaacacttacctgaatcttgctacgagctctccctgaaagatattgttgcagaggaacatagtttgcaggagggtgaagaagattcaagtactgttgccaaagatgagacttttgatgaattcaaggccaaagcaccacttataaagctgaatagaaagaaagacattaaaaaaggtcagataacaaggacagtaagtttggaaagtgaaacttttcttataaagtcattccttccttcatctctaggcttaaagaagaaagcaaaaagcgcgagagatccttcgatcaagtcatccgaggaaactgagagcgatatatataaagtggggtcaataaagagaatttttgttgcagggagaaggaataagatttgcagaaatagtactaatgggagcactagtagtagccacagtagcagcagcagtagcaccagcaccagcaccagcatcaccaggtatttggtttacaatttctgtggttaatcaaacataacatggtacaaatgctaattaaatcattttgagtgagaattagagaatatttggaagatatggagttgctagtccacaaaccagttatcacaaatagtattatttattgaaaattgttgtttaaatttagggactctgattgaactttatgagacaaatctaatggttagattctgttcttcctatatataatacagattagctagtgagatcgatttcataccgggttgctggtccttgttctctacaaggaaaagcaaaagcatgagagaaaaaggatgcacctactgaatgaggaagccctccaccaatccttccaccagatactaaccaacagtagaaacagaatatttagtttaaagaaattactgtaaccaacgtttgcatgtaaataatcaaaccatacttttttgttgatacatattgcacttgcaatgtaatagaatcaagtgaaaactaggatgattgagaacagtgaaagaaagaggattcccatgaactgttattgttattggttttttatttattttgtgtccatgttgcgaagttacaataagtgaaaagctaatatactaggaaatgaagcgtagctattacaaataataataaaataataaatcttggttcgaaaagtaaaatgaggtaccttacagcatcttcccagacaaaacctaacagaaaacaaatatcactgctgccttaacatctacaattggatttgagacagagtaagcatgactatggcaatttccagaaatcaacttatcttgaacatttttataagcgaaataaacacctctaagtatgtgagaactcaggagtaaagggtatttttgcaacatgcattacaagtaaacatgacacaagcttggtggaagggtggaagctttgaaaaaaaaaaaagaaaaaaaaagactggttcatagctcaggcataaaactgagtagtacagtagtggcacatccaaaaaaaaaactatttaggcttataaatatatcaagatgatggatcttttgatcctcttggtcccattacatatagacatgttcctttacagaaaaaatacgcctacagaatcatttcttcagaacttcagatgaaactacatctacctacaatgttttcttccataatttagtgttttttcttaagtatatttcaacttctttttcctattatattgctataacctgaaccttttgttttgtaaaaaaatagtgtcctaatgtcggatatcattgcttcttctcatcttcagtatcttcaatatcctgtagaaggacgccccggactctagccctgtccaattattgtaccattattcaggtaagaagaacttagaaaatgctgaaggataccagataataactcaccttcgatgtgcaggcacaacacgattggtaacctttgttgatactgtatctcgagctgcttgtttctctacattttaaaagtaggtgtattagcactaaaagcacacatgattcaagaaacaccaataaaaagacggtaatagacatctttatccacaaaggcaacatgagaacatcgcggaaagggaataaccctccataagaatacactgaaagattataattgttatttagacaaatttgaaagtttagacaaatttgttagttcattgcaaaatcagtttggtcatacatttaaagttaaaaaaaccttacaaacagtagtataatagtgaatacagagtgtgtttgtgataggatcatttgtaagacaatgaggatttaaaatgaaatgttgatcagtgtgctacttttggcaacccaaaaacaactcacccggagtaacagctttgtcagtggagttactcctctgtaactttggcctcttggactggtctaattgctttagaatgctttcattcttttcctgacaattgaagagaacgttttaacaatgacacttctgcaacgggctaaaataaagagagatcaacaagtacatagataatatttcacatatgatggtaaacagtaaatcttctttatgcagtctacaattaaatcctcagcaatatatttcatcaatgacatgttaccccagtcaacatatagcttctgcaatatatttccaatttttcacaggttgctaaaccctggaaaattaatttaactaatgacactgcttaagcatgtaaaaaaatagtgaaataatatatacattattgattgttgcagaaaaagcttgagaagatatccctgcaaaggtaaaaggaaactaaaaacatgatagacccaagtccaactcacctaaatcaggtacaaaaagaggtattggctggacatgaaataaattgcccagtgtggctttaatttgtcaagctaaatgatttagtcatttagagatagttgtgtggaaaagctgatttttaattttaggagagcccttatgtacatataagtagctcttagttggggaaatggttatctgattgttgtgttgagtgagaaagtaaatacattctgtggatttaccaaactggcttgagtactttgggttttctgtattcttttctatgtaggaaataactaattagaatattatgagtaattttcttacgttattttagttttttttttttt

SEQ ID NO: 26834 - DNA, 4205 bp, Cannabis sativa
tttatgcaaatttggaaaatgtatattttaaattctgctacaattaatttaaggtttcttgaattttatatgtgtttaaattctattgttttagaaatttttatttagtatgttaaataatatacatggtagtaaatctagattttggtaaaataatccccaacagtgggaactcactttagccgctttagaacccgagtcttgggaagatgtggcaactcccttcttacatatgtagttgaacattttggatgacatatctacaattaaggcaataaaaaggagaaaccatgaggaatcatattattggttgtaacgataccatcgataatgaaagtgactgttgagattttatgccctaaataattttttttttcgaaagaaagtatgaaataaaacttttttttaatataatcagatttactaattaataaaatattaaaaattattttatgttacatggttcacatgatttctttcatgataataaattataagttttatataaattctattaaattcagaacatatagttattcatgattatagagtagtcaacacagtagaatataatcatgattatatgtttcaaagtttatgtctcatgatttgtcaatacacttgatttacactgacatgataattaacgatagagcttacttacactttgaataaatattatgtcctttcagagtattgacaaaatatgctagaactacatgatagatttatttgctcacttatgctgcattaaagagatgattagttccagatcttaagaatcaaactaaatccctaaagactaggtgttaagtaccaatatcacagtgctaattaatattaatgctttttgtaagttatttaaagagaaagtgtttgagatttgatctcctccacagaatatttagttatatttattaccattaatagaatgggtagtttgcaattagtaactaaatcataataaatttattttaataaataacctttgattcaaatcaatattaatgtgaaatttctgtatacgtaatttgaagattaaattctctcattttattagaagattcttaactaatagcaactgataaattgtgtcatctgttcattcgtgttagaaatctagcactattcatacttttgatgcttcaatattagtagcttatttagcttttagttgaaagtattattagaatttttttttctttatctttgtaaacgggttagcttatttttgtgactttgctcgatcgatgagtaatttcttcaatcttatttccgattccatttacctttcaaaaaaaaaaaaaacctctcacattttattctattagttaaatcaccaaactaaagattataactaaacaaaaaaaaaaaatagacaaaaatggattacaagtagtaagcattaataataataattaaacaaattaaccaatgatcaccaactcaatatttagtgcatttccttataggttttttttttaaaaaaaaaaaaagtacatttgaatataagtaaaataataagtgtagaatatatagtagcatgcagcagaatattgtgaaaacaaaagtataagttaaaattaagctatattaaaattattaggcagtcagcctgagacacaagatacataataattaattaaataaataataaaaagtaaattaaaaatgatttaattcattcccacgacatacattccctcaaaccgcatttcggtgtagcaaagaaacaaccataaaaatccttaaatctcgacctatatatatatatatagcttagcccttatgccatttttaaggtaatatttaatgccatctcttctccgtacacccaaaaaatctttgtcggctttgctctgtcttttctaccattaagcttggcttaccctgataatactgtttttcttaattaaaaaaattaaaataaagaaaataattacttcctctttttctgtcatttcttatttatttaccaaaaaatatataataaaatcccttttggctaatctctcctcccatgctttgccatgaaaacaaacaaacaaccctaacatctccctcttgtccttatctttcatctcaaatattctctatcttcaaattttgggttttttttgttttttttaaattttattatgtatttgttgtgtttgggaatgagtttcgttttttttgttattgatttatacttcttctgtagaatgcgaaaaaatcaaggtctcgatcgacccataatgatgggtagtaaatgatcatgtggtccaaatttgttgttatatgatattttttattatacatctgaataacatatatatgaatacattcttgtgtctgaaaataataatccagaaattaatttacagttatttaattaattaatcaaggtttaactgaacgagtatacataaatatactataaattaatatgcctagtgtacacaaatatatactctgcctagtcaaaatatattttcttgaagataataattaataaatatacaaaaatatttctactataatatgtataaatgaggacattttttcttttacattattatttgacaatacatccctcaaccaccacatcattattacaatccctaatttcctatataatcttgtttgttaatgtgagttttcaacatcataaggattacacccccataaaatttttgaattaacaattaattatagctaataaaatcgacaataatactttgaaacttggccccgtcgtcgattttccttgattaattatacaagaatattataatttatttattaattaagctagctagcctccataaaagagtgtgttgttttgtttcatcttgtaacatgcttgaattaacacattggattcccctaatcacatcacatgcttcaataaatatccccttaattaattttaatccttatattaccccactttatgatcccgatgggttatttattattgaaaaaataggtagaataatatagtttgcttttgtagactaataaattaatccttatatatagttaaactaataaaacctaaatcccggataatactttcccctaaatttatccaaaaagggattattgctactatatagattataattaaactccctaggttattatttacttaattatcactctagtacaatagtactcaatatcaatccttctttttcatgttggattaaatcaaaataaggacaaacataacaaagacaagcatataggaacaataaaactattgtctccgcagcattcaaacaattcaaactattatataaataataattatatatatatatattcatatcccctatatatatataaatgcatataactcatcatcaatattacgttcccatttccaattttaattctctttgcgcagcttaataaagctgttgtagtggtgtttaaacatgtgacacactaaaacttcaaaaaatatcatttacacataaaaaaaagtatgaagcgcacgcctttattatattcaattttataaaacagcttgtagggttagaatatcaaaactctgaagtcatgtcatatatatctgtttctgaactattttattaatgttattggaacatatctccaatgccatggaattggtacatcccgtatatatatttttgaaacaaaattcaacatgaggtggggtggataggataaagttcatcctctggtattccacaaatttgtggatgtatatatagaatatagtaatatatatatatatatatatttgatcatagcaacccaagccatgcctctaattttttacccttaacgtatataaagtggtatttttttgaaaaaaaaaatataacacaaaaacaaaatggcatgcgcgagattggtaatacatacagtacacacaaaaataataatactaattataatattctacgtacacacttccaccatggtaccctattacattgctcaacaggtaattcaattaggaaagctatgtaaaagtacacaaactactacaatgtaggcctttagtttccctttttttaatctattttataaaaagggaaactaaaaggtgtgaaaatatccgcattgatatttaaaggcggttttttggtaaaacacgtaggtatagaatatatatctatacagttggttgggggttaggaaaaatcaggattttttttaataaccctatggcgtcggttattttgtat

SEQ ID NO: 26835 - DNA, 1976 bp, Cannabis sativa
actcacttattggcatgttcaatgtattctgaaaaaattgttgagtcgattgcggcgtgttaggggagaaagacatgactgacttttgataattgaggagttgacccgaggcattgtgatatatggtcaaaattttttgaatagccaatgcagaagaagtagtagcttcacaaaataacaagctgtcatcagcaaagagtagatgtgagattgatggagcagttcttgtgattctcagcccttgaagattatttacagcctcctcatgttgcagcagtcttgaaagaccctccgaacatatcaagaacaaataaggtgagagggggtctccttgacggagtcctcttgttggcttcacatgtcctttgatgtcaccattaatagaaaaagttaagctacaagaagataggcagcgtgcaactagatcaatccattcttgagcaaatcccattttatccataacagcccacaaaaaagaccactcaactcgatcaaacgccttgctcatatccaatttaagcgctgaaaaacacttagctccacgttttcgatgttgaatattgtgaacaagctcaaaagccactagaatattatcagtaatcaaccgattagagaggaatgcactttgtgtctccgaaatcacaagaggaagagcttctttaaatctcagtacaatcatcttagaaataagcttgtagacaacgttgcaaaggctaataggacgaaaatcagccattacttgaggagaattaattttaggaacaagagtgatgatagcttgattaatttgttccatatcctgtgcatggttcagcacactcaacacaacttcagtaactgaagttcccacaatatcccaatagttttggtagaacatagcggacataccatcactaccggggcttttgtccgggctcatcgttttcaaagctatctcaacttctgctacagtaaaaggggcagtaaggaacgcattcatttcagatgtaatacttgctggaattgtatctaccacttgagtaattgttaaatttaggatcattttgcatcttagccttttttttttagcaccttaactaagtgggcatagatctaactagtctatacccaggcctgtgtccacatacatacagagagagaataattgaaacttcaccatgagtgttgaaatattatcaaaaataaggtatgtcctttgtccactttgttttttttttttttttacagattagttgtcacctcattgattgtcacatttaatgtatgcgtctatatattatggtaggtggtgttctaattaattgataaaaaatattgttaatcatcaatataaaatctttttcaaaaaaaaaaaaaatcatcaatataaaataatgaaagcaattcttttaacgaccacattgaagaatataataatagattaataatataccatcatgatcattaatggtgtggtcagaaatcgcatttaggtaattctttattactttatttattttgagaccactagattttacattttagattttaaatgtatgatctattttgtttgattagttaaagaagtaataattgaatgatcatcattttttttttatgtaaatattattttcaaatttatacttaatgctattgatgtgaaatattttccatttattaaggatgatcaatatacactgtaaatattatagcgagaaaaatatatggtgtaaatattattacattattgcgtgtaaaattgttaggtcgtacaattaatatagttggttttgataaagaattgatttattttcccttaaagtgttatcattaattaggtggagaataatttgaaaaataatctttttgatttattattttatttgtggcaaactctcttattatatgcattcaataaaaaaaagtaatagactacactcataaagtttttttaaaaaaaaattagaaagaacacaaatgtaaaaaaaaaaaaaaaa

SEQ ID NO: 26836 - DNA, 2309 bp, Cannabis sativa
cgaacaagatcaaggcactgagccgtttgaaagctaagttgttggtcatagccgaggagcaaagagcgaccgagataaagcaaatacgaggcgatgcggtgaaggccgagtgggggcagcaaattaggaactatgttttccacccatacaaactggtgaaggatgtaaggacgagtttggaaacatcagatgttagctctgtaatggatggtgaattggagcccttcatcaaggcttacctcaaactcaaatacaccacggccatgtcttcaaatgattagaatatgtagcgttgtgaaacttgtttttggtaattatttttgctatgaatgtaaattaagtaacgtcttccattaatggtcatcacagcgtgagtataaatgcgattatacatgctatatcatattgaacagtggcctatcaagatttttcaaactacaatcaagagagattactagcatttttttcttttttttttaatgaaactactcctgggggttaaatttccatcccatgagcattcgttatctaacccaagtgatctccttctgagcctgtgcgccaagtcatttgcacttcgagggacatgttgtcatttagctgttagacatgtgttaggccttagggtaacaaataaagagggcaattaggtaattgtaattggagtattgagattgtataaataggagagtaatagaagagttttggacagtaaatgattttagttaaatgagcttttagctcttgggagagagttgggtctctcgaatacccagcgacctgttattctcttcttctatatcaatatacaactcattatttccctttaattgctactgttatactaagttgataggaaattcctatcaaatggtatcagagcccgtcgattctttggggcgaggtgtgatgggaagtcggttggagtttcagcaagctccgaaccaattggaaatgatgaaatcagctcttgaggctacgattggtcccatcgtgaaacggttggacctgatgatcgatcggatacaaaaatccagacaggcacgaaacaccaacgacactctaatggcaactgaggttgactcgagggtgtcgacacaaggttgttcgaagattctgcttccacaattaacagcgtcaatgacacctatcgaggaggaagaacaacgagatgaagccgataagggtgaagcaccagaggttttagatttgagaagcatcttgcgaacacttccagtcaagcaccataggatggctcttcgagatacatcgtggaagtcgaatcgtagctcaccggagctacagaagatgatcgacgctccattggatgacactaacaccggtatcttctttgtcttacccggattatgttggtcggaggttcttagttggatggatgagacacgacgccgcctaacgggggaagggcagcctggttgaccaccgtcgtcaagttcacgagagaggcgttgccgatcggagccgaagaagaaagaggttgaaccaccatcgaagcttcaaaagagaatggttacttcatcggataccaaagagattcgcgattcgtggccagataaacgacgatatcatccggcgccgaaggagataatcatctcgcttgagaagccacttcagcgaaccttgacgaccagaccagagaagtgccgatgtcttctcaagctcgctaatggcgtccgttattgttggtgtgcctcaatcattaatgaggcagctgggttcaattttttctttctagacctaaggcccaactcagcccttgaatatggcccattgtgtgctttaggtcattgtgttatttggggtttgggtgtaaagtacagcccattaaacattactaaaggcccaatggccgatttaggtcctaggttgcaaaagaagtgggatccagatgtggtttccatgatttcttcttcttctcctaatcgcacgaagcgtctttgggagctgagacttgtcgagtgtgatccacaaccactagcgattgagcaaaggatggggatcgccgtgagggtggacggaggggtgcgtatttggccggaattaattgacgaagtgttggggaagccattttctcgctggacttttgatagagggaagataatcactcttcaaaaagaacaaggtaaccttagtcattcacgtttgcaattttttagaaaggaattgctgaaaattttgttggagtctcctgatgaccaatattcaagagctggttcaccttcaaatttagttttgaagaaatttgcacctaattttgtaattccaactcctaagagacctttggcatt

SEQ ID NO: 26837 - DNA, 2604 bp, Cannabis sativa
  modified_base (1984)..(1984): a, c, t, g, unknown or other
aaaaaaaagaaaattactaaaaagagttaatctattttaaaataaaataaaaaattatcagaaataaggttccaccgagacttgaactcgggttactggattcagagtccaatgtcctaaccgctagaccatggaaccatttacgtcaaaattaaattattttataaatttaacccaataaaagtagactagaaaacgagccacgacatattaaacagtaaaggccgactggtatttcagcacctgaggtgagctgaaaatagtcaaacgagtcaaaggagtgaaccgtgtccatgtggagaagaagaagaggccggtttcactactgcacgtgcgctcacgcacaagaaactggacgccattgtcgtcggcggaggtcacatcgccctcctcgagagtcgtcatctcatcggcaaagccgctgtaactaaggagctcattccaaacattgtatacagcttacaccattttgcacaaagccccaactatatgagagttcttttagtgttgagagataaaaaaaaataaacttttacaccttatttaagttatagtgatctccactggtctccactggtctctactaaaaaattgtgagtgaatatacatatgtaatgtaaaagtattaatattgtaacatttattcaattctctttgtattattatgtataaaatctgtaacagattcattcagtgtacacatcttaattatttcagtacttaactcagtactgcttgctctttcttcaagaatcatacgcacataaagtggtggagttagttaaagaaaaacaaagagtttcttgattgagatttgagatgttgactctttaacattgcaattattaacaggaggaaatatttctcatggtgctatgagtttggaatctattttcctgctgagacctgtttgttaaatcatggtgattccaaaatattttatgtcctttttttttcactcttaaatgcataaagatttatatgacttgtaatctttgatactatacacaggtcaaattataggacaagagttgtataatataatgtatatatgggtagtggatcacatcctggcccctggtaggaaggctgcattagctgttcttcacgatatcaaaaatttacaaaataataataataataataaaaaaatacaaatcccaaatgttttgtgaatattaggaagttggaaatcaaataatggtaataactattatgtacaaaatgtaactccaatcatcacagcttatgggtaattccttgaacactagtgggtctaagaactatctactactaagttcatataaaaaaaaataaaaacaaaaactatctacgattatctctaacggtaatattcttaaaaagtgctaaaaaaatttacatttaaaaatataatattttattttatcttttttctatattatttttagcactcttactttaaaaatactcctataattaccatccttcaagaatactacaattatttttggaggatacttacttatgtggcaccctctataacattttttaaagtactaaaaatttttatatcattcaaaaatatagtattttttttttcacattattttttatactcttacttttaaaaacactcttacagtataacatccattaaaaatactataattataatctcacacattattatttaatatattatttattttaattatagatattatcacattatttatttttcttaatttttttttaaaaaaaaagagatagcatcaatgtcatacggtgacatcaacacaattttttatgatagcacaattttatctctaatagtataatatccttgtattttaccaaataaatatttcacataagcaagcatccccaaaatttaaacatttagatgctctaagataaaataaaatattgatcaacttacacctcatccgttttcttttacattaagggttcgtttggtacgtcgtattacaccgtattgtantgtatagtattatattgaatcgtattttatgtaaaattatatgtaatatttacttttatggacacctaaatatataatattttagtataaattaaaatttaatatagtattatataaaaatatgatgtataatccaattcaatataatacaatacaatacaatacaacctaatacgacgttccaaacgaaccctaaaacaataaaagttaaaaattatattttgagctacattttagattaaagtatttttaacatgtactaaatttagtctacattttgtattaaagtaattttaagagatgagctaaataaatataaaggttttcgcagtgggatggtgtagtttttgactattttatgatagttttatgtaattttctaaattatgatcgcattgtaaaattttatgactgcatcacactacaaaaatacggttagtgcggtgcgatgtgttcgattcaaactgtacattttggtacagtgtggtgtgaccggtttatacaatgtaagcagtttgatgagcactgataataatatactacgtttattgtattagcattagagatgatctatgtacccaatccacattcttacacttagtgctgtaaatatgtgtctt

SEQ ID NO: 26838 - DNA, 2892 bp, Cannabis sativa
aaaagtacctattttcccttttttttttatgaatactaagaatatacaaaagtctccttcaaacaaaaaatgaatatacaaaagtcaggttgtcaattcgatacttggaaggcgcctagatcaataaattgtcaacctaagtgctggggtgcttggggtccaggtgctcaaaaataaacttgctctgaactgatgcctcaaatatattcgtggtatgtttagttgatgtcacaatgcaaagtttgacaaatttgcactaagacggtcataaaaattgaaatcctagttaggaatatcaacttgggcgttggatgaaaccctaggtgcccaggttggcttccaagttgcaagttcgtgtaatttcagctctcggggcatggatttgatttcttaatgtcttcatgctatagaatactgaaagatagtgcgttagaaatgagtattgaagtctgaactttcatcttacagtttccaaagtcaacttaggcacagggctagggacccctcctagaccgacttgctatgactcaggattacttaactctgaaacctcatctttcttttacgtgttaaatattaatgtccatattatgagaacttgtaaacagtactcacatctcatttgctaaggtaggttaatagtatttatagcacaaaattttacattatatgagaagtactttggcttctttaatttggtttttttttataatttcttgtaactcattttttttcattcatatttttcccattttaatatataataaaataaagttaagagcatggaatatttaaaataattagattgatttttgttaatatttaaaatctattttatatttacaaataactttttttttaactgaaatacaaataatttaatttccaataataaagttgactagtaatcattacaaatgcacatcctatatagtaatattgtttagtactcttttaaatatgagttcattgtccactccattaaataaaaaataagttcaataaatttaaaatttaaaattagttataaatataattgtatagttgaataaatataattaatttaatttaaggtaattggcagtgaaatggttttaatcttttttttacatttaatttatttatcttattttttttgtagcaatgctcctttaactttttttttttttacaaatttatttagttggtatttaacaatagaatttaatttgcgtcttaaatttacaaaaataaaaaaaataaaattaatagagtattactacaaaaaatatcagagtttaagtgtataaaattaaaaaaaaaaaacaaagacatttcactgccaattacctattaatttaattacatactttattaagaatggaatgtaactttggaaatttatgcagtacatcctctaaatgggtattttggtagactcctaatctattatggcatacaccaaagttttttaatctattttttttaattttttataaaatttcaaatagtttactatatcgaaattaaaattcagacagctacttaccacgtgtataattcagaatatttcaatttaatttcagcattataaataatttaaatttttttaaaaatttacaggtaattattaaatgactataacatacataattatatataccgacacactcgtttaaagagtatacttaccctataacattttaataagacatttagtactaaaatgttaaagtaaagaggtcaacactctatagttaatagttatgtaaagataatagtgaaattatacaaaactttaaagatatgtcatcttaccaaacttagttttggaatttgcggtaagtgatgaattaggtgataatattttacaagaatgagaaatatttattaataattattttgcttttaatatttggttattttattagctagtaggtaaatttccttggttgttgtccaaagcttaattgttaacatcaattagagacatgcacaactcattgcgtgatcatctctattccattccatttatatatatttttgtccacgtttttaagccaaaaataattattcatttattattgatgatgggaaatgggtaatgagacaaatgaattttaatcaaaggctcatcccattcacaccaccaatatatacataaaatctaataattattggtgcaaaaatagtttgtttggccctcccatcacctcctctcatattttctatattaaatatctaatctcactatttctttttcttttttctataattattgtgtttgttttctcattccaaccaaccaaacaaaataattagaattagtaggtaagtatttagtacactcgatattttagtagatttttaatctgttttcggtattcaaaaaaagtattttagtcaagaaaaaaaaattatattcgtgtatgttatacttatttatgagtatatataaatttttaaaaaattctaaatactttactattacaaaaataaaatttaaatattttgttgtatacttatatttgtgacaaataattatttaaattttatttttgtcacggtaaattatttaaaatttttaaaaaatttattaataatatcttaaatagttgaaacgtacacaattataaaaaaaattaaatttaaatgccaaaacatattaaaagggtgtagtaaaaacatgttaaatatatattgatatgaatataattttttgtaaaaaaaaattgtttcacactaacatgtcattgaatgagacatccgaaaagttggacaaattattaggaaatataaataattacagtttttttttttttttttaaatgaggcaaagaaaatgtaggtaatcctataggtgatcttccaacatttattatgagttttttttttttttttttatcaactttt

SEQ ID NO: 26839 - DNA, 2903 bp, Cannabis sativa
tagcatattagccacaagatgtgcttctagataaggatcgctagtaagagctagtatgtctgaccaattcttcttttccctgaggtactcttgcattggagtggagcctttccaaactgtttgaattaggtgcgtgtgtcatccattttggatttagagtaagcaacgtataggctttccagagcacaccatgactaagctgctgaagctaattccataacttcagttgttatgctctcagtcatggagctatacaaccatcttatgagtggttggtcattgatgatccattatcggaatttaggatcgacctgaacctcttctctggcaccttcttctcctattgagttagtaggcagaaattccaagggacatggcttagttccatacaggtagccacgaaatttgtgtcctcaaactatggtggagactattgtcttccacaagtgtagttgtttttgtcaagttttagtgggttggttgagtgtggtgagttgttgagggtattgattttgagaagatgatccaccatttcgattgactataatgccaacgagcttcagtgtttctatcatcacggttttgtggggtcgacatggtaggggcctagaagctctgataccaaaataaaatttagagagaaaataattttgataaaactcagctcatttcaataaagagtcaaagtaattcatttacaagtaaaataattcatcattacacaattagtggcctaacgactcttattattgtccccacaaatccaagagaatattctaacaattaaaattctctaataattatatactcattttataaccaaaagtacatgtcaacactaaatatcttcaatcactcaagctattacaatgttggtataaaaaaatattggtgtacatactttcataggattaatcactgaatttgctttttcttaacataaagcaaacaatatttgattatttgtaatgaaacccctaattatttacaattattatacatataattccaatcaataaagtggaataagagtatgagaagttataagcatgtggagtcaatgctgaggaaagttttgagaggtccactctattaaattatgcttagtttgattcattggccaggtgtttgtgacagacaatgcaacgagtcattaacgacaacgagggtgtcgtttcatgctacttaactatatataaatatatatatatataacgcctccaataatctatacagcctcttattactaacttttcatgaataagattttcaaggaaaaaaaaaataacttttgatgaataacaggcaagcgaaaaacattagctttttgcaataacaaaaccaagtactaggtatatctttaacagtacagaaagaaaactatatacataaatatatattaaaaataatcttattttatgtgaagtgtgtaggtgtcatattggttgcctagtattattgtcttcgagcatttgtattcgttgttgatgctttaagctgagtgatggaaccggaaaccaagtgtcaagctcattagccacactcacaaattgtgaccaaaaaggataactttctttatgaaattttattattttaagataatgacatatatacatacagtttagaatataagcctctctctctcacacacacacacaaatgttttggcaaataaagatgaattagaaataatgcttaattatgacaaaactgatcagaattaagttgggtaagttcaagattcatactgatcatcatgaaaacaacaaaaattgattcaatgtctctctcactcacaagcccttatttaaaaagaataaaaaaaaaattggaatgagtccatccacttctacatctttttctttcattaatttctcgttgaattttcttttgggtggtgtcatataaaattgtacccaaccaatgagcttaaaaagcacaaggagacctgtcatgttcctctcacatgatcaacaatgaagcaaatccaagtggacgatggttaattatcagtttagacctttggattatctttttggacatttttgggcccaactgcttgtcaatcgttttggtttcgggcgcatagtatataataggcttttgatttgttagagttcggttttttgtgcttcccaattttaatggacattttttttcctcttaatgtatcactcacaatttatttttctaaaagtagttgattattatttttttcacttgtttttgtaaagaagaggaaaggtgtaacactaacactcatggcatgtgtacctgtttttgcatggaaaagtaggagagggtcctttcaatgactcgttttaacaccacttctagtttcaaaatcagaacttggatttactggtgattaggtggaaaaatgcaggcagatgagatgagtaggtctaggttcgtgtaatctcacatgggtatagcaaattgtggtaagacattttgtgtcgacaaagtaagaggcttgcagagttttgtgccatctgtctcccgaaacaaagctaataataataattgtcacaatcaaatgaatgaatgaatgaaaaattcaagcacaaagagagtgagaaagcactgaatttgattggggaatgagagatcgcctaagcgccatataactcattttgacgttgatatatgatgaaaaaccatggagagtgacacttgctgacaactttggtgatgacacatgtcagtttgacattgcattgtcctgacctcacactataatttgatcattattattgttgttgttgttcaatgtatttaccattataccaaagcgaatttccattttgggacccctacaactactaatgacaaatcaaaaatagtataatgccactttacaaggttggctttccacctagccggaacaccaaattacgaaa

SEQ ID NO: 26840 - DNA, 2436 bp, Cannabis sativa
gtatcagtattgcatgtgggcatgtttttgctgttgtaccaaacttcattctttttttcctatatttgattctgagctagatatattaaatatttgatatgatcatagactcggaaaagataataaagtttaactatcatctttgaggtttgagattccattttcatggggaccaacctagaaatatgctggagttttttcatcttcattaggtctgagttttcaaaactttaggagtcgatgggaggacaagtaacaagttttataatttattttatttaatgttagactaataccttcaaccttgattttaattttgaggaatattttgctaatcaaagttactgttcaagttgggatgactgcaaatttgagggactttttgctaacaaattgtgtagggaaaaaggtaaagtagtacttttcaagaatgaagtctgatgaagttgaaatcatatatatgcgtaccggttgttatatgttgtaatatatttgctttcagaaaaataaacaatttccatagctttattgacccacctgttcttaagaccaattgcttattgttattattatttggatatctaaagtttcatacataaacaattctattgtataacaatttaagttaactttcaaattatattgattgatggaattgtaaaaaagagttgtgtccatttatttttggactgcattttgtactgtcattattatgtgaaatcttctgatatctttttcaactgtattggtcatttaaacttatactatgccctgttttgtaattattattgttacactatttaccctgtcttgtaattattattgtaattgtagctgtttttcaagtgtagcattcttttcttctgttttcgttcaaatatatttttggaaaagataattatgaactgtgatccttttctaccgtttttcattaaatggagcatcacaatttgttagattatatattgctaaataattggtcaatatactcgaaatccataggagtactggtgtgaaacgtggcatttttttttttgaaagaaaatgtggtaatattaaaccaaatcaacaggtacaggagcatttaaaaatttagaacaagtatcagtccaaatatgaactcctaacaaattagtaatagatttagttagtgcgtaagtcacgctatttgcagcacgtgaaatggtataacaaaaaccaccaccaaccatagttaaaagagagacaatttcctcattcctcaaacatgtttgacttcaaaattagaattaggattattaattcaattacaaacagttcacgcatccgtctccactctccacatattgaaactcatattagaagcctaaaggagaccaatacgaagagtcaacaacttcgccaccactacacgaaattcatcagcacatccaatcgaccaagccgcccacacaacaccctctgcatcacgaaccacccctcccaaaattagcaaagcctctcccaggcgtgattgccgcatcagtcgacagcaccaaaacccctggttcaggaggaacccacctgctgccaaaaccaacagcaactcttggccccgactccctgcaaccagcctccaccatctcaccccgaaccacccttcctctttcccccagttgctgctgcacaagaaatattattggacaaacaaacaaccccctacaacttcaccacaatgatcgaagatttttggtgctactattatactttatatgattttgctgtgaaattttaaacatatcgttcggttggttttgaatcgttaatttaattctattttatattagtaaaatacttaaagactgtagtggtatttagtacctatatatttttaattgtataacctgtttattttgctgtgaggtctaatctgtttatttttcagagtacgctttctattcaaaaaaaataaaaattaattatataatataaatttcaatttaaataaaataaatgtgaattttttattttgtaaaagatactgattggaatctttattttgttaaatgatagattggactttctattaaaaaattaatctcaatttttgtcattattttaatataatcaatgtgaagctaaattttaaaggaacaaatacaaaaaatataattagtctggtcataatatcacccaatcaagttattattaagttgatagaattaagtttatggtattattttgtatctctctaaaaaatatagaatctaaaataaatagtgtatttgataatttttataaaatacaagattgaaaataaattgattaatatttctaaaagaaaaggtatttgattcttggtattagtatgtgttgaaatttttacttttcaagtatatatcttcaatattagattgcatttggaagtaactatgtaattactaggtatgataattactaaggtagtaattacacagt

SEQ ID NO: 26841 - DNA, 3679 bp, Cannabis sativa
actctagtcccgagccttaaaaatcacatagtgtgagtaagtcacctggtggacgcccaagtgagctttttactccgtaggtagcacgaaaactaaggttttggttctagggtccaaactgtattctggttctcaaaaattaaccaaggaacaacatgtgtaaatgagttttttgcatttagatcccaggtggggtacacacagcacccaccgcctaggtgagtcttccctgactcctcactgggcacctagtggtggacaatatgtccatcctagtctggtttcgtgggagaactagtttttagacttggtttctacttagaagatcatcaaacaactaaggaaggaaattcgagctaggatattttgcactcaccgcccagcatgggccttatgcagctaccagcaccaaggtgaaccttatggcacctggtgggcgcccaggtggatatggctaggttttagggcatttaactcttttttttctttcaaatgagagtaaatacaagtgttggagcatcaaatgaagccaagaagacattgtgcactaggggcgctaggtggccctaaccctagtactaatgcccaggcgaacacctagtgttaggggtgtttataaaaaaattacgaaccgcctaatccaaataaactatccaaaccaaaggaataaaccgacaaaaaatgcaactaaaataacccaataaaaattcaaaccacccgatgaatatattgaatagattaaaattattttaaattgtcaaataaatccaaataaacaataaactattttatatatttttataaaaagatttatataatgtaatgcataaattttactagttatattattttgtctttaaattttaaattttatagtgtttaacttaaaatttagactttatatttaataatttttatcatattcggatattaaaattaaaatttaaaatttacaccatattattacttttttttctatttttatctgaatatttgttgtatagtttagtatttattcaattaatacttgtcttatgttaaagttattaaaattaatttagactataatatttttaagcttgaaatataaataacatacttttaaaaaaaattatttgaatactgaaaagaaacaataataattgtagaaaaaagtgaagatcgatttggataggttaactcaaccaaactaacgaaatcattgggcgaattaaaaaaaaattatgttttcaattgggtgagttacaattaaatatttataacatgatatttataaagagctggtaaaaatatgccataacctgacccaattgaccactgtacaccctacctagtgcacaacaggggttgcacatcttttttctcaacacacaacaggggttgcacatcttcggaatcatatgtgttttgcgaccaagtgaaacaaaactgctcacctgattgttggtctaggagacaattgcacattacatagtgttttgggcatatctcactcaatacaacttgaattgatgcacttttaagcgtattggaaagctctttcgaattgatgtttcgcaaggaaagaaatattaattcagactccttctcataaaaaatcgagtcgcgagggaaatacgaatttaggtatcagagccacagaatttgattaataacggacctcgttcaatctcgaagatcaacagacatcattcaagttgagatgggtaaatcttaactattcatcaagaaacaatattaatgtactagatcaagtcttgaagatctacaatcaatatgtggatggtgtgccatcattcaatgatgcagatcaacttgatgagaatattcttaaaatattctctttatttgaatattttattattattttaaatataaatattcaacctccttcttctaaaaagggatcacttcgttcattttttaccttttgtaatctttgtataactatagagctctaaaaaactatgcatttttttctgactatagaccaaacgttctaagtcaagcttttgtaagcatttttgctatcaacacttagaatgagtgctctaagtgttgatcaaatcaataaaattttaggtaaatataatcccattaccaacgaacaggggtgacataatataaagttgttgtgttaaccgtttagtttttcgttctatatatacgactgttgcttatcaaacgacactttcgttaacaatttaatttttgagtcaatagttacttgggagtttggaggcgaggaagttgagtgtgaggttgtccaagcctataggtttttggaattttagagactggacgcagcgttagcgtgccaagaaccagaggtgcagaggtagaaagagggcgagagaattcaaccggaggggaagaaaaaaatacaaaaggaaaagaatatatattttcaatttgttttgatgatgcgattattggtcaatggatataagaagatcgtaataaagcgatcaaacacaggaataattgatttcaagtaaatcttatatgaacaataatgaaaaaatgattagcaccgaatttattgtggttaaccactttttgactataataggctaatctacttaatacttatattgatctctatgctcgacaatatagttctctagaattatattctccaagagttttcttctcaatcgagtttttaagttcgcaagggttcacaaagtttctggagtactccctttacaaataaatgagttagctatgtataggtacaatatctccaaaatattcctttaaatttggaagatatttacaaatattaaaacacttaaattcagatatctatttgctttgatatcagttaaaattttaatataatattcataaattaaaataaagatctaaagtccaatttaaatatccctaaagtaaaggagatagttcaattatcctcttttatgcatatgtagaattatccatctttagaagtgttgttgagaagagtgatcccttgatttactcatcttatacccagaccttgcacatcactctagggctccagtgtgcatggaattctttctctaagttggagccctatctcctcattgtaggactctaattttgacattctacccgaaatccaagccctctaagctcttttagggcttgaaattgtattgatcagttctcccaaatttgagcactgcatccattctctagggctcaaattctctgagtctaggtagctacatgtctgagccacctgtaccatcttgagggctcgaaatatactttgtctttttgtggctcccatacttgagccatttggttcacttaggcactcggatttaccctaaaaaaaatattccatatcagccctctaaaatctttgcatatacttaaagaagttggatgggtatattataacttataacttgattatagaactcctaggtgcatatgtggagttggccttggcactccatttaatcaatgtaagtaatttgatatgttatttaaatcatatatcaaacaatcaaattaatattcatttaactaaatcaattttgatttatttaagattgattaaatatgtaatttaatagtattttcgataggtacttgttgagagtgtgcctcacaactttttctatataaatatgcactacaaaaaaattgacttttagtcacaacaaaatttgtgactaattat

SEQ ID NO: 26842 - DNA, 1407 bp, Cannabis sativa
aactattataaagaattcaaagacaaaacaaacaatgaaatgttaattcattacaacgttcatttcctcaaaccaaacatgtacttagtgaaagaacaaaatcctaatcctcccaagtattttgaagaaaataatgaggaccctttttttcaataaattttattagcctcttgttgactaccaaaaattattcataagagactcaatttggttacaagtatggacaaggaatcctaaaacaatacataatgtaagtaggaagagtttgaacaacaacttttaaaaaaacctcccttatcggctctagaaaaacttcaatttggttataaaagattgttttttggatttactagttctatgaggcatacctaaataagtagtaaaatttctattatttaaacctagaatatcaagaaaagaccaagaagaaattggattttggtgtaagagtttttttaatatgcaaattagtaatctattgctaaaatataattcataaaaaaattatttaatattgtgacaaaggttgattcaaatttcttttttaacatgctatgatataaaatttacatcacaagaaatacattatttctatatttatttttgtgttatttttaatattttattattaaatttagttattgtgttaaattataaagcttttaactttttattgctttatataataaaattaatgattagattattatttttttatatttttttaataaaatcataaattaaatattaaatttgcttcaagttttgtaattgtgtgttggaacataatgctaaaattgatataaatatactagaaagttactttttgtgctaaatatagcacaatttttatatcccacattgcagatggtttaaatcttataattatttaggtagtaattacaatatattttaaaatacaatgtgtgttttgatatgagttgataattatatataaatttatgtttacgcagaaatttgacctgataacatggacaacacttctgacacgtggtaaaaaggaaataatcatgggccctaaccaccgggactaaaggtggtcaacttgggcattagaaactgtgtcagtgctctagttgatagtaatgggcgctcaagtagggacaaagatccaatgaagacgtttttagctaccatcatttgaaaaagttcaagtgaacaggtcatagttaccttaaaatgataaaccatgaagctaaggatgtcacatgaacattatccaaggactcaacctgggtctaacttcagagttgggcgcctaggttgacatcctatgtgcagtcttggatcagcctaggtccttggggtccgtttttctttaatacaactccatttgtggcattctgaagtgtgacagtaattgtgcttctatgattcttttcacac

SEQ ID NO: 26843 - DNA, 1934 bp, Cannabis sativa
ttttttttttttttttccttctttgaagccttcgagattcattcacctttctttctctctcttactttctgcaccaccacccgcccaaccctttattttatttaccttgtctctctccgtactcatcaatactagtcgtcttttacaatttaactctcacattacatacattaatatgtactacatatatatacattacgtacttatgtatctatatttatatttacgtacatacattatctctcttttataagtagttgccttaaaatttaccatcacttaagatcatcatatatgtaaccctttttcaatttttattttacataaattagaaaacaaacagcattttacgtggggttatattttatttagttataattaaattataaaattatattaaattttgtattttgtattttaaattttaatatttttttttgtatatattttaaatattatgagtaaatattttactaaatttttatttttttaatcataagaaaaataaattaaatgatgattttttaattaattagtttattatagatatacaatattatacaatttttttttttgataaattataagtttttcattgatctcaaacacagtacaaaaatatgatcaaaataatcactgcaaaacccaaccaatgcattacaatcccttaacccgtttttatctattacactaaccccctgtaactctctattttgattctttacatatatatacactgaacttgttgttgatttcaaatactattgttcttggctttccataaataatacatcattgcatttacaattattatacagttagtttttaaaatatacatagtttaaaaaaaagatatataaaaattgataaatctatatgaaatttattatttttaaattcgttgatcgtcgtatcttacttgtagtagtcaccacgttgttgtcgtcattacctaacttagttgtaatcgtcactactatcctccttcttctaatttattaattaataataaaaaatagagatagaaaagtgctgtcatcacaaaataaaaatgttgtgatagataacattatgtataattgtcaaacctgcaagaatttaagcaaacttatgaaaagagtacttaactcaagctcttatattcacataacgaaaacacaaattcatacataaattaatatgcattaaaacattcaaattttgaatattaatatgtataaataaaacacaaaattaatactaacgaaagtaactttaataaaatgatgtagaagtagaaagtcattttttatacacataaaattgaaaaagaaaaagaaaaaattaataataagaggtatatatatataagtgacggtgaaagaaattagaggaatataatatatatatattgattatacttttgaaaaagaaaaaaaaatgattataccaatgttcataattgagtgtatacgatgttttaatgggctttttttagttttaactaataaaagtaataatattacaaaaatacttctagctgaccaaataaacaaatatacaacccaaatagaaaaaattacacaaatagctagcacttacacacaccttcaactcaggatccatgcttcctgggcaactatcgcgcaaccacgcagcaacccaatgcaaccgaaacgaaaattcaactagaaagagaaccacgattaatttcggcgacttcaattgagaagacgactagaatcaatcaaaataagggctgttttgaattcataaaaaaaaaaaatatagaaaaactactacaaaacaaaaattcaaccgtaaatccaatttaatttgcataagactaaggtcctgacttcaatttttagatccatgaaaggcagatctcaaaagttgaactggagttcccaaataatcaaactcaagtataataaaaaaaaattacatcaata

SEQ ID NO: 26844 - DNA, 2793 bp, Cannabis sativa
  modified_base (505)..(509): a, c, t, g, unknown or other
  modified_base (551)..(552): a, c, t, g, unknown or other
ttacccttttgagttaaactatagtatatcgtaattattttttaagagattataaagaataaaattgtcattataaatttcatattaaaaaataaaataaaaataaataaaatctattacctttaatgacactccttagaaaattggtgggaaagttatctcttccttttctcacttatttaattaagttatatttttttaaaatttaataaattaaataaacaaatataagggaatgattccctttccattaattaccattgcttattagtaaacatcctattaagtattatattattatgatgtgttagaaaaataaatagtaaagaataagacttacatttccaaaaaaaaaatcgtgcagtaatatgtctgtgtaactaaggtgacgtttggttgaaggtaatgaaatggaaagaaaacaattttcattccattcttttgtttagttgcagttaaagtaacaagtgaaaaaatttaataattttttatcaatttttttatnnnnnttaaattttatttcattccattcctattcctatatttttatnnctcccaaccaaacgccacctaatttcatatgtttgcctacaaacaatttaaattaatgaatctaaaaatatatatgtcagatcatcaccaatggaatgtaaaagttaaaccatatttggcataaaaagttgttttataatatttttacatcaatttttactattatgctccaatgtataattataaatcttgatgcaaaatttaatatattatttaatacttacttaacaatttattgaaaaaaaatataaagtaataataatacaagagtaaatatagaatttaataataaaataataataataataaaaattctatttaatgcagaaaaaaaacatatatcaattaaaatttaataataaaatattaaaagtggcataataataaatataaaagtataatatttattgtgatttaaatttaaatcatcttttgttatgtgatatatttgtatcacaatttgacaccattaaagtaaacgtttaacaaattgaacttttgcatctccattctctttagaatacaaatttagtattttctttttgttgtaaattcagcaacaataacactaagaattcaatctgaaacctgcattaaatcaacaacttgaacaacaataacatacacaaatagaccagttaacaacacaaagtaacaaaatagaattgaactagaaggagataacaagatttatcctagttccgatcttagatatcaatttgatccctggccatactcaagctgagaaaacatcaccaattttttcattaacatggagaataagagagtagcaatacgagcatcaattcaagagcaacacagctctgcaacactcgagaaacacaccagagtaccagtctcagtttctcaattcatacccgagtacaccctctgttcttaaccccttcaagaacatggtttcatagcttataaaaccaagcactcattctctaaactctctcttcattctctctttacaaaagtggaaagagtagcctatttataggtacaactcacagctagaaaatatgtgcaaaaccggcaccaactaactaacataactgaaagttagttaagttagttaagtgtaggtgagttagttttaggttggtttagaggatcaacttccataaatttccaccttgattctctaaagcaatcttctagctatcttttcacagaagccttgatgatgttgatatctcaatatgttcagcaagtacgaatgttcaccaaactgagacaatgcatcagtttgctaaaagtgagaaccttggttcacatgtctgcaggattgtcacttgtgtgcaccttttccaattccaaaaccctatcctcaatcttctctcgaatctagtatagtctaatttcgatgtgcttgctcttcttatggtatacaggattcttacataggtgaattgatgacagactatcagaatagactgtccctttgtccttgagtagatgcagctcttgtagcattccttgtaaccaaatagcttccttgaaagctttagtcgtggccatgaattcagattctgtagttgatagtgccacgactggttgttgttgtgatttccaacatatgcagtttttgttgaccatgaacacataagcagtagtagaccttctggtatccttatttgatgcataatcagcatcaacatagccttctaagctcacatttgatgtgtctctttgataaatcagaccatacttgattgtacctttcaagtatttaatcagccacttcattgcattctagtgttctaacttagggtttgccataaacctgcttagtacactcagagaatgagctatatcaggcctagtactgaccatgatatacattaggcatccaatagccatatcatagggtacacctttcatgtttactctctctgtttcagttttaggacaatattcatttgacaatttgaaatgccttgcaagtgtcacagcaatggccttggatgaatccaaattaaacttcttaattactttctcaatgtagctcctctgagtcagtgtcatcttcccttcttccctacttcttatgacttctatcctcagaattttcttgacagctcccaagtccttcatttcaaattcagagttaagtttatttttaatggcttgaattttagtcttgtctttgctaatgatcatcatatcatcaacatatagtaataggtacacaaccttaggtgtccctatttccttgtagtagagacaagagtc

SEQ ID NO: 26845 - DNA, 4532 bp, Cannabis sativa
  modified_base (3499)..(3510): a, c, t, g, unknown or other
tgaagacagagccatgaaccggtcaaaccaaagacaaaatacgtatattttcgagtttatgctttttttcactttcgtatataacggctgttaacttagatataataattcaatatattcatatcacaagaacgtgtctaaactaaactcgtttgtattgtgttgtgttgtggataaaataaattctttttgatattgccaaggcaaataatgagctcttgattttgacttggagttggagttggtaaaaattgccttggatgaaaaatacacattcggaacttgaactttcacaaaggaataaataagatggaatgtcaagccaagcaagtgctagtagtagtaatgggactttttttgtcttgtctataccttgtgttttacattttagtgatgggaccatgtgcttgtcacgtgagacaaattaatgtacaactgtcttcatcccccaaagacaagtagagttattaaaatttatagtgagtgagagatagttggttgcaaacaatgaattgggtttgacaaaattgatcgagtttttacatgtggcttttgggtatggtttaacggttttattttattttattttatatatttaatggagataccaaaccaaagtaaataactgtgataaatgggatttttagttggatatgctgttattggacattagcaatctttaataatattaggacttgtttggtatacgataatttattgtattgtattatattgtattagattggattgtattgtattagtattatttaatacaatactatgtttgatattgacttgtactaataggttatataaaattataaattatttacaataaactcggctccaatctcgaccacaacctaaactcggactcggatctagacccagaattagacccccaacctgaaccgggacttggatcctagacccggacccaaacccgaacctagacctagactcggaccccggacctagacccaaacccagaccctagacctggaccctggatccggtccaggttcaggttcgtgatccgggtttgggttcgggtccgggatctggggtttagttcccggttcaagttcggggttctagttcaggttcggggtccgaattttggtccgtgattcgggtttaagtttgggtccaagtctggagtctgggtttgggttcgactttggtgtccgggtcgagggttcgtgactcgaggctgggtctaaggtctggattcgagtttgggttcgggtctgaggtccgtgtctagggtttgggtttaggtctgggatttgggttcgggtccggggttcgagtcggggttagggtcaaggtcggggtctggggtctaggttcggggttcaggttggggtcagggtcgaggtccagggtttgagttcgggtccggagtccgggtcgtggtccaggatccagggtccgggtgtgggttcaggtacgggtttggggaccggtccgaggtttgggtctgggtccgggtttaggatttgggtctaggtctgtctagggtttaggtccagggtctgtctagggctggggttggggttggggttgactcctaaaacatttgtaaatattataatacaaactaatacgggtcatttattatgtatcatataatacgaatcacattgtattaaaatttatggttgtaataattaatacaatataatattttatccaaacatagtattatttgctataatacaatacgactcttatacggtctaccaaacaagctcttaaaaattgtcatattattaaattaggaaacacggtattgcccaatttttataattttatatataatatatatttgggaaatcaccatatatacgtacttttaacttttttttttagttttacgatatattttttttttactttttttattttatatttgaaattttaagttgtattattcatgtttaccgtttctctttcttttttattcaaaagtttcttcttcctcactcaccaaaattagaaacatttgagaagtttttttctctcacaatctcatcctcctccttcccaaacaacaaaattcattaacattcccacacactcacccaactctcattttcatattcagttaagttgaagtagatgctcatctaagtcaaacatagtcatcaaaattgttctttttttcttcctcttatgctcttttaatttgtttctgttactaaggtaatctctcccccactttctctctgttttctatcaaatagagttggaataccacgtgtttgatgaaatatctatgtgcatgttttagattatttttgctttgttttagaagaattagtttttaactcttatttgcattatctctagtagttgaatactatatatgtagtttgattgagttttatcttttcaatcttaattttagtattcaatagtaaattttttgaaataataactaatgagcataacttctatttgaattttacagaaaacactacaatcacaatctaaatagcaactcaaatcgcaacctcaaatatccattgattcctcaaattcgaaacccaagttgcaactctaaatcaaaattgaactgtatcacaatttgagccacaccccaatcactaagcattctcaatgatgccactgcaattggcattgagtcttcactgctggaagtttatgtcaatagtattctaacccactttgtctttagatctctcttctgattttggtatcatttgcataatatatttcactattatcaaatactcactaaattaatttgatttttttttttttttaatataagctttgagtttgtaatttcaatctattatctttcaaatttatatttgtatattgttgttgttctttaattaaaacattaggcaagaatgaaagatttcaacatatggctacatgtactctttctcttgcttagtttgtttaattaagatggtaataatttgtaaaattatttatggataacttgtgcaatgttaacctgatttataaggtttttttgtcttccttgtgatgcagtataaatttattctttttttttttaaaagaaagtataaatttattcaatttatgtattttatacttcacttggtacttcttatgaattttaatgtgttaaatgttctttgtaaaatgcaattgcctgatttagaaattcataaaccaaaacataaaaactcattaatccattttttaagtgtaatcaccaagaaatgataaataaatatgcatgatgattataacatcaataaaaaaaattcttcaatcaaacataaaactaatatttatgacttcctttatatgtatatatatatatattgttagtgttggaagttgttttatcatgatctagatctactaacatatatgtttgattatattctataatctaacatcttaaacatgaatttcctaaaataatgaaataaacacatataaagttctagaaaatcttgcattggtggcagcggaatattatgactcnnnnnnnnnnnntctctaacccttgttccttttgatcgtagagtaataacaagatctgaacctagatctcctttaggtgttagaattcttcaatcttccacactatgattgagtactgacttaatatgagtgggcaaggtactcctcactatagggacttcaaaatttagagagagaagagagagaatttgaatatatgagagagctctttatttttagttgtctgacagaatagtctggggagcttatgaaaataagagcctataattatctatttataggattccttctaggattagggtttacattatatggaattaaaaaagataaataatggctaaaaactccttaagtggtcggtcttgtaatgggccccactgttggaacttattttaccaagatctagatttactaatatgtatgtttgattatattctataatctaacaccctaaacatgaatttcctaaaacaataaaataaccacatataaagtttaagaaaatcttacattggtagtagcaaaatattatggctcattctgttcagatctctaaatcttgttcctttctgtcacagagtaataacaagatctgaacttggatctccttcaagtgttagaattcttcaccatcttctacactatgattgagtactgacttgatatgagtgggcatgcactctatcactatgggttcaaaattaatgaagagaagaatgaagaaatttcgaattctatataagagaggatctcgatttctcaattgtctgacaaagatagaaaactaagttattaagttatgacaatgagagtcatcttattccttatataagattttatctagggttaggatttaaattatatggaataaaaaagattaaataatggctaaataatccttaagtggccaatctcactagtggaccctactagtttcaattttcccattttatttaacaatttatcttttcttttactaatgtcatattttaatttcaatcttataaatttcaaatctatttatttaataatta

SEQ ID NO: 26846 - DNA, 4583 bp, Cannabis sativa
  modified_base (3350)..(3363): a, c, t, g, unknown or other
  modified_base (4534)..(4535): a, c, t, g, unknown or other
atatatattattcacataataataatatatattaccacattttaatctacatattattatattaaaaataatataacaccaagtactcttcggccgatggtttatgttcttggcttcaaccctggtcatgtcagtcgcaggtgccacctacatgttcggacttttctcttcagatatcaaaatattactaggctacgaccaaacgacacttaatctcgtaggcttctttaatgagttaggtgccaacatcggtgtcgtttcagggctactcaacgaggtcatgccaccaagtgtggtcctctccgtcggagtagtcatgaacttctccggctacttcatgatttggctcgccataacagccagaaaacccaaaccccaagtgtggcacatgtgtctgtacatttgtattggagctaaagcctaactcccagacgtttgcaaatacaggagctttggtcccttctgtcagcaatttccccgaaaatagaggatgtgttttggggttgttgaaaggctatgttggcctaagcggagctatcataacacagctctaccatgctttgtatggtgataatactaaagctcttatcttactcatagcttggcttcctgctgctgttaacttcgtttttcttagaatcattcggataattaagatgcctcgacaaccgaatgagatcagagtcgtctataatcttctttatgtttctcttgggcttgctgggtttctcatggttttgattattatacagaacaagctgaagtttactagagttcagtacgtgggaacatctccaattattgttcttctcttggtttttttacctctggccattgttataagagaagagtaccgtatttggaaagccaaaactactctgcctatgcaagatgtgatcatacctcaaaataatcaatgttcggttcaattagttgatgtccactctagtagtgaaggtgttagtgaagaaacttcacaagaagaaggctcaagttggtgtggaaacattttcaacccgccggagagaggtgaggactacaccattttacaagctcttttcagtgtagacatgttaatcttgttcattgctacaatctgtggtgctggtgggactttgacactgatcgacaacttgggtcagataggaaaatctatgggatatccaactcacagcactgcaactttcatctcactcgtaagtatttggggctatcttggaagagttgcttctggctttgcttctgaaatatttctgactacgtacaggttcccacgtacctctatgctcactttggttcttctttttgcttgtgttggccataccttgatagccttggcagtcccttactctttgtatttcgcttctgtgattattggattttgttttggtgctcaatggcctttgatatttgcaattatatcagagatttttgggctcaaacactatgctactttgtacaatttaggtggtttggcaagcccagttggggcttatatcctcaacgtgttggtagctggtcgattatatgacaaagaagctttgaaacaattagaggccaaaggtctaaaaagggaaaaagatcaagatttgacttgtgatggtgttgagtgttatagaatggcgtttttcataatcagtgcagctgctttttgtggcagcatggtgtcatttttttcggttattagaacaagaaaattctaccgaggtgatatctataagaaattcaaagtaggcaccacgagtactactactgctgatgatcatcaatctgatatggttaagaagaaaccttcaaatggggtactgaattcttcaagttcttccacataaattcatgagtgagttggtggttactaaactcaattgttatagttaattaaatctgtaatgatctctcctatatgatgatatttataccttctttcctcctgcctatgttttttttattcgtttttgtcatattctagtgtcacttgtctatatattttgtccagtaactcttcagcagcctaaatgcaactggtccatgtcgtgaaagatagcacattcagtagttctagtcaaacaagttctatattcataatgagcttgatttgattgctttgacactatcaaggtatcacaattcttcactatattaaggtcacacaattcttcacagttttattatgagttggttcttgcttacatgcctcaaaatcttacaccaataaaagagtcccctcctgcctattctcctaacatttgtttttaaaagaacaactcaaacagaatgcaacatgtgttgatatgctatattccaacaaattagaaaattcatcaagtcgatacaaaacatttatcaatttcttaagtgtcctagaaagaaaatcatgatgtttaggttgacaaggtccttttaataaatacattcacaaatacattcttcgaacttggtctcaaatactagcttgtatttaaatttaaattctcaatctagaatctgtaggatgttttgcaaaaagttatcgaagattgatttctgcactttagattttcattgtctccttttagagcggaagaatctgatttctttttagttttatctataaatgttcaaaagtaaataaatactcctacacaattctaaaattgattaagaaaataaggatgaaactggtttctttttaattttaataacctatttatgtccatatttgttaaaaaataaatatatactcctatacaattccaaaattgattaagaaaatttccaagaaagaatcagagacataccattttttttcagttgataggaaattctaattcctaaaattgatgaaacaattaattagagaaagaaagtaaattagctaagaaaataataaaatacttaaaacaaaagaaaaacaataattataaaaactaaataaattaaatactttcacaatttttttttattttatttacagaaaatacgatctttttatgttgtacgtttgttaatttattgttgattttttgttatatgtatgttattttgatgttactttttctattatttttatagaaaactgtagaaatatataaaaaaaattattcaaaggtaaaatataattttttataaatcattcaaattgtacaactcaactcttcttagtacaataatatagagggttggttgggttaggctcattgggttaagatgaatattttatgtcataatatttatattacaaacatgataaaattatggctaactacgatttttgccccttaaattttgacatataccaaattatgtgccctgaacttttctgaccgttaaaaattctccctagactatagattgttaaatttaagaatttnnnnnnnnnnnnnntcaattttactaattcagtgattgtttatgtactaaattatgatcctcagactttggtatctaccaaattatgtcccacgaattttaacatgtaccaaatcatgcccccttaacttttatttatttgacttttcttattaaaattggacaaaagtccttaaatctaacaatgtcaataattcaaggtggatttttaacgtctttaaaagttctgggcataatttggtatatgtcaaagttcgagggacaaaaatcataattagattaaaattatttaacttggtgcatacacaaaaaaaaaaaaacgatacatattaatttatatatgcgtgtatgtaaatataaggcgttaaaaaaaaaaagcgaagatggtagtggtatcattgtgtggatagcaaagataataatagtgattgattctcatattaagtttattagtagaagtagtaaggcaactatggactacgtgttaatgatgtgttttggtcaattcactttttaaagttgccacaatataatttattgatgaaaacataaaatatatatttgtatatattttgtgaatgtaaaatatattgcatgtatgaaagttgttttaaatttagagcgtctctcaagaaatagattggattgggttatatgggtttgattggtttgagatttgaaaattgtgttttctaaaagagtgttttggaaacaaaattttgaattttgtatatgaaaaattatttttaaaaatgtgattggttgtagtgtaattttatctttttatgttttaaaattttggatttgtgattggttgataatctaaaaataaaaaagtaagagagtatttgaagagtttttaaattgaataatttgaaaatatagaaaacataaaattgttgttttcattttttagcttaaaactcaaaatcatgttcaaaattagtttttgaaaacaccaaaccaattaagtattctaatgtggaccctcactttttaaattttcaaaaacataaattttttttcaaatctcaaaccaatcatagagttaaagtgtgtccaacccataactaactcataattatatgacctatcactttttaatgaatcatggcctactcttaacatacatttattggacaatattgtcccacatggattaaatgtgaaagtattgagccatatnnaagaacatgggctactccactcatcaccaattggttttgaaatggaac

SEQ ID NO: 26847 - DNA, 2888 bp, Cannabis sativa
attggttagctttttccattttaaggactaaatttgattcgttctaagtaattctacctataattgaagatgatagtaattctacctataatattattggttatcactcccaaaagtaattattaaaattatcacaaatgttcatttgatcattttttttctcttgtttcttgtttttttttttttgttttttttttaagatttagccctataatgccaattaataacttaataagtattaaagattaggtcaattttcatgctaaatttagtatatataattatatagttacacccaagttgtgtacatttaataatggcttgattatgtattagtaattgtattaatttgtggaaccttagcacaaagtcacttgttaattaagctaaaccgtctttaaaatagttctataaataaataaataaatatagcacatgacctaagaagaattgttcaaagtattttattaaattatttcaaaaaatgtatatatttatttattttttttttccatttcttttttcttccccaaaaaaatactcaactcacaccggcgatatttatttaaaaagaaactgataatttattttaatgcaaattgagaaaagagagtcaacttgtaatcttagcataattaaatgcccaaacacaagggggcattttaataattttatccccaccaacttgcatctcgtttttttctttaattatttgacaattttcttattattattttctatttttctaatataaatatatatttatgtaatgttactcttaaaatagctttgtcgatgcacattatatattttggtatttaaaagaaaaaaaaatcacattctgtagaattttgaataatttacaatttaaaaaataatgttcaaacagtatattttacacacgtataaaataaaagactcacacgtaatagtttaaaccttattttaatttgacatgctaaatttttcttaattttttaaaattttaaaaaatatcttaaataactataatatatacataactataaaaataattggagtttttacactacgtatttaactgtttcactattgtcttaattgttctgattattttataaaaatataatatttttgttaaaaaattaatagtaaaattataaatttttgtctaaaatttaatattttgtaagaattcaaaaataagtaaactaaacaaatcacttgtactatcaaaacagataaaaataaatcaatacactgtcttaggtgcattataaaatttgtagtatatatttctatgtataaatcttcacctctaaaaaaaaggtccctcttgaaaattggaaagtgactaacccaactctctctctctttcttctttgctcttattttttttttcatatatatatattaaaaaaaacaactcaaacccaaaacactatagcttaaaccctcaaaaaaaaaacactctcaattttgagtatatattttgtgataatatatatataaagaaaagaatatcagagccaagaatcgatctagatcacgaaaatgccagtgaatccgccgaggtcggctctactcgttcatcgaatcaacggcggcggaggaaacatgcaaagccaaagccataatctcaagagaaggtcgccggcgataatcgcgccgttacctgagccagtggcgcgtcaccacacgcacgagattagagcggaccagtcatgctccgctgtaatccaagagatcgccgcaccggtctctacagtctggtcagtcgtcagacgattcgataatccccaagcttacaaacacttcgtcaagagctgtaacgtcatcgtcggcgacggcgatgtaggtactctccgtgaagttcaggtcgtttcaggtcttccggcgaataacagtacggaaagactcgagatcctcgacgaagaacgccacgtcatcagtttcagcgttgtcggcggcgaacacagactcacgaactaccgatctgttacgactctccattcttcgatctccggtacggtggtggtggaatcgtacgtagttgatgttccgccggggaatacggcggaggacacgtgtacttttgcggacaccattgttagatgcaaccttcaatctctcgctcagatcgccgagaatatcgcgaaacgatcagccattaacaagtccaatatctcatgagtaattctccattttctcccccaattttcatctaattttgcaaatcaaaaatcataatcatcacttcatttatatttttaataggttgcttcgttttgtctgtattttggtcatgatacgccgtcgtttcgtttctcctggaatcgccattcaaatcggccacgaccaagaatttctttcatttttttttttttgtgtaattaaaaaaattagatgaatatttatgacatgcataaataatagtcacattaaaatcactacattattgttattattattaatttaaataattcgtgtacgtaaaatctggaccgttggatcagacaatggctgtggtctgaaatttaattcgttgcttaatttttatgcttaagagttactctaaaatatctgattagaccgtcgagtataaaaataaagattattattattattattatgtcttaattattattttatattaagattaagtagtaattaaaaaattaaaatagtagaaggaagaacgtggggatgggttgctatgttattgttgtaagtacttgagattgtttgtaccatatttgatttgtgtgtgtggttttgtaataatccattcataatataattaaattattttattggaaaatatcgaatacttgaagtaggtaaaaaatagtcttggccgtattgcatgggggctatggaagaattatttatttatttattttggtatt

SEQ ID NO: 26848 - DNA, 2509 bp, Cannabis sativa
catgagcagcttggttagcatctcacttaacatgagatacacaaacagaggagagataggataaacgatttttaatatccaaaactaaattaccaaaggaagatatagcagtagattgacagttaatggaattaactaaaaccagggaatcagattccaaatgattaaccgacaaattgtgatgagcagcccagtctaatcccgtgagtaaagctttagcttccatttcttgtgacttgtatctacctgtgagaggcttcgaataagccgcaacaacttgaccaaaagaatttcgaacgataataccaacaccaattttgttacgggaaacatcacaagctgcatcaacattcatttttaattcatgcataggtgggcgaagccatttagactgtgtagccgcacctgtggaaaccttgggtgagttctgaatagtagaatgctgctgaaaattgcagtaatatgcagcaaatttcgcccagatttttgatggagagaggactggtttgccatgtatgtaattgttcctgtcagtccataaaaaccacatcgtgcgcaacatttgttccatttcagtagtggttttaagggtagatagcaaaaccagacaatcattgaacttcattcttgaaatcacatcataatcaagagggatactagcagaatgccaaactttcttggcatgtttgcaaaggaacagagcatgttctacagactcccaggcattcgagcatagactacatgctgcagaatcaataatctttctattgcatgatgaagcagcagtaggaatggctcgatgaaaagctttccaaacaaatattttaactttggatggtagtttcaaattccaaaagtatttccaccatgtgtgctgagtagtagaaggagtagaaagctcggagtcttcaaggtcatttgcaaggtgataacccgtttgaacggtgtactcacttgaattagtaaaatgccatatccattggtctgggacatgagatgaagatagaggaatggagagaataaaatcaatgtccacagctgagaagtcacgtgtgagtagttgcaggttccattctttgtccttggtaatatagaaagaaaccaaattctgggggtctcccgaatagtggagaggtgtgaattcagaatgtctaggaattatttcacaaatacacaaaaataacaaaaaaaagttataaaaatataattttacggaattttaaatatttttacaactttatttatagaaaatacggtctttctatgttgtactcatgttaatttgttgttgaattttattatttgtaagttattttttgatgttgttttaatgttatttcaaattattttatattttaaacctattcctttcttctatttatggattgtgataggttgggtattgtaaagacaaaatatgataaatagggtacaaatcctttcagaacactttttttttttttttttacataaaaaaaaaaaagaaagaaaattataaaggttgtaaaagtcatgttagtgaaaataatgatatttttggaaatgatattcctaaaagcccaaacccaaaaatccactcaagcccaaactcaaacgaggttgaccgaaacccaaacccaacacaaacagtccgaaatcatttatgtattatcattcaagaaactctttttcctcttctgcaaaataaagaaaaaaaaatcttttcctttttctttttttttttttcttaacattcaagaaattctttgttaaagagaaataatttataagtaataatggattttgtgttttcagaaaacaaaaaaccatagaacaatataattgtgtcgaacaaattaaataaaattaaacttagtaaataaattttgaaaaaataacaataagtatgttatataacagtgattccttgattaataaactcgtcaatacaaatttgttaagcaatcaatgtgaacgataattttataaaataaaaaaaacgtcaataatgataataatgatttctataaaataataataataataaagtacagtaattctgctgaaatttatcattgattaacatatgtattctctcaaattaaaaaaaaaaagtaatgaacatttcataactaattaaattaaattcataaatcagttcctaaatagtgactctctgttagggcttgcttccctgttccgaccttctcgtttcgctctcttcggaagagccttcccataaaatctgctctcaaagcctcccatccatggacaatctcctcgaacgcactcaccagttgatgcttctcgatgcggaaggatgggaaatcaatgagggctcgttggctaattgcactactacaaaaattcttattcctatcagtccttaagttggttttttttataggaccatcgctaataaaattatgtgacggtttaaaaccgtcgactataataggatattcccgactgttttaaacaatcgtaaggaatcctcaacggtttaatatagtcacttaaaaattagagg

SEQ ID NO: 26849 - DNA, 1341 bp, Cannabis sativa
aaagctatgtctacttgcaaataaggataattaattcatgtttttgctcacacatttgtctactcaagtaggtctgtagaatcataaaaagaaatcagaatggaagagaataaatctaagatattttttattagtcaacaattcatccaagaaacaaactagatgttcctcttcaatatttagcttctctttttttttttaatttgaatttattgtggttgtaacttgtaacaaaataagaaaaatccaatacgagcttccctgtaaataagcgagcctaaatgtaaaacgctttcaatatacaaaaattctgctgaaaagtgagagagatcgataaaagacacagtagaagtagataattctttgttgacaagaaatcatgtcaacagagcggctatcgaattcaaccaggagtcattgtttcttctcaactattctatttcagatttctaatgacactcattctcagattttcttctcactttccctagtcttaaagttattttctattctaatatttggtgagaaagttcaccatctatttgggtcctatcaatttggtaccagaaacttttcttccaaagagaaatggcaattagcttactctgagcaaaccatggcagacctcaatagcaagctggaaatggtgctttaagagcccaagcaagattatcaagaaatgaagaaagaactctctggtttgcatgaacccatcaagttccttcccaacttgaacaaagcctctttgcaatcaaaatatactgtcctactcctactcctatcataatgctatgattaaatataagttgccatcactactgtagtactgtgtagctgttcatgtataggggtggaaagaacagcatatgaaatatactggttagactaacaccaaaggggtcagcactactaaatcaaatgaatgtcaacaacccattttgtaaaatcataattaacactgccctaggacaaaggtatattcatttttctaatcacatacatatacgagaacttgaagaacacaaccctcacgtacacacacccaacacaatccaaagtgtaaattattagaaaaacacatttcccacgtctaattcttcccaataaatcaaacaagaaaagaggcactcatgcagacatttcatcaaacatattaaacgcataaactcaatagttacacaaacagccttgcatttccagggtttttctagttaagataataggtgtaagaaagaacaataataatggcaatacaagtttaaacacagtacctagttagattatagcaaaagtctgaaagaattaaggaatggatttcacttctgaggcattcgcttcgtc

SEQ ID NO: 26850 - DNA, 2589 bp, Cannabis sativa
  modified_base (2533)..(2544): a, c, t, g, unknown or other
ttacacaattatgtattattatgatagtcaaaacattgagaaagttcgtagtcatcacatatgtgcttgatggtgtttgaaaatttaaactctaataaagtgtagaaaagtgattcgagtaagatagtagtgttatgcatacaaaagaagaaaagccttaatgggcactccacttttgtatctataaaatcatgatccttctttgcaggtatatttatcttggattattcgacagcgaactagaggctgcaaggtcctcatttgttcatgaatatatttgaagaattcaatattgtcctctaatattgacaacattttctttttaactcgatagaataaaacacattatgcctttggcttggcttttgtttggtggggatttaatccaacacaagttttttcctttatctttgtttaaattcagggcttatgacaaagcagcaatcaaatgtaatggaagggatgcaattaccaactttgagcatagtacttatcagggtgagattattttagacaccaatgcacaaggtactaaatttaatgactttatagctaaagaagttattatctagtactacaaatataacaattaattcttctgttgcaaaaatgcaggcaatgaccacaaccttgatctgaacttgggaatttctccaccatgtgatggtccaaaagggcgtgagtactcttttggtcttggggatactcgtgttcattggaaccctcgtgaaggacctcacagaataagaccgataatggtacattgattttaataataggctcagtttagaaagtgcagttttctttcctttctgatataaaaactaaaattagtatccactactctcaacagattgatgggcagtcatccccacatattctacctcccaaccatgctgcttcagctacatgttcaggagtgtatccagccttcttaccaaaacatgaggtactttctttcgcatcatcacaaactcgccaaatacttaaagttgattatctgaaacacttttttgggagatacaggagatgagagcaatggcagatgatcatcaaaagaggatcgaagccgccaattcttcgcagggttttttgaactgggcatggaaaattcatggcaatggtagcaacactactactactactacatctagctgtgtaacagccatgcctactttctccattgcagcatcatcaggattctcatcttccacatctttggctgctctatcagctaccaataatataaatccccaagccaattttgttcaaaataatatttgccttagtcctagtatgcccattaccactacaaattctgtcacaaacaattttcacaactcacaaattcatagaggctaatcatcaaacaccttgaagaaaagcaagatgtgctaaaaaattaatattttatattagatgtagttctgtattatttgtactacgtgtaagagattttttctttctttctttctctgaatgcctcccttgtaatatgccaactattttattgatcactgattttgctaaattgtaatgtaataatatttcttcattgtaatcttttgtatatatagattattttcttcaaaatgatcactttctttatttgtattttttttcgttttgaaataactgtatacaatataattattatgcagtataattaacatagtaattacatgaaaagcattaatatttagcatcttaaggttttttttttttttttgaaaatggaatgctgtattaagaagagcaatcgctcctaaggatagacatcaaatccataggcacacaattaaatggaaacatacgttcaactaagatacgagagttccgggcaataaaatgcgcggctctattcacagaacgcttaacaaaaacaagtgaaacatgagacaaattgttgataattttcttgcattcatccaccaccagcccgaatgcagaaacaagaacagcaaagcttcggatagcctccgcacacacccggttgtcagcttcaatcaccacctgggagtagtcgttcgttttgatccaactcaaggcttctcgaattcccataacctctgctagctccggagaaactctccctattttacagccagcagtcgctgcaataaggtcaccgttagagtttcgcattacacacccgtaaccgaatttatgatcttggtcgaagatggctgcgtctacatttaactttatgcctgaagtcggtttagtccatagctacgcaccatcaccctgttgaatgggtgacaacgagggaatgttcccctttccttgagcttttaaccattgatcaagtgttgaattcgcaaacataaccacctctctcacacttcggatacgttgcttccagatgatatcgtttcttgctgaccacaaagcccaacagagcatgagcacacggctcccagcatccccattacagagctgcaaggttccgtccaaccaagcataaagagaaggagcctctctaccagccatagcaagaccagaaaattgttggaaatttttaccaggatcnnnnnnnnnnnnacaagtatgttgattaacaccttaaatatgaactttctaaaatga

SEQ ID NO: 26851 - DNA, 4585 bp, Cannabis sativa
  modified_base (1157)..(1173): a, c, t, g, unknown or other
  modified_base (2205)..(2212): a, c, t, g, unknown or other
catttaattaatcatttaattaaataatcaaactggaaatattaaaatacgaaatttcactatatattccttgaacatgtcatacaaataaatctatatataaaggagcactatcactaatatttatttaatatatggttgagacttgagagcactattttataagaaggccaaaggaagcaccctcaaaataataaaagaaaaagtttcaagtcaatgttggttcttgtgataagaaaagagaacctttaatgcatatatatttaaatataaattattgcaatatataatttaaggttttcttctccttcgaagcaacacttatcattgtttttctcccaattcaaatatgcatagacctttatatatataattacacatatttatatatacgtgggtgagatgcacatatagaaaagtaatctcctttacactcacacacacacacatgtgaacattaaagcataaattatgttaatattccatattgtatatggtaaacacaaacaaaagttgcttcaatagaaagcaaccccaaaaaaagaccaactcccataaaaataaagattatatatatttatataaaggagatgtttttattattagataaaacaaaaagctctacattataagattataattacaacaaagtgcaaagacaatttccactgaacaacatatattactcaaaacacaataattgcagcctttgacgtttctttcttttgtttcatttattaaataatttatttattcaatttaaaagtaaataaataaattttattttccttgaaaccctctttaacacccacacgcaaactcctttgaccctcaagaatgcaaaagggaaagatcacacagccgcaatttggcttacgaaacccaaacttttctctctataatctccttttatttcatttcatatcatatccataatatactactccaagttatacctccaaatattatcatgctatttatttcacctgtaattcatgttttgcaaatattaaagcttgtgttttgcaaaaattattaattagatcttttgttttgttaaataataaaataaatcttatattttttaaaataataaaaatatgacattgaactcaatttttaacaattttattctttaatataaccaactttaagannnnnnnnnnnnnnnnnagatacagaaaatgtaactagttttgtcctaacatttttagattagattattattaagtgttgttttgacaaaaaatcaattcatggtcttatttatacaattttaaaaaatataaggttcattttgtcatttaacaaaacaaatattttaattagtaacttttgtaacgcagaatttaaaatggtatttaccaatctttattttacctgcaaatttatttttcaatttttctagcttgtcctaatccatattcatttatggattagttgtacatatttttaggttaaaaaatttgtatagatagaagattctttcctattaatattttgaagatggatgtagtatccgctaattacttggtgcataacaaaaattttcaacattaaaaaaaatgtgtaagaaaagagtttcctttccccaaaggctacggaatcaagcaaattgtcaatgtttgaggctccagtttaactaaatctcaaccgtcccacgttaccctacccccacttcctacttttaatactcccaaaatatcctctattttcacttttatttacaactataccgttcattttttaaccaattatattataattactcttctaataaataaataaaatttaccaattactattttaagtcttaatagttggcacgccaccaaacactgctacaaagattgcaagcaagcctgtgaattgtgaagctacttcaatccaaataagtcctattctttcacatattataacattagatttaagaataacttcatttttataataaaaaatatatatttttttgcagttaaaaacctaattaataaatagttttaaatgagtttttgtttggaacggttttttatatataattttaagaatttttttctttctttcttttttgggtaaatattatatcagattccgtattttgcaaaaattgttaattggactctttattttattaagtgacaaaatataccgtatattttctaaaattatacaaataggactctgaactaattttttgtcaaaatnnnnnnnnataataatttgatctagagatattatgacaaaactggttatattttctgaatctgttcgtgctagaaattgtcttaaattaaagttagttttattaaaaaaaataaaattgttgaaaattgagttcaaggtcctatttttaccattttagaaaatataagatttattttgtcatttaataaaacagaaggtccaattaataacttttgtaaaacacaatttaaaatagtaattactctttttttttataaatggcaaggaatttatttatatttttttcttaacaaataattggttgattttttttagattcaatagtttgttgaatttattgataattaaagaataatatagagaataaattggaaagagaggggcaaatatgtgattacaagagatgagattattcgtttattaagaagaaaattttgcaatttgatccaaaaaaatgagacaggaagatttgctcaatcttggagtgaaggtggcatttttgtcagttagcataaatccgacgtgggtgcccgtcgttttgggagcaagtaggtccctttatctttattctctttacccaccctcccacgagactacatacacaattactaaaatgcccttttccctcctcactagtttagttctaccaaatatgttctttttccacaatattattattcattcaaatatcccaaaaaaacaaaagaaatagaaatagaaaaattgtcttttgtcaacttcatatttattcaatttctctaaatcttaagtgcaatatcgtttcgtttgtaagaaaaataatctaatgttcacttaaacacgcatcccaatgcgtgcaccctattatgagctccattaaatatatattggtccccattttatttttatttttatttacttaaattattttagaaaaaatctatgatgaacatttaatccttttctatagtgtaagattatgtgggtttttttagtagtctataaaaattgactattggttaattgttgtaaatgggctagctactaattataaaaaaaaaaatgtcggaataatttttaattaggtttgtttagttttttttttctctccaaagtttataattaaaatttttgtttcattatttaaaattattctcaatgtgattcttcctttttaactttatttattagtttgattttgtctagttgcaaaactacacatagttgatattagtaatcctcacaatttaataaccttttaattaggaattaattaaatttaataattttttttgttctttaacatgttctattttacttatttataaataacacatcacacactacttatgttaataataacaatatgcaatttaatttaaacttcgagtaccaaaataataataataaaaataaatatgtacaattttgaactctttgatttagagaggagtattgctattggacattaatggtgcctactacctctaaatatatcgtcttgcaattagctagcaatattctttaaaaattattatattaaattatatgactcaataccaatagcaatattgatatatagaatagtgatggacaccactaatgtcctttaacatttctctttaaaagggtcacatcactgatttaattagttgttattgctagaattagtcctcgtcgagtgtcacctaaaaaataagtttaatataattatatatttttccaaactgcaccattgtccattttaaggagtaaccttataagagtcaaaaataaaaataaaagtatccataatttttttttcttataaataatcacggtttgtagttgtagctcttaaaaagtttaaatgcattttgaatgtgttaactaacttaatcgagtgagttttccctaaagtcattaaattcattatgttatgccatgccacgagaacaagttacttaggtttttgtctagtgagggtaaattatgcaacttgttcaaacaatgaaatcatttcatggaaattaatctttaaagtcaatcttgtataattgttttattttatcatgtgcttaattcttatcttttaactcttgtaagaatgattgtattatttattattaatgtgtgtgtttatttattttatttttttcttgggtatggttatttattataaatgttgatacagacaatttaacaatgtaatttttattggaccgttatttgtttctaatttaattaatttcaagaggaaaatagctccaatctatactcataagcattccttgagacattcaatgctatttaaggcttgaattaactgtatgctttaaataaataaataaaacttatgttatatatttctattatctccttcataagttctgtaagagtactgaaactcagtactcaagat

SEQ ID NO: 26852 - DNA, 2678 bp, Cannabis sativa
  modified_base (2596)..(2605): a, c, t, g, unknown or other
aacaatctcaatagttcggggaaaatttctaacggccaaaaaaattcagggacacgatttagtacatgtcaaagttcagaggaaaaattactaatttatatacatatagatacatctgtaacaaaaattatttaaactttaattaaattttttaaaatttcttaaaatttacaaaatatctcttaaataactatacatcatgatatgaaaaaattaaaactaaaaacacaaagtgtgtataatttttatatctatatttatatatgatcatcatccccgtaatgtcacatttaatttaattataaataaataatttttgccatgacaatacctaccttacgcaatatgcacacatgcactacccaaaatatattattgtaatataataaggtaaataaattatttaaatatttaaggtgagaaaaaagaggccaacactttataacatataacatataacatatataatatataatattattaaattagacgtacacattaaatggttaagctccctaactatcgtcttttgcaatcacaagcaaacataccccactctctctctatatatatagctatcaatctatatttatatatctatatctatatctatatatataatctatatatacatatataaattataaataaaaccccacttgcatgtcctaccctttctcctcttttatggtttttgtacctatatagttagtttgatgtatttttttttattattattataattgacatgttgtatgtgtaatgacatttttatttttctatttaaaatttttgtactctcaattttttattctggtttaaaatagttcttgatattgtaaattagttattttgttaaattttttcacacatgacaaacaaaataataacagttgtttaagtaactgatagtatcacgtatgtaattattttaaaaaaaataatttaatttttttttaatttaattctacttaataatattaattattaattaatttttaatttattaatatatattaaaaatacatatttattattattcttttaattttaaattattacgtggtgctaatgtgacaactgactttccatgtatgataaaacttgataaaagattcaatttacaatagtgtgaatagttcaattatcttagatagtttttttttattaatttatttattttgatagaaacaagagttaactttgctaacatgacatatgtgtggtagttagaagggattaattgaagatattgatgaagctatttaaaaccttcaaaaagatagaccgatgttacttcgaaaatagaaactactataattaatataatatatataaataaataaataatggacttataataagtttttataattaaaacgtagacttttaatttttactaaaaattaatagagcaaaaagatatgtagatatatttgaattttttttcaatttttactagatgcacacttatttgtttcggtatttaggataattttttagcctgtttttatttttatgatcgtatacgtcgtaattatttaagatatttagtaaaattttgagaaatttaaaaaaaaattaatacgttataaacaaggttcaaataatttattgtacgcgtaattcttttattttataatcgtatgagattgaatatatgaacattgttttatatattgtcaattattctgagtatcttaaaattttataagatgtcttaataattataatatacacaattataaaaaaaattagagtagaaaattctcccgaataaataaataataatatataagtacactttttttttataaaaatgtattgtaaaaataccttatattttttttctcataaaaaaatatatatcatactaaaaaaatacaaagtttaaaaaaatataatataaaaatacacaattgctatatatgtgaaattaattaatgattgtgctgtgtgtatggccattttttttttttttttgtggttgctttgtatatttatagctagtatagagagatgcatagtattgtatttaaataaagtggggtagctaaagtacgtagggaaaaggttatttaatgagaaagagaaatcactactaacaatttataacacgccacattggaagagatttggcccagggctaaggcgggttagactcgtgcctaagacccacttaaattcaagactcaaaatttttatatagtatattactatacttttatgcattgaaaacaataatatttttgaaaaaatttgtaaaaattaaaagaggctcaataatacttatattttactttagataaaatacacatttaatttttttttttatatccattattactcgaagtcggccctgtattgggttgatgctaattgtaacgcccgtatttgaaatactaaatttgcgaattaactttaatatattataattacttaactataaagatcaggatcccgagttataaaacatagttcaaaactgtatttgttattacaaaactccttgagatttttttcttttataaataagtacagacaacacaaaatacaacactcaaaatattgaaagaccgaaaccctccaggttgcnnnnnnnnnntatgtacaatcactgccgagctccatctcactgttcctccagcttaacctttcatttacctacacaaggtagc

SEQ ID NO: 26853 - DNA, 2801 bp, Cannabis sativa
ttaacaggtaagaaatgtgctgactttgtaaagcgatctaccacaacccaaaccccgacctagacccagacccctggacccaaactctggacccagaccccgaccttaacctgacctcgaaccttggactcagacctccagcaccgaccccggactcggacctgaccccaatcctggcctcagccatcgatcccaaactcgacttaaataaaattaacaaatgaaatttacagaacacattttttttaattaaaaaataaaaacgattatagaacacatttttatttttttttaaaaaaaataaattaaaattttacttttatttttgtaattaaaaaatttaaaaacaaaatattaccaaaactttaatcagtgatatttaagaaaaggatatgtttaagaataatcatacatatataaaagtttcaagctctagaagatattggtttttcaatgttattaaacatgttatataaatatgattaacacctcaataaatccattttttatacagcaaaataaaataataaaggagctagcatatcaacttatcctgaacggcaagttggggaaaaatatgattaacacctcaatatgtgtcttatgctttgtttttcatgtcttctatattatatattttgtcttctttattaatcttaaatactaagctacatataattaatttacatactacttttccttccctatttataggtaccatttcttgcatgctaaccaaaccaaaccaaaccatatataacaattataattattaattcattccaaaatgagtatccatagtactcatagagttagatcaattgtggttttatttgttttatttggtttggtatttggtactaatgcctctagagctcaagattatggtaaaactcctagtggtgcagctagctttggaagtggaattaatggtgcaacagaatatggacgacgcagtgctcggagcacaaccgaaagtgtagtcggccaaggacgtagtactcgaggaaataatggtggtgaaactggtggaaaaggtagtggtactagagcagaaggcggtggagatagtacgggaggagatgatggtggccgcggtagcattggccgtattgggtatgctactaaagatcaatatgcaattaactatagaggtactggcgggcagtagccatggtggctatatggttcatcaaataaaaatttgtgtattaatttcactatagagttccattcttactcattaatattatggaagtttatgtagtatgagtaggagacctattatattatatgagattaggaatgtgcacctactttctttctctaatcgaatatacatcaattaagcattgctgcttatctacttttaatgaatggttctctttgatgggttgattatattatttgtttattgcttgcaattggttgtcctaggtaagatagattgggattttttttaaacataagaatcggagaacttttacactttttcacaataatagtaccactttttgacaagaatgtcggatttagagtaatcctccagaagagaaaaagattattactataaattgataagtgaattaatatgtgagatcttgtgtgtcaaacataatctcttgaatgttaaacaataaagtttcacactcaacgattcaagttgcacatgaagtgtgtttaagcaagaataaaccctttaaaagttatggaatgacactcttatctaaaccaatacataaaattgcttctagtcctatatcttttcagttaaactatataattttaaggaggttggtattattgaagcaaagaagtgtggagtgtctcaatgttcctaagcatagttttgtgctttggatagcagtttaagatcactgatgaagcgaactgtgtactgtgtggctctgttgcagaaacaacattgcatttggttgttgaatgcaccttcttgcaacggtgtttgcagaagttaaggactggcttatatggaaggcaacaacctcttctttacagggtattttgaggtggatagagagatcaaaactcagcaaatttaagaaggaggtatactctgctgctattgcagcacttgtgtacataatttggtcgaacatgaatggaaaaatttagaatgttgttgtggttaacccgagtaggttatagtgcaggaagctaaggcactaatttaaactagaatttcatgtgtaatgccaaagaaagtacaacaacatgatgttacttggattggaactttgtaataagtaatttttagttaaagatatattgtgaatagttggaaattgaggcctcctttcgtggggtgctcttacactacaaaaaactgctattttttgtgacaattttgtagtcacaacataatttttgtttgactaaatgtgacttttagttacaacaaaatgttacgtgtgactaaagatacatatactcacaacaaattgtaatttttgtgattaataactttagctacggacattttagtcataacataagaatgatgatttataattagtcacaactttttttgtgactaaaagtaaatttttttgtagtgttagcttgtacaaaaattattatttggagtaatgaatttcacaactgattcataaaaaaaaggtagataattttataattaagcataaaaaaaggtagataattttataatcaagctttatttggagtaacatctcttttattacacaaaaatatgatcaaccaaaagaagttacaaaagcaattaattttgtaactcctcctcatgttacaaagtgtaggttata

SEQ ID NO: 26854 - DNA, 1668 bp, Cannabis sativa
aaaagattccaagtacgaactctcaaactcctatttggttccccataacaaccagtcagcctccaaatgactccattagaattggtaatttggacatcaatgtaatcgtgaccatatctaattagagaaacctcatctttattcctccaaagcatagcaatcccaccactccttccttggacatcacaagaaaaagcaccttcaaactttagctggactctaactttttcaatgctatcttttcgactcaaagtttcacaaagaaatacaaagttgggcttcttttggactaaaaggtcctataggaattgtcgccagcccacgacaattccaactaaggacactcataatccttggtgggcctgagaaccaggacccaccaaatacccgttttttgaaactgaaccatttccattataaatttccacctcatcctcttccattacttccttgcctgccacctcagttcttctacgttttgaatcaataatcattagagcttcttgctgagggttgactttgtacactgcattcttacccttcaatgcattaaccccctgatgactaatatcttcagtatcacaatcaatttctccatgatttccgccatcatgtgaatcaaatccccttccacgattagctccttccaagattaatgtatcaatccccctattattgttattttcaaatgctaattcctgatttttggtgatcacattaacagcctcattcaatggttcatcacttccgtttacaccttcatcggagaactgggaatccgcagctgtccctgtcctaagccaccgagctcctatcaacttgtttttcctttgaggttgagccttcatccacaaaccataaggttttcctatcagttccagcggggtgtcataaatccgagaacaaaacctctccgaatggccaataataccacatatgaaacagaacgtgggaagaaattcatatttaaagttcgtccacagccactccccgtctgttctcttcaatttcattctccttttcaatggcttttctacatttattttggttctaacccgcaagtaatccctccaaatactattaaagttctttgaatctgatttgacataagaaccaatgtagttaccaacattttgaaccaccatatcagacataaacccaggccaaaggttatgtagctgaacccaaatatccagacgattcaacttcatggtgaaaggatcatcaccttttttcaatcgttcaaagaccaattggaacttgttaaaagtccatggactaccatctgtcaccctctgtatatcagtctcatggtaaaactgaaacaaatacagattagtctgaagttctttcttaaacataccttttccaggctgccagagagaagccattgtatgctgcattgacagaaaatcaatgaccctactcgttagaaactttccaaccaaacaccaacgatcatcaatcagttgcctgacatcagcagtaatgtcacacaacagggtctcttcttcttcctcctctaactgaatccttgagtaatgatcctcaagatcattgaccatagaactactaaaagccatagaacaaaacaatcgaacccaacaattaacagaacaaacctccaacacacaccttacaactcactcatgtcaaaagacaagacat

SEQ ID NO: 26855 - DNA, 988 bp, Cannabis sativa
  modified_base (721)..(729): a, c, t, g, unknown or other
ttttagagagaagttcagagagaagattggtataagaagagagaaatttgtaatgagaacttagtgaggaagatcatttttgatcggagtgtgtaacacattgcaatatagtgaattcgactcaaagcattaccttggcctaagagtaggacaagtcatattgacttagatctgaaccaagtaaatttgattgtgtttatatttatttttacttttttttacattcattcattttgattaggattgtacgtcggtcattttagttggctatgactacatatttttcaacccaatgtaaaaaacggattgcaaaagactaagtgcaacccacccaaataaattaaaaattatgtaatcctactaatagtttggtcagattattcgagctaacccgaccaagctggccaaccattaattttttttttttcaatttcaaatttgttacaaaagctaaaaattaaagaaaatattgaatcattgccaacgattttgcttgctagtcaaaagtaaccaaaattagtcccaaccctttaaaatgtaaataggcagatcaaactcatatttcctcgacaaattaaacaaaataattaacgaaagaacttattgttggaaaaacttattgcaattgaccacaatattttccctctttgtatgtcaaaaataggatacttattaaacaccacaataagcaattatcaaatatcaaccaaagcaccacaannnnnnnnnaatacacaaatcaagaataaaagtgagacaccaagatttttacgtggaaactcaaagcgggaaaaactactggactgtagtccgctcaaatcatccactattaccaaagtttaataatagaattaccaagttcttctctagtaaacctagaggatcacaacaacatcaagattaaacaatattggatcaccaatacaatcatcatcatcatctcaaaagatggatacacaaatagaaaagtttgagtctcaccaagtgg

SEQ ID NO: 26856 - DNA, 1260 bp, Cannabis sativa
cttacctttaattgcttgattcttttgaagtcctcattagaaagaataccatcctctagttcaggtgatgtatttgctgttgttgctactgccaatctcttcaatgtccgaagacttgtatcagcagcaactagttgtctatcaaaatcagtcagttttctcttttttcctttagaatctttatgcccacttccaccatgttcggcactataatcatcatcattatcatcttgttccagttttctcttttttcctttagactcctgtccatttccaccgtgttgatcatcatcatcaacttgttccatttcttcgtcttcgtcctcctcatcatcatcatcaatgctaacatcaccatcactgtcacttagacaatcactaccatcttcactgtcagtgccataagtagattccttgttgtcttcatcatcatcaccagatgcagccatctcctcgtcactgtcatcatcagagccaatggatgcaagaccatcctccccatcactattatcttcatcatcatcatccaataattcaacaccagaaacattactgagcacattgacttctccatatgcttttggctttgcctttgagtcagtagttcgcccacggtccttcttaaccagaagtgaagggcaaatctgcatatcaaaaaaaaaaaaattagcaactatcaaccaattttagtctctaaatattatttgatagaatataaaatataggtatgagagggggaagagagagacctctctaaataggccaataagcgatcgtgctgctatagaaactgccttctcatgagatttcttgtacaatgcaagatcttgcagcaactcttcagacattaactaagattgaagaacaaaaatgtttatgaccaaatatatttaaatatgaaaagtagagatggtaaaagtaaataaaaaaaaatatacgtcaaaaacaactcttgaaaattccaaaatctcaggaaccagatacaaatgtataatatagatgtacttaccaaagggattcgaagacatatttcccttattacattgagtccaacagcaatggcctggagaaataagagggatcaaaaacatgggaaaattttttaagaaaataatcaaactaaagttataagccacacctcaggacgcgaacgatcatgtacaaattgatttactacttgcttgaacaatggctcaacggcatcaggaggcacctgcacacaatggagactcttttaagttaccagtagagataaaataa

SEQ ID NO: 26857 - DNA, 5869 bp, Cannabis sativa
aatgcaagatgagaaaaaatttaatgagtcttttatcaatttttttatgcattttaaatttgatactattacattcctattcttcttcccatttccattctaatgttttcattccttctaaccaaacgccacctaatatcataattcgacatgaaaagcgaaatgataagacataaaacctactgatattggggagtcagcaccaaggcttttgtcacggaaaaatgaagctgaatccattgatgccacagccaatataataggcttgccttgatctgaggaggagatattaagcggaggaagtgatgaccaaacactgccctccataagtatgagcaatagttaaattcaacgtgaattatgaaggttaagggctcgtttggtaggccatataagaatcgtattgtattaaataataaataatactatgtttggataagccaatgtattgtataaattattacgaccaaaatttttaatataatgtaagttgtattatttaatacataataaatggtatgtgttagcttgtatttacaaaggatccatggtcaaccccaatctccgacccagacccggaatcgaaacctggacctgaacgcgaacccggaccctagaccccaaacccgaacacaggatccgaacctggacctaacccgtagtcggtgtttgggtcgagattattgaaaatatgttgtagctttacacaatttattaatacaaatccatactaaacataatattgtatcaaataatactaatacaatacaatacaaaaacaatccaacacaatacaataaaatacaacgtaccaaactagccctaagagaatagaagatatgaagatgtatttcaaaaactaaaagttgatggaagtttcagaataaaagatttgaatcctataaagctcaactatagaccaattttgacttcccccgtacaaataagattgagaaagaaattttcacgaaatcccctgccccgaacaataaacacacatgcacacaaatatgtatatttatatacaataatgtaaattctcgtacgaaagaaaatgaaactgagtcataccaacgagaataaggactacattttaaaacaaaagacagatttcaaactcaaaagagagatgagacaaatacatatcatgaacaacatttacagccattaacttcattatggatacctacaaatgcaaaaagatttacctgtatccccctaaaggaaagcaagtctcctcttttaaacaagattctgaatcatgggttccagctttcactgtctaatcgaatcaaatgtatcgcatagtacatggaaacatcattaagcaaaaaaacaatacatgtttgcgagataagagtcaataaaatgcaacagaaagttaaaaacaaacaagctacctgcatcactagatcaaactcagccacaacagtggtataagatctctgtctcttcaaaatttcttcagaaacctgcatataagtgacatcaaaaagttaattacaatactaaactaagatcatctccaatgcaaaataataaacaaatgttatatttgcaaaacatttgcaactgtgctccaatacaaaataacatttaaagatgcaattagtgtaaaaattaaaatgccattaaagatagttgataaattaaatatttttaaaaaaaaattaatggaaatatagtaaataaaaaatgggtgttaaaacaggtcattaatagttgatatgacaatagttgttgggaatactgtaattaaaaaagctacaattattgttgtgtgaaacttggcacaatgttatacttatatcttgtgcaaaatttggcacaacttttaacacacctttaaagaactaattttattaaaaatgctaaaatatagcactgcattttaacattctattgaaaatgctctaaaactaccaaaatatattgttataactagattttttcttttgaagtcgttttattgctttagtaaactgtacaacatgcaaatcaaattacacgacatttactacctcttggatggtcttcgtactactctcagagagtaagaatacaggaaaatcgtattgattccacattataccagatccctgaaaatgtggaagaaagttgttggtccaatatatcaaacaaatgaaattgagcgactgattaaagaaatattagaagcatgcaaatttcaggtcaggtctagtccattttctagcccagttgaatttgttaaaaggaaaaaaaaaaaaaaaaaagacatggcatttttgtgtgggttgtaaatgtcaaattccaatcattgatgagtaacatggagcataattttttttaaagttggaccttaaatcgggctaccaaattataagggattgaaagatgacccaaaaactgcctcccaaactcgacattacaaatttctaataatgccatttggactcaaaaacacatcaacagtctttcaatcccttatgactgatttattcccacctttatgaggaagttaataatgatattgtttatatagcatcctcatctatagcaataacgaaacagtccattgaaggcatgtaagcaaagcaatacagctcaaacaaaagaatcaatatacgccaacttcacaaagtgtgggggcacaagatattgaaggatggaagcgcagctaacccaaagatatcagcaatgaataacttgcccaatctctcaaggaattgagaggcattttgggtttgacagagtattacagaaatcttgatatcagatacactaataaaagaaaggagtaatttaatactattcatttcaagtacaaagcagcatcttcgaaaacaaccaacaaacaagtttatatagtaatgactactacagcatgtaccacattaataatttattttagagttcacaaacatgtaagctttttgatagaggaaaaataacatacaatagggttccacttgtagttggtgtttttgtaaggagaaaattcagcttgagggaatgtatgagctggagagaatcctacaaatgaaagtgcatttatcaggtatgagaaaaaatttagagcagtgtatgattttataataagaatacacgagcactcaccatagcttttgtataatagaatcttctttaaaatataaagatttttttgttaaaatcgcactccagatttgtaatatacaaaaaaattacattcttttgttaaaattgcactccatcagatttgtaatatccaaaaaattacatttcgctatgccatttttctacatttataaaaatactattaaggatttttaattagtttcttttgcctacgttccttctttctttatatttgttattttttttcaatgaataaaaagattaacaaatacaatatttaaatgacacaaagaataaaatagataaactaactgatatacagtgtgtattattataaagtatgcacaatagaaaaagtagggtttggaaatatattttaaacgacaggataggaaccattgtgagtgtgctatttgaatggataactgtatctcaccttttgacatattttggaagtcggcttttgattcaactaaaacaccacccacgtttctagcaaaagttgaatcagtggagactctgaaacaggacatgatatctaacacgtaagcaccacttcaaaaagtaaggcagctaaaagtgatattcacatcacaactttattgagagaaagtgtgtcttccatatgtaaggatacaaacaaatatatactctataaaacttgcatctcctacagttctgttgaaagattctagggattttacgacatgaatgatttcttctttttgaaaaggaaagattttgaaaatctattttcattttccggtttgtttgaacatcttgccttgctatcaaacaaaccaactaaccaattagaaagaactgatagaacaacctgataaagaaatcctgaatttcattaagagacaacaaaactgctgatgaacgagacaatgaattggcatctctgaatctgataattggagcaacaactttctctcgcccaggatctaataatatgcagtaggcaaaaaggttgattaaattgacattaatgatctatgataacaaaaaagaatggaccatttaataacttacttgaacaaccaatctcccctgaaagattaagcagccgaacacaagcatctccatcaacaaccttgtacattgaattttgtaaatccggaacggactgcatcaagtttgtctctgctaaaaaaattcagttcattaatttaaaaataaaattatgtttcatcaggaccatgattattttagtaaaaaggtaagagaaatacaagacatgaaagtgtaaatttcactatagaaatatatttttgaaaggtcacatgtccaattattgcggagaaaagctgtggtaactggtaacccacaatcatcaacaaagaaatgaacaagcacaaaaaactgaccctatgtactgtgctacatttctcacaatgaaaaatcaatttcactgctaaaatgaacaggtacacttacaatacaattgttcaataattcacatacaataaagctgcactaattaatagtccataaactgaacaaaactacaaatgttctcctgaactgggatctgtcatatccaaacagcaatgaacaaaaaagaaaggtcattatttgtttaatcaatcattaagattttttttttttttgggttatacgaagaggataaagtatccccaaagtggtatgatgtggagcacaagctgttactaaacatgatagtactgaatcttattgtttgcaaacaactattaaaatttaaatctaatacattttatcaggggtctagcattctcatttaaacatgtttaagacacagttggttctagttgtgagcaagatcctgaaataacccatttctttattcagttcgacaaataaatgaataaaccctaaatcaaatagatatatgtaatttaagatataacgtaccggcaagagagagctggaaattgaataagaaaaggaaaaggaggaagctggaggccataatggtactactacttctcttgtccatacaaaaccctagaattgcagctataccatgctcgcgcgagaaatttaaatagggacagacgtaattagagagtagagaccccgctgcgccttttcactcactactcagtagtgcttcataaaagctctattgtaaacttgtatgaagaagtccggatttcagatttaaaaaatgagccccgtaccgcccgtgaaatgaacgggttcatcggtttgcgggtcacgagttcggttaaccgttgaccttttttttgtgaccttttttttttttaaataacagtgatttttttttagattaaggctattatattaaaataagagataatacatttgatataagtggagttagaagttcctctaaccataaacaaccggtatccaccgaaagtaggggtgagcaaaaaatctaagaaaccgaccaaaccgagtacactgtccgtccgaacaccgaaaaaaccgacactaaaaaaactggaaaccgaaaaaaccgtcttcggttaaaatcgcctcaacatggtcggttttagtgtcaatagcaaatcgaccgattaaaccgataagcgaccgaacatatacattatatataatatatattatttttgtacatatttaatatataattttattaaactaattttacttatatcttttttatttaaagactcaattattcattgttttattttattattatttgatgcatttacgtaatatatacacatattcataaactaatacgagatttttaatataactcattaccatattagtagcacaaataatttga

SEQ ID NO: 26858 - DNA, 2243 bp, Cannabis sativa
agtaaaatcttttcttttatttgatatgaatagaaaagattacattgaaatatagttttatttagggcacaaagcccaacacaaatatgatcacactgccatttaactcatcatttacgtgcacatgaagaccattatttgggtcaacaacctcattatggcgcgcaaggtgctcaatctcaattggagctatcaaattagtttgaaaagatttccccccttctcgttggcaaatctccacgatcctctcccttagtttccataatcaaagcctgattggttgactttacagccacatcagcaccaccaccagagcactgatcgagaaaggcttcatctgtttcattaccatcttgtagccattgagagccaatcaagttatttctcctccttgattgatctctcatccaaactccatacagtttgacgtacaatattttcaattggtgtatcaaatagtttaggacagaactttttaaagtggccaattattccacaaataaaacagaacgtggggatatattcgtacttaaattgtgcccgaaaactaagatcctcgatatttctccaaagcttccttctccgtttcgatggggttgtgatatccaatgttacttgaactctcatatagtcccgccaaacattctgaaaattcttagggtcggccttcacaaaagtaccaacaaaatttcccatcttctcatcaacactagcacatttaaattccgtttgaagtccacaaatttggacccacatatcaagattgttgataaccaccctcttcggatcctcacctctttttagtcactgaaaaagaaaattgaatacgattaaaagtctaggaacttccttccataacccgctctacatcaatctcataaaaaaattgaaagagataacgacttgtctcaagttccttgacatagacccccttgcctggttgccaaagagacgccatcacatatctcataacctcaaaatcaatggctcttgcagtaagaaaacgacccacaatgcataaatgatcattatgcacctgatcatctggaacaataagatcaacacccaaatccctattgtccttcccttcaatggtaatgtccgcataacgatcttccaccttctaaactaaagaactactcaaagtcatagagacaacgctgaaacaagattaactcagaagaagacaaaacacaagcgacaaaacaatagagactttctcaccatgttaaaagacaagacatgtgtccttataactcttataattgattagtaactttttaaaattattattaaaataaaataaatggggaccaatatttaattggactaacaactatataaagatcaaataaaataataaaataaaaatagattatttttcattagttcattctttgtcaaaaccgaacattgcttacagtaataatgtcttttgaagcaaagctaaagacaaattacttaaaaactgctcaaacataagccacaaattagtgccctttccgattatttttattataaattttaaaaataaaataaaggaaaaagtatgggcccttttctattgctgtccattaaccatccatatcaattttttaataaataaacaaagctaaggtcagtgtcactggttacatatactactattatttactttgttctatatgaatgaactatatttatttcatttttacatggcactagtttaggagtcataacaccaaaaatatggctcttggtcgaaacacggaaaaaatataaccttaaccatgatataacataaaaagctaaaataaataggatatgtaaatacgaatagattaaaacaaaacgatgatattttaagacatcctatattctaatagtaataataataataataaatttatcaaatatatattaataaaatgtagctatataacataatttttgatttatgagaaattattgttttttttaaaaaaataaaaaaaaataacaaattattagatgttaaacctaaatataattaatccattaaagtgttgcaattactaataaatttgttctttatttttttttattaaaaattattttcaaattttgatatttaattagaattagttaaattttaaatattatttgaaattaaatttgtatgttttgatagtttaaccagatgagcatttttattaatttcgaagataaatttagacgaataataatttttttaattactattacaaagtataatactaattttt

SEQ ID NO: 26859 - DNA, 1692 bp, Cannabis sativa
aaataaattaattcacaaataataataaaataataaaaattagcgctaattgcctttactaatcacaattactaaagcggtcattataagaacattgttatttttcatgcttcagttcgagcaaggaggtcagttaatagaatttattctataactaacatggaggggaaatagatgaacaaacctcaagaagtgaaaacaactttccatgattattagactttgttaggcaccaacattaattcaaggagagctgtgattccacaaattatagcacaaggcttgattgtctcgaataaacacaaacaacttttaatggctgagtacacaaagaggatgtgaaatcaacaatttttgccattccaggggtcaaagcaccgggtccagatgggtttggtagtgccttgagacttggttggagaagagctgagtaatgcaatactgaatttcttacacacaaggaagatgttgaaggaaataaatgccacagtgaatactttggttcctaaaaatcaatgtctagccaatgttagcgaataccggcccatagcttattacaatgtaatttataaagttacaactaaactcatttgtacaagattctgagctgtcttaccagacttaatatctcaaaatcagagtggatttgtacaagaaaggtacattgcgtacaacattacgatgtgctcagatgtagtgagacattatagatggacaaatgccaagcctaattgtatgataaaggttgatctaaagaaagcctatgatacaatagaatgggaatttattgaggagattctcatagacttttattttcccaaagagttcatacaacttgttatgctttgcattaaaactcgaaggtttagtttgatgattaatgaaactatgcatgacattttgaagcaaaaagggatttgcggcaaggagatcatatgtctccccttatttttatcattggcatggagtacctttctaagattatggataaagttaggagcaagcatgatttaattcaagtataatgagagatgtcgtggtctaaagctcaatcacctttgttttgctgatgacgtttttcttttctgctatggggatttaatgtctacataatggttattgcagggactgaaattattttcttagacatcaggtttataacccagtgaagagaaatctactgtgtattgctctgaaatgaggaaaagtgaaatagaaagagtgattgatgcttctggatttactagaagtcagatgccattatggtaccttggagtgccaatatgtgcaaggaggctttcaaaggctgaatgtataggattgattgataaaatgattgcttgtatcaaaacttggagtttcaggcacatctcctttgcggggagagtgacccttatgattcagtattaattgcaatacattcatatcgggggcaaataatgatgatttggaagagtgttttaaaagagattactgctatatgtcgagcgtttctatggaagggaaagatagaatatcaaggcctagggtatgtagcttggaatgagatatgtaaatctcacagggaaggtggtcttggtttccaaaacttaataacttggaacaaagtagctcttagaaagtatgtatgggcggttgccactaaacaagacaatctctgggttaaatgggtacacaatatatacataaagg

SEQ ID NO: 26860 - DNA, 2127 bp, Cannabis sativa
  modified_base (37)..(47): a, c, t, g, unknown or other
tatttatgatgttaaataacatacttgttagtaaatnnnnnnnnnnngtaaaataattccaacaatatgtggatggacatatagtaaaagtactatgtataattcaattatgcatgactggatcgatataaataaacatattttatcaacatctctgttgacctcacttttagttaacgacatttagttaaattaaagaaattaagaatgattaaataataaatatggataagatttaagtaaagaaataccaaaattataaaggttcaaacccttgatgatggcaatatcctactctcctttagtttgtattgacttgtgaggtgagaaccaaggagtccttgatctcccttgaaagctcttacaatgatttctgagttttacactcttgaatctataactctctcttatgattttctcacgtgtgttttatgtatcaagttcctgtccctgaatagtgagatgactccactatttatagggatgaattacattaataggttttccgaaaataataagaaataaaatgagaaaattgtttactttgtatgattacaataagaaaataggaaactagacaagtttccttttttccttgatactgcgtatctatcccatgaaattagggatattatcgtgttttgtaaacatggagatacatgggatctctgaaaatgtccaattcgcattctatggtcgactcatgtgagctgcccacatgttggatgttggttgggtgttctcgcacgccttactcggatgttccaacttcttctgactttgaatatcaaatctcccggtacggttcattacgagtggaatctcccatcaaggtcatagaatctgttccacatgtcacccagataggtaccacatcactctatgtagaaatttggataaaatttgcccccaagtctgcgcggtaacttcttggtcgcacgtggacttattcgatcatgaagttgattagatgggtgatgcgtatctgacttttactcttgatctgacgtggctgatcgaacgtctcttcaatgtctgaagcattttatgccttatctttgaagtgtaccttctgacatgtacacggttgtacaacactgcacgcatgacatctatcttattcaatgagtataaacgttctttttcggaggaaaaacccaaaaatttgaattttaaattactttcagccctttatccacctttataaggaataaaaattggttttacactcttttagcaatttttaatcttgcataactagagcaaaatctttcttttttttcctcaaaactttcaaagacaccttttgctgaaaaactcaattgctggaaccgttcaagcatattcaagagtttgcgaatagtgagtaagttatcctttctcctctttatgcaatttctttcatatacatgcattattttttaaattttttctctattgtaaaattttgggtttttgaatcttttcttgattggtctgagatttaggaggtattagggtttttaaccttaattgatatacgcactggtcttttaggcttctaatttcttaccattttgtctagaaattatttgagattattcattcgtaagcttctgaatatcaatattcttttaaacttgtttagggatttcattattggaatgaagttccttcattttttcctttgaatcaacttggtcgacatatcagatattttttccttttatacatctgtccagctctcacattttgtcttccttcttttgtagatgaaccctagtgagttctagggaggtaaacattacatcaactaggatctccttcaacttctctatgaaactcatcctcgactccatgcaaactcgtctttgtccagcaaaagctcttctacttcaagctttaacgattgggaagttaacagtgatcactcggaatctttagagccagtggtgcaacatcattagtatctcgaccaaataagtggagaaggataagatcggttcatctaggaattaaacaagggatagagtcgttatctccctagttcgtggacgtacaaggtctgacctgatactactgatacgttgtcgaaggcctcacgaattccttcagccagacatacttgttgggttttgtgtcctaaat

SEQ ID NO: 26861 - DNA, 3449 bp, Cannabis sativa
atataaatgtatataagtgaatagttatattcccattatttaatcaaatatatacatttttgtgatgaatttcatgaatcataagatttgaaagtacacaaatatgacagataattataacaagatagaagaaacatgccttctataactaaacaatatataatatttaaatgaaaaaaaatacagttttgtcaccttaattagagtttaatatcaatttttttgaaaaaaaataataaataaccatatctttatttaattagtaaaaacaaaataagaccatatgctggttctttgcccaatacaatcacttaaatgtaaaaataaatatatttagttgatatcagtctatacaatattgattcataatattaatccaattaccaaaatttattatgagataatggcttgctagctatgaataatctgtacaatattttaatttaataaataatataaaaaattattaactactgataaagcatttgttctattgtgtaagataataaacaaacttgaatccttttcaaacatataactagacattagataaaatgcaatgcaaaccaaaactagaagcaagccctatttttgtttacaatctcctatgtaccatctaatctggccattttctactattactttagtacatccaatgataatataagattagcaaattaagttgttaaaaaagtgatacatatatgatatattggtaagcaatttctttgcaaagaatacattgaccaaagaagaaaaaagaagaatgtccattcacatgacttatggtccactcctaccaattcatgactttaatttttgtcagtgaaagtggaaggcttttggcctagattatatcgtctgcaacttagaatttaggcttcagattccttgttaaactgtactaaacattgagaattactaaaaaatatcattggtgcttaatattctcttcggttcatatcgctattaatgtaattaagtatcgggtctcatatagtttatgaaaataatatttagaaaatattgctaaccaatcgtaagatgtcacttataaaaagtgttgggcaccactgataaccaataacaatgctaaacattgttacacctaccatgagggccagagttattactactacaaggattccatcagtatcattatttacttcacttttggggtaaacggtagtcaatgtctaaactttcatcaaattcaagaccaaaagattaacttagttatagaatatatcaacactatcaaatatgtaaaaactaaaatgtgatatgatatgatatgatatgatcacatcaaccacaaatagcttaagcttgggcaataataataataataaaagcattgattactttaatgaattcccaaccaacattaccaccttagtcaacaaaccattatctcaagaaaaagatggaatttcaaaagaaaaagagaacaacaagaaaaggagaagaaaagaaaagaaaaataccccatcaacacctctatctctgttgtctcttttgctttgctttctttccaattaagctccttattagtttccttttacactttcacacttctcatctccacactcatttacctccaaactcctctgtttgtacctgttttttttttttcacacctgttcttcaatccagctaaacaatagttgtaacttgtaatatattttgttttttgagcttttttgtcacagctatctggatactgtttagatattaattaccataattgagttttttttgttgtgatttgattttaagcttcccttattaagttggtcagtttagtaacattattagttcttaaaaaccaaatctaatagatgtattcttaggtaatagatttcatttcaatggggtctttaggaagcccaaaaacatgggtaccataccttaacaacaaagattgttcacaaggcttctgtagcttatactgtccacaatggtgttacatgatcagtccacctccaccaccattagatttcccagaagacaatcattcatctccaaatttctcccctcttgtggtagcaatcattggaattttggtcagtgctttccttcttgtaagctattacaccttaatttccaagtactgtggaaacatggatcaaggaagaagattcagagaagacaataataacaacaaccaagatgatgattttgaagaagatcattacccatctgatcatgagccatggcatgtggtcactaatgggttagatgaagctctgataaaatcaatcacagtttgtaagtacaataaaggtgatggctttattgatggaacagattgttcagtttgtctaaatgaatttcaagaagaagaaagcgttagattattacccaaatgcaatcacgcttttcatattcaatgtattgatacttggctcagatcacattcgaattgccctttgtgtcgcgcacaagttgtttgtgtaaatgcctcaacgaatccgacccagctcccacctccaatggcggaaacctcgtccagcaacgaaacaattgaagagaacccatttcgggaaatcgaaaatggcgttctgggtcgtgatcagaactcggaaagatcatctagggctgaagaattagagatcggtaataatggcggtaacgttcgaaagacgagttcgctccgtgctttcagtgatttggaagagagacatacagtaattgaaatcagagatgagatcagacggtcgatatcgatggatcatccaggtcggaatcgagtgtccatagctgatattcttaaccatggcaacgaagaagatgaagaagaagaagaagaagaggaatgttcaattgagaaaaatgagagaagaaaaggggtttcgattagtgtaagaaatccagttgtaatgaagaggtcgttttcgagtggtagatttttccatggaagaggacgaaactcatctgttattcccatctgaaaaaattattatcattatttggaagaagaagaaagcatattttggttttgagattaaaaaatatagttttatttttatttgatagtgaatttattttctttttaatttcacttattacttgttagtgattgatatatattgtgtagtgatttattatctttaactccaagagaatgagaatagaattcctttgtacaattttcaccaaggataattcaatgtttgaacccttttaatttctatattcaaaactaggttttttttggttaaaattttgtgtgtaaatgtaacaatctatggagtttatacatcatacaagtaatgttaaagttaattgtatatgataaatttgtctcaaaaaaatattagcgcacttttaataatgagtgtttcctagttaatattgggaaatttcaatttttggccttaataataccagtcatatcaaaatttataccctcccttaatttgtacaaatttagtccattaattaca

SEQ ID NO: 26862 - DNA, 1553 bp, Cannabis sativa
gagttccaggaaggtctggctaaggtcttcctggaccaactaatttgctaccattctggagcgtgtgcgactttcattcactttcagtagcgcataattaatgaaaatctcgaaatcctttccacctttgctggtggggagaacttttgggtattacaatgccttctataaccctagttagtggaagatataagataatctgacgtggttcccttccgtgattgccacatacgattcatctgggaacatggataacttttatcccaagctcttaggacttaagagtgttgggagcttgcagctttctctcggatgcccattttgtacctccaacttgctgaccacgcattagaatatggaaggaatcttccacaacatgtttagcatttgaaaggttgtcgtgctttgcaatatcactggtgatttgctaaagcgttgtgctcggttagtggagttgtgaaactcacgctctaaattttaagcatgtttctcaggggaaacaaatgaaggctggtcttgaagagacgctaggcttctagcacgttggggatgataccacgaaatgatgaggaataaacactttattcttttccttcaggcgcatcaaatgcaaacctttcatatccccaatcgttggatggcatcgcccttaattaattaaatctagaccgtgcatttcaaaaacatttaaatcgttgccactcatataaatggaggtcttggcgattgaaaccattttcttttcccatttaccaacaactctttgcctagagaactcttctcagacgaaaatcttccctaaaaactttagcccctactcacttctctaaaccgaagttcagccccttcaccctcagcttcacccttgtgtttctttgacgttcatcatcttcccaaactgttggcttgtcgttggagctaggagaggcactggaattctagtgaaacaaccatcgtctttacttctcacccatcttacaagtaagtattcccccaacttaaattgttgttttaggacttaatcgaaatataattttttactttaagaaatctgtaactttgcatgtgtagggtttaattttaggaattagggttattgcatctggaattagtttgcatgattcataggggaatacctttggggttggggctttaaagaggtactttccctttagtttgggttgagatgcatgcttgttatttggggttttctgattcataggatcagttcaaatatttttgagttcgtagtaatctcttgaataattcctctttggtatgttatgtgtatacctttttctttatttgtggaagagtggatttgggatttttgttgttgttgcatgttgggttctcgatttgttaccatagcaggttgcttcatagtagtaaccttggtggtgacgagtttgatggggacctctctaagcagttttgggggaggcttcccccgataccttaaaaaaccctaaattaatatatttttatttatgtgtataccatcatgcaagccttgcttttgaaatctagtcaccgaaaaaattaccaagaaa

SEQ ID NO: 26863 - DNA, 1925 bp, Cannabis sativa
tttaaaatagtatttgagattgaatgttgtaaggaattacttacagtgacatgaataccattatttttgcaagcttcgagcattttgtcatttctccaacctggatgcatttccatctgcccacacaaaaatgcataaattgattttcaaacatgatgaaccaacatttctaaatcaacaaaaaataaaataaaaaaataattgaagatcctaatgcatataaatacaaactgtcaaaagaagtcttcattttaaagttatgaaatatatatatttatatatatatatatatgaagatcctaatgcataaaaaatggactaattaagatttttttctctcgaactttaatatgtactaaattatatttttttgaacttttttggccattaaaaattcttcctaaagtattaaaattgttagatttaaagacttgtctaatttaattcaattttactgttttaatgattatttatgtactaattcatgctccttaaactttaatatctaccaaatcatatccctcaaactttgatatatactaaattatgctcttaaactttcatccatgttagaattttttttactaaaattagacaaacgtctttaaatttaataatctcaattaacatcctaaaaattggtacatgtcaaaattcgagatgaaaaaaaatcttaattaaactaaaaattaattttttaagctcctaaattgggtgagtcctagttgcaaggataatcagacctgagagaatgaaggctttatttgagcaaaggagagaagagtattgagtttgttgagagtgaagttagaaatgccaatgtgtctaacaaggttctcttccacaagcttctccatctctttccatactccttccatctctaactccattacttctccacccttgggaggcatacttgctcctttttttagcacaaaaggccaatgtatctgcattacataaataaatgtaatacactcttactattattttgaaaaataacacttttactttgaaaaataacatttttacagactaagtattttccaactctcattttattcaaaaaaaaaaaaaaatatatctatatatatattttccaacaaaaaaaaatccaatgtatctgcgttacacaaataaataatagaatttttagcatttaaatccttctatcatttcacttatatttaagttttcaagcttaaattttgacggtaagtctctctaaattactgaactggtaacaaatttagagtgtcatccgattaactgtcactataaactacttatgtatacactcttgtatacatgatatatttatattaacacatttaatattattatataaaaattatttttaaaattaaataaaattataaaaataaaaaatgttacaaattttaaactaataatatgaagtgtatcaatataaatatgacgcatgtacaaaaaatatacatataaataatctatattaacagttaattataaaaaataaataatattttaaatttactagcagttcaataatttaaaaaattttaccgttaaaatttaaacttaaagaaataagtgcaagtagaatgatagttgattggattttgactacaaaatattctaaataaataagagaaaattacactctatatcctttttatattgtccttttttatttttaccttctttttaaagtctatcatttttaccgtttttttttaaatattgtaccaattttacccctatcacttcaagatactctccatgtgattctcttatgtcagggtattttaaacacaatacatataaaaagatgtatgtttcaaataaatataaaattagaagcaaatttaattaattgattaataaaaaaagtattttccaatttaccccaaataataacttgtaagggtacccaatatgtaata

SEQ ID NO: 26864 - DNA, 1698 bp, Cannabis sativa
tgggatggaggactttggcaggaacaattcctgggatgttgaaagggattgaaaaatggaaaaattacaaaaacggctaattttttatagattttttacatttttacgtttaaagaattttttttttacatttttacggtattttataaaatcacaaaaaaaccacatgtcactaacaggaaaagaacacaaaaaataatatacagataacaaaaaattaaccacaaaataacaagagtaaaagataaaaatacatcaaaaatcgtattttctgtgattattttattatttttgtgtatttaggaaatcattccttgaaaaattgtaggaaagtaaatatagaaggcaaatttttgcagcggctatgcaactgtatgaaaatgaggctatttggaatttaaatgtatacacaataggagcaattgtagagaaaatagaatatgatgtaaagcatagaattagagggataagcatagaatatgatgttgattggtttgaaaagttgtaatatttgcaggcctggttttgatataactctctaagttaccaaaaaaaaaaatcttgtgatgaatttggcctataacattcacatcaactaggaattatttatcattgtcttgaaacattatgttgaaatcagaaatctgagcattgtagtattcatcaacaagaacattctgaggctttagtggatgatttgattgtataacaattgaatctcacaccattagagttattgtataatataaattgggagatcttttaagcaaaatattttttcttagtgtgatatttagcgagaatcattagagttattgtaacaaaagtaataacaagagctgagacatgaactcagaaaaaaagggccatttttgatgtaataatatgcttttttattattattttcttggaaagactttggggtcaaggtcaactgagtttgtctatgtgtgtcttattcatattaatgattttagtgatatgttagttcactacctaccaatcaacaaccttattcaattgaacactcaataagtaaaaattctcacgcagtagattatataaatatttttaatttttcatttttgacttttttttttttcattacaaggaaagtaagatcttcctgtaagatattgctttgggaagaagattttgattggaagaactgtgatttttttttttttttttgtattaactaatctgtttgcaacttaatcttatccatatgtgtagttaatgttggtctcaatttgtggtggttgcaacctgtatggaaaaagaagtgagaaagaaagaattcccttacattaattactagtaataaagcgtggaaaaattgaggcaaagcagcagccattattgaataccaaaaacaccattgggatagaatgcttaaatgaatgatctgtttcgttgttagatcatatcatacaattcagtttagttactgaccaaaatcatcaaatggcagatgctgtagtttcgtttgtgattgaaaggcttggagacttggtgatttctgaagctcaattcttgggtggagttgaggcccaactggggaatgcacagattaagcttcaatgtatgagtgctttcttaaaagatgctgatgtttgggttagaaatggtgatgagagagttcgccttttggttgtccaaatcagagaaaaatctcttgacttggaggatgttatt

SEQ ID NO: 26865 - DNA, 2881 bp, Cannabis sativa
tattaataggttgtgtaaaattatactatctttaccataaactcgatcccaacccgaacccagatcccatctccagccatggacttggaccctatccccatacctcgaccttagacctggggtcagggttcgaggccagggcttgtgctagggaccgagttgcagttcagtctgggtccagctcaggagtcaaggtctgggtctgggtctggtgctgggtttaggtccaaggtccgagtctgggtccaggtcagagtccaggtctggggtcgggatttgagtcccaaccacagaccctttctaaatattataatacatgctaatacagatcatttgttatacaataataggattcacattgtattagaatttatgatcgtaataattaatacaatataaagttttatccaaccatattgttccttgttatttaatacaataagacctttatgtagtctactaaacaagccctaaaggaattgtgattttatttatttattatttattttataaagggattatgtttctcaaaacaccaaaggtacctttggtaaggggaaataaattaattttcattctattctttgtttagttttattttaaatattttatcataacaaacaagcactaatacagtattgtgtgatcagaaaatcttataatctaggaaagaataaaagtaaatcactaatcacagatcctcaaatatatacacattaattctaatatctctacagtctcccacaatttgtgttataccagcttctaggcatgtgggcaatctgtttcctttattagggtctattggagtatctgctggtttagtcccaaacattctagtttcattcagaaggtctatgatatacttccattgagatataacaatttcctctttagatcgagctatgtctatcccaagaaagtacttgagacattctagatctttgatttcaaattcagatgaggtttgaaatctcacctgaacaatctccagttaggattatgtaatcaagagacaatgagaaatgccaatcttccctattgaagggatcttcacaaacaaggccttcagtttataactgactttgtaaacctatcgaaccatgaacgaggttgattgcttcatgccatagaggaattttcgtagtttgcataccaatcgaccaatggaggtttacttcaaacctggtggattttccatgtagacttcttccaattccccatttaagaatgcatttgttacatccaactgatataaaggccaatcacaatttacaatatatgataataaaactcctactatattgagtttagcgacatgagcaaaggtctcgtgataatcaacaccatgtgatagaatgaattccttgacaactagccaagccttgtaacttcaacccctaagaaatactttagcaccccaaatctttcatgtatgaacaaaaaacttgaagagatgagattcatgtagtatcacttacagttataacaatgtcatccacatacacaactaatagaattatgcaaactttcagatgtttgtaaaacacacaatggtcagacatgcttttcttcatatcacatgtttcaacaacttgactaaattttccaaaccaaacacggagagtatttcaaaccacataatgatttttgaagacaacaaatgcacctcgtctctccccccgagcaacaaacctcgtaggttgctccatatacacctcctcctaaagatcaccatgaagacaagcattcttaatatctagttgatgcaaagatcaatcacgagaagctgccaactaaataaataagtaaacaagaggtgagtttcgcaacagagaaaaagtgtcagaatatccactccataagtttgagcaattgacccatccagaatgacattaactgtgatcacccatttgtctcctataccctatttccctaaaggaaaattcatcaagcctcaagtatcattgccatcaaaagcattcaactcttctattattgtattatatcaatcaatatgagatatggcttcacgaaaagtgttagaaatagagatggaaccaagggaggcaataaaagcacaaaaagaagacagctcaatgtcatatgaaacaaatgaagaaatgggataagtatattgacacttacctttacacaatgcaatgggaagatcatcgttggggctggatcaaagcaaaactaatagtcaaaatttgaaatacaaaattagggtttatcaaaaaattgagattagcaattagagtttgttatttatctttcttagggctccacttttcgaaaaccctatttggcacttggactctcattgtcagcaccattagattgcccaatcgccaactgacaaaactgaggtgtttggtggccaacaacctagcgtgtgagccctacacgtcgccaaaaggtccagcaaaattccccatgcgtcggtccctgcactgtcctattccagtcgtttttctatcggtcatcatgctctgataccatgttatatgagagttaaagaaagttctttctcatatatttaattgaaaagaatggtatatacaatactaagtatctatcttaagaaactataaacatttagtaaactagaataaggctaattgacatctatataatttatacttaacaggaaagaatgattggtgttcaaaaaatttaacatccaaagtatgagacacttattgtggttaacatttgtacccttttcgagctagaatacccaataaaaatgcacttatgcaatttggggtcaagttttgttcatttgtgatcatagatattctgataatttgctctatctaaaagttaacattcaaagtttgggtaggtagcttctcactatataaaggaggcaata

SEQ ID NO: 26866 - DNA, 1478 bp, Cannabis sativa
tttaacacacgtgcaaagcacgtgttaaccaactagtatcaatatagatgtggactatctagtactactcaagtctaaatcttactattataaatcaaactaataaataattaacacctcacgatagatatttaaatttttttaaattatatatatgcaataaattatctcttctatttaataataataaagtaataaaattgtatcaaattttaatgttactaatttttcatataatttttctataaataatatgagaagtaattaggtgtaactaaaaaaaaggttaaatagtctctcccattcacttagagattactattaccttgttgtaattcttctctcattgatgaaatgagtcattatctgtaatttgttctctctatatttaaactcaatgtcatcaccgtacctcacttgatattaaaaataaaatattctatatttaaaggaaaattaaaaagaaaaaacaattacttttcaattcatatattacaactacgaaaaataaattaaccttattaaaagtgtgcttctacttatattaaatcttctttatttttggtgtatggatcacctacaaaataaaatatttaagttgtattattcataagaaaaatatcattaaaaaaacaaaattgaggtggatctacattccactcaaaacacttctaccatgaccttcaccatggccataactgaagagaaaaaatctatctgttttaaccatttccagccctagctactatatcgtgatttctaccaaatcgcctaggttcacgatcaacatcaggtaggatggacgatggttctaattgtatttaataccgcatacatcaaaatttagacaatgcattattcagtaacatattactaacattcctatcatgcttttcaaatcatgtcgaactaattgaaagtactaaaacacataaaggaatacttaaccgtgagtcgagcttatctttgatgatgattgtacatattttgacagtcttcgaaaaataacttgaaggctttgataccaaattgtaacgctctacttgcttaggtgcgctacagtattttctaaattactgtgttgatttgctaatcaaagagttttaataaaaatgtgatttatttaaacttttataaataaaataaactttactttcataaatatattacttacaatttatgggatctcgtttaaatatttcaaaatacattatacgcaaaaagttttgtacaacgactacaaaatataagattgtcgtcctgaagaattgaacccttcaggtctaaccatcttgatatgtacaatcactaaagagctttagactcactgttgctcaacctttgccttgcccttacctacacataaaactatatttgtaagtcgacaaactcagtaagaaaagtataaaacataacataaatatgatttgcattttaggcgcccagaaacctagtctgatttgttataaatagaagat

SEQ ID NO: 26867 - DNA, 1770 bp, Cannabis sativa
ccactcatattcttctttaagctcttttaaaactaatcaaatagtaatatatagggaattcaagcagtgaatccaatcaaacaaacaaaatgaacacagacaaaatgacgactatttgaatacttgtgtggtgttttgacaaataggcctctagactataagaaacgacaatagaacaaattttttaagagggttttcaaactctctctttttttaagagaagacaagccaactaatttgtggcaatataacactctcagattacacagcaaaaataaggaaacaaattaaacaagatttttttactctagatttgattttggaattcaattaaaacaagatttctaaatcaaataagaaaattatagaaacaagatttgtgaaacaaataaggacactttagaaacaagatttatgagaaacaagatttgtgaatgaataaggaaactattaaaataaggacatgatttaaaactaatggaattaacaatatcgatttgaaaagtttcaaatttctcaaagaaacaagaaaagcaaaaaaaaaaaaaaaatcagaaaccctaatatgaacacaattgaatagaaaaaaaacacaaaggaaaggataggtcaaaccgaatgaacctaggctatgataccaactaatacgaaccacaccaacgattgtggtgaaacttgactccaaatatggcaaccactaatcttacaatgaaatctctgagtaattctcttagatctctccctcaaacaattctttcgaaacccttttatagtgaagctagatcactatttatagggccttaatgcatgagggaaggtttcccttttgcttacaatgtctataataggaaggacattcattacataaataaaatacacaaaatgggggattgagatagcgtgtcgtatccctctaattcaatcccatgattgtagggattgccttggtgcttggacttcaagatatcattcttaagtaagtcttggtaagcagttcgaaaagccaaacttgcccctattctggtagttttccctttaccttgttcgggtaattagagatcatatgcgttgatgttacgtgaagtctattcaggatactcatctcttcccagatgcaagaaatgttggacacatgtcacccgtatgtgctgccacgtcatagtgcaaaaaatgggataacatttgtcccccaagtctgtgcggggcctttgaggtcgcacgtggacttcactcggtttggatccctatctgaacaggtgcacgtgttgaaagtgccagttgacgatctgatgtgactctaacaaagggtctcttcagttttttggctcattaaagcttgacatgtacctcgagccacaccttaaattagcacgtttgacggttaccattcaagtacttgagtgcataacgttcacatttggggggaaatcaaggttttcaaattttgaaatgttcattttgcctcactaattggcttataaatagggctgaaatccctaatcaaccacttttagccattttcactctttaagaatcaaagcaagaaagcttttcctctcaaatctttcaaagaatccatagaaagcatcgaacagcattatccgagcaactttaaagcttaaaacagtcagtaagttcttcatttctttcctcctttatgcttaaatatttgattttctgggttttttattgcaaaactcaatagttcttaaacttgttctaggaaaatcgtagaaaatttaggtttaggaatgtgaaatcttgactgta

SEQ ID NO: 26868 - DNA, 3440 bp, Cannabis sativa
aaaaaattacttattagcctaaactaaatcaataaaattatatttatattaaaaataaaaattatatagaaatattaaaaatggacatcaacgtgggcatgggcattggacataaattaatgggttgttatcctataaataaataataattaatattttgcagcataattaattaagaactaaagtatgtgtttatttttttttaaaaaaaaaataactatatatattaatgtacaataaactcactataattaagtctgtgaattattgcataattgaagtcctaagtcctaactacaaagactatatatttatattttaattgactaattaatgaaaaagagagagaataagcaattatatatgtatatatttatttcgaacttcactcatattaattactgtattattaaacacactattttagggcacaacttctctctctgatctctctacgtacttttgttgccaaaaaaattaattaattatagtacgtaattgctgataattacaataacaatatagtactttgcatgtgtattacaattaataatattcttttttttttccaatttacaccttgatatataaataaataaagaaaataaaacctacataatctctataaatttaaaccaatccttaacaatgtgtacatatacttatgcatggcataatatatatattttttttcaaggtaatgagttgaagatattcttaaatattatattttatgtcaaccaaataaataaataaaatgatgaattcatatattcttcatgttgtaacttttttttatatttattggactaaaatttatatgttatattttttctgtatatatatatttttggactatatgcatgtacgtgcgtttagacccaattattttccatgcatgtccatataataagctaatgttgtaacaaatatcatattattaataagtaaatttaactttttttaaaaaaaaaataagtaaatttaaagagggcatatgatcaaattttgagttaatatctttatatgttactatgtccacggttatgaattgaactgtatatagttaattttcataaatatttttagattgtataaatatatagtttactagggttttgcttaattaggttacgttcagttgttcgaactcttataacgctattttattttcattcttagtacttttcagtaaaagttaagttaagtagatacaatgagtacatatatagttcgtaatataaataaagcatgagataaaaactttttattcgtagttccctaaaataaaaaataattcttaatagaatggaaaaataacatggtcacccccaattttttttattattttttttatttatttttactaaggtaaacagagggagagagccaaagtagagggaatttcgaagagagtttcctatgacaagaaaatggtgagctatattaatatatataatacaaactatatatatatagatatgtaggtgtgaccatatatattatatgtattgatgatatataatacataaacttaggatgctcttcttctccaaacgtccaatcattcatcgacatttgcagcttcctatcctaagagaggaggaccatatattacatatgtatatatagcacaattgagatttttattccatgccacgtagtaaccctaatgagatttttgagtaatattaatattttaccttatcttctataggttcttttgtctcttttgatacataaatgctacttaattaattaatttaattcgtatatataccaacacattattaattatcaaaaaataactaaatttttcagttataatatattttttttcagtaaatataattttttgatcacaacaataaatatttatgattaaaatataatatttaaatataagttgtgactaatttaattttaattataataagtcttataactaaaaatatatttaattcacaataattataatttttgtgattaatacttaattaattagcaagagacattttaatcacaatataaaaagataatttataattagtcacaaaaacttttaccaaaagtaaaaaaaattatagtaaatagtgttagttttttctttctatcatattattattaagaacaatattataagttatattagtggtatttagtactacctaaaaaacatcttatgattagttaaggatattttttaaaaactattacattaaattgtatgagactcgacgtttaaacatacctaaagatgtgccatattttaaaggattctaaatactagttacttttagcatttctccattattaaaactatataattatttaatattatatataatatggaggtagagtatttgaatatatacatagtctaatgcaggcccggccctgggcataggcgggttaggcatgtgcctagggcccacctagtccaggggcccaaaaaaaaatatttaccttttaaaattataccattttttatactaattttaaaaaaataccatatttttttctaaagaagggttcaaaataattttttttctatggcccactaatcgtcagggccggccttggtctaatggtttacacaagttttaaataattgcgtaatttaggaaattaattttatatttaaacaagattttcaactatatatatcataataataagtcatgattacaataatcattttgtaagaactcgaatatgtttttaattccttttatctataaaaacgtctttatcatatcaatagtaaatacaagttgcacaacatctctctctcccatttttgaaaaattgttaccccatgattgcccaaaaccctaatcatgactttccaagaaaccaaacactccctttattttagggataattaagtaaaagaactaattttttttaaaaaaaaaaaattatatttttatgtttaaaatttttattttacatttttacggtattttataaaaacacaaaaactcatataaaagtaataagaaaaacagctactaaataacatcaaaatgacataaaaaaataatatacaaataacaaaaattaataacaaaataacaagagtacaacataaaaatatataaaagacggtatattttatgtaaataaaatataaaaaattataaaagtattaaaaattctgtacataccgtatttttatataaaaaaatatatttgttgtttttgtgttttttttttttttttttgaaataattcctttattttatatgatattttgtgagaaaattacaactaaaggtgcagaatcaaatcaactaaactttaaacaatcaaacaattaacagtgacaagatttataaaacacgaacaataatcagagaaaacagggatgaacagagtatgaaaaaaccaaaaaataaagaaatcaacaccaagatatatactggttcaagtttgat

SEQ ID NO: 26869 - DNA, 2758 bp, Cannabis sativa
cacaacatataagaatgatgatttataattagtcacaacttcttatttttaatcataaactttattgtgattaaaagtaaaaaaatttatagtgtatataattattagaaaatattgaggtaatactagtaatgataaatcaataccttattccatttaatttcccattgcatttgcagagcatcaccaggaataggccatctttgcatattttgttggtcagtatttgatgcagcaatatgcaatgcaccattaccatctttatcaactcttcgaaatatactctcatttttggaatatttttgaagcaaaaacttgtacaatttcacttgcttattctccaaagccaacaacacaacattcttctcatcttcattggtgtcataaattgccattggaaatttcttaaggattctctttaccatttctgtgatgccatttctagctgcaattattatggctgattttctctttttaatcacttcactactctttttatcatcatcatcatcatttcggtctttaccgttgttttccgctgcaaaccaataatcttattattaaattaattattgaaaataatattactcgaatttaaaatcatatacttataatttataaaagtggaaattttttatttttataatttttaaaatataagtttgtaaaaatatgatttttttttttcaaaaaaaaatattttatgggaaattttgaaaaagaaaaacaaaagttaaaaaatatgggaaaaaaaacagcataactcccttatggtaattggttactataaggatacctagttacttttacttgattttcacatatttttctattttcagaccgaggaaaatgagagaagattacaagatcaaaacacttacaaagacatagacaggattaagggttgggcgagatgtgccaacgcctgcattaagggtcgcctaagggatgtagccccttttttggctactactttgtgttagttttctgttgtttttgataaaagttacttatttaccaaaaaaaaaaaacatatttttctattttttctttaattttcttataacctttttggaaaagaaaaggaaaaaaaggtcatatttttactcaaaaagtgtaaaaactccataaaatttgtaattttccttataaaagttgagagattactatagggaaatttacaaaaatactagaatttagattaacttttacaaaaatactgtcacacagaaaagttttcaaaaatactgtgtttttataaaacaccagtaaaacacaaaacaaaacaactaaaaaaacaccagtagagcaccagtgaaaacttaatacaatatacagcaatatgaaacttataaaaaaataagtaaaaaaataaaaaataccgcctgacagtatttttgtaaaaaaatggcaaaagttagtataccatagttggccttataggctaagacggcctaggaccaactcagcccaaaggctaaaaaaaaaaatttaaaaatacatatttttttaataatttttaaaaatatcacatatataaaagcccaataacctaaaggctcacaaatcttaggtcaatccaatataaatatgtaaataattaccttgatcaaatgcaaaatttagttcttcatagttgtttttatcgtgtagatcgtcaaaatagggcatttggccagcatcttcaaagtcataaaagttattttgtcttaagagttcattcaatacttgaatagaccatgtatgcttctcttttactttccttatatcgataacccatgcacgtcctttaaaaaaaacacacatatatatacatataactttaaaaagtataacggtaaatattattttagaacctgtattttatacaaattattgatcgaacctgtataatactttgagtttaattttcgttaaaatagaacataacaataacctaattaacttacaagttatgactaaagtgataagagtttttgtatttaattatttgtagtactaaaaatattatttcgtaccacacattaattgacatttatagggtcgtccaatttcaatatataatttaacaaaacaagaagttcaattaatatactttgcaaaatataaaatttaaaataatatttaccgatattaatttacgataaatataaatatggcgtacctagtccggtgaaagctagtaggctcctatgtaaaagattcaaaaacttatagaagacaatgtaattttgtggaactatatttggaattgctactgatttatttcctacataaacaaaatatcatttcaaaataataaattgattatgtaataatcatatataaatatattgaaagataaaaatgagtaccaaaaatttccaactcaccttggtttcttgtatcagtaggattctctaagtccttattttctggattatcttttgaattagctgtaataaatatatttatgcatataagcaataatttacaaaataattataaagagatagagagagagaatatatatatgaattattggaacattttctcacctttgtctcctccaatattggggttgtttgtatcattttcttcttcatagctaattctaaaagtagtcactgtaaatggaacataattataattagttagcaaaaatacccaattcatcattaatgtataaacatatcataatttttcttaaggtactaatcatatgtttatattgacatgcattttataattagggtcgagtctagattaaagcggcgta

SEQ ID NO: 26870 - DNA, 3474 bp, Cannabis sativa
aaatctaaccaggggcttatcaatacccccccctaaaaccttcaccttgtcctcaaggtgaaaatttgggaagcgagtatccatagctgagaaattttcccatgtagcttcaaattctggtaaagatttccacttgattaacacttcagaatcagcaagggtgcccgtggttgtaaaacgatgttgaagcactgtctcgggctcaacgtgcaattctaggtctgatgtaagttgcggtggaatcgtgggagaagagtggacatcaccaatggttcgacggagctgggagacatggaaaaccgggtgtattgttgccgaatccggtagctggagcttataagccacggccccaaccctttgtagaacggaataagggccatagtatcgagcagagagcttttcattggatcgtttggctaaggtgcgttgtctgtaaggtctaatttttaaaaacaccttgtcccccactttaaactcttctggacggcgttttcggtcctcttgagctttcattctctgttgtgcacgtaagagatgcatcctcaaatcatctaagatctcatctcttgcagccagcagctcatccaccgacgaaaccactgcaataccttttttataaggtaatatgggtggtggatctcgaccatataatgcccgaaagggtgtggatttgagagacgtgtggtaagatgtgttatatgaatactcagcccaagacagccactttgaccattgtctcgggtgttcatatgtgaagcagcggaggtatgtttccaagcatcgattaagcacttctgtttgaccatcagtttggggatgatacgccgtgcttcgtttgaggaatgttccttgcagcttaaataggtgggtccaaaaatgactcacaaaaatcctatctcggtcagtaatgatggaaatgggcagaccatgtagccgcacaacttcacgcataaaaaggtcagccactgttacggcagtaaaaggatgtttaagcttgagaaaatgagcatacttggtcaaacggtccacaactaccattattgtatctcctccttcagatttgggaagatcctcaatgaaatccattgtgacttcgtcccaaacttgtgctggaagtggcagcggttgtagtaatccagcaggtgaagtggtgaggagtttattttgttggcacactgagcacctacgaacaaagtcttgaatatcactgcgcattccttcccaatacaattcagcaatacgcttgtaagttttcagctcacctgaatgacccccaatcggactcttgtgaaatgcatccaaaatttgtaaaatactgttagatttttttggaatgactagacgatttttgtaatagaggctgccatctaggatggtaaacccatggtgttggtgttggcctgattgaagatcggcacggagttgtaccaaaaaagggtcagcggctatttcttgttgaatttctggccaaagtggccattcggttgtcaccaaaacctgcaagtcagcgacatctgtttggcgtgacaaagcatcggcgaccctgttactagctccacatttatactcaatgtcaaaatctaaacccattagtttagagacccatttttgatactccgttccaattacccgctgctccaacaagtatttaagactttgttggtcggttctaactaaaaattttttgcccattagatacggtctccatttggaaatagcataaacaatagccattaattccttctcatatatcgattttcttctagcttgggcccctaaaacttggctgaaatacgcaataggttgctggttttgaagaagaaccgcccctaacccatgaccggaggcatctgtttcgatcacaaacggttttgagaagtctggtaatgataggacaggaacttgagtcatcttaagcttgagttcctggaatgcctcatctgccaattggttccaattaaactggtccttttttaattggtcagttagtggttgagccacccgagcgtagccttccacaaacttcctgtagtacccggtaaggccaaggaatcctctcaaagctttcaaagttttaggtgtaggccagtccaacatggccttcactttatcagggtcggctgccactcccttgttggagattatgtgtcctaaataggatatttcagctttcccaaagtcacatttttttttgttgacgtagagctgattttgggctaggatttgtaagacctcatctaagtgtttttggtgttctttcacggatttgctgtaaaccaatatatcatcaaagaagacgagaaccgagtggcgaagatggggtctgaatatgctattcattaatgattggaatgtagctggtgcgttggtcatcccgaaaggcatgactaagaattcgtaatgcccatcatgagttcggaatgctgtcttgtgaacatcttcagccttgacacgtatttgatgataacctgatttcaagtccaatttagaaaaaattgaagcaccatgaagttcatcaagtaattcatcaatgactggaatagggtacttatctggaatggtgacacggttgagtgcccggtagttgatgcaaaatcgccatgagccatctttcttttttaccaatagcaccggacttgagaaagggctgttacttggttgtacgatgccagtggccatcatatctttcatgaattgttcaattgctgatttctgaaaatgtgggtatcggtagggtcgcacactcactggagatgcacctggttgtaaattgatggcatgttcatggtttcgaactggtggtaagccactaggttgagcaaagaccccttcatgtttgagcaaaatcggttgaaggaactccggagtatcgctggctgtttggttctcctctaggcccccaaaattaaattcaattaaaaggccattcccctctgcatacattgttttagacatggtcttaagcgagacgaggcttctctcaagagaagggtctcctttgatagtaacttgttggctgccaatttggaattgcatcgtttgaagtttccaatccgtgtgtgtcatccctagagttgccaaccattgaagtcccaaaataacatcagcactccccaattttaaaggtaggaaatcatcaaaaatttctaccccttgtaagtgtaggtggacatttttgcatatcccttcattgcgcatggaatctccattgcccattgtaacaccatattgactggtcttaacaataggaagcttgagtttatccaccaacacttgagagatgaaattgtgtgtggcgccgggatcaattaagatgaccacttcacattgttcaatcagccccttcaatttcatagtcttatttgaagaaagacccgctactgattgtagagagacttccactgtacccttgagttctgccatttctaaatcagccacaccctcgttagcctcttctgaaccttgttctgaatt

SEQ ID NO: 26871 - DNA, 2844 bp, Cannabis sativa
taaaattttataatgacaaaaaattattttttattctcacttttgaaaacacaattttgaaagctgaaaattgaaaacacagccaaacagtcttctagtttccaagaagatggttggtcaagactgaaatctcttttcttggccgaacaaatttgatctagtttttcaagaattcgatcaaaggcagccatcatggcatcgaaattattctccctttccgacagatcctcgatcctttcttggtcctatttttctgcctttagtttcattctgtcttcccagtaacaccaaccggtctaacacaattcaattcttgaaagaactatgaaaagctattttttattgataggagcaagaatagatacaaaattccaagtttcttgaagaacatggcaaactcccaaagtaatcttttactctaaacaataacacagaactcatcctatcctcataagactcaatctgagaatttataggctagactaacaaggacccttaactagccaaccaatagcaatctaagtattagacaacaattaaacaatcatctcagccaccaaggacttgataactcaacatccaaaatcctaaaccattatactattagactaacaacaaggtgtaacaaatggggaaaatggttttgtcctgtaatagtccaggttgtatctcttacattgaaatatgaagcttttttatgtagaaattagaactgattatgtattgtgtgagtttgtctagaatttcgttggttcttgaaagttgataattcatgttgttgctacccattcggttcaatttttcttttttctctcaatggttgtccattacagattgcaaattctgaattattgggtactacttagtttgtatttttcaaatgttaaattcccaatttgcagtgcttttggttgcaatgtgtcgaaagcatatccaaatcagaaaataggaaaatttatgtatacaagaatgaggactacataacatcaatgtttaccttcattttcttctgaattaactcatctgtttttcccttacagaaaacaccatccgctgcttgtcagctagccatgtccgtgattaagacttctgcagagaagcttgggcctattgtttgtgaatttttaacatcttgcattatgaatagagatgctgtacaaagtgaaaacaaagaattttaccatgaaatgatttttaaaattgcacagtgtgctcctcatatgcttcacgatatcattccaaacatgtctcaagaattactggtaagtaaactttttcaatctgtgttggtttttgttcaatgctttaccttacatcagggtttacagtcataaggaactcattagttgtattttatgtagtatgcatctttctgatatacttgaatttattatatctatttaattaattgtatgattgtatttgtagactgatcaggtagatgtcagaataaaagctcttactctgattgggaaacttctttcactgcctgagttccatattgctcaaaactaccgtaatcttttcatggaattcttgaaaagatttgttgacatatctgcagaagttagagtgactgctcttcaatgtgctaaaatttgctacatgacaaatcccactgggacagaatcacatgaagttctctgtaagcttttgagctattagttttctaattgtgtcatagtggctgattttactttttgcgatatagactatttagtttatgattcttttgttgatttgaacagctgccctcgagggacgactgcttgatattgatgacagggtgagagtggaggctgtcagtgttgcatgtgatcttgctaggtctaatttaaaaactttctcgcgtaaattaatctctctaactattgaaagacttagggataaaaaggtacatctacattatacattctattttcccaaagtctgcagtattattcctagtgtgggtttttgtcttgttttgttttgaaagttattttttaatattagtataatatgtatatttttgttgtacatgcagatatctgtaagggaaaagactctggataaattattggaagtatatcgtgattattgcaatgcatgttctgaaggtcgcatgacaatatgtgacgaactggaaaaaattccatgtaaactttttatgctttattatgacaaagactgtaaggcgttcaggtttgtttattcacatgtaatagctggttttacaaaataattcaatggttgtctggtcaaatgaaatacttccacaattatcacacaggccccaaaacatggagctcattttggtcaaagatttatttccagcacttctttctgcagaggagaggacaaggcactgggtccatctcttttcgctttttacacctctacacgtgaagtcattgaacttagttttatatcagaaaggaaggtagagtttcctatcaagagaaataaaatcatcgaaaactattatgctgtttgattcagaatactgcgatgaacgtgttggcttttattttgtttacaaggtctctactattgtaggttgcagaatgagatgcaaacttatttggctttcagagcaaaagagaaggtaaattatcattgccatttctctgaagttgtttccactttccttcctcaacatgatagcattgtgttcaggaactactttatgttaattcatgttgccgtaaatttttctcatctcttaatctagcttgtgcaggattatagagatgtgagttgcttttgctgaaactctactcttgattcctcgtcacttgcaactattgttcaatcctttactttgcttattttgtttggtttttttgacattcattatttgtc

SEQ ID NO: 26872 - DNA, 5435 bp, Cannabis sativa
  modified_base (2245)..(2247): a, c, t, g, unknown or other
  modified_base (2801)..(2804): a, c, t, g, unknown or other
taaaatatttccaacaataataatgtccttgtttgggaagaaattcaaaagtatagtgagaatcctatcaacatctataggtgaaaaatattactacagtaaaggtatatcccattgtcgttcttctgtgatgaagtttgacaccacactatgaggagagcccgagtaaaaaactggtaagaaggagctatgaccagagatccatgggtcagagtcgcaattaatgtcccttcctacaccaattttcaatcttaacccttttgaaagtaaatcctttccctaatgaataccttgtatgttaaagaaatagaatgaccaagatttgcatcaagaaaggagctttgaggatagtaacgacttttgagcaatttgcccaagagagaatcaagattctctaataaccatcaagtttgcttagcaagtagagcctggttaaaattttgaaaggagcaaaaacccataccttcttcacccctgctttgacaaagcaaattccacaagtgccgacgaatttttgaaccgttttcatttaaaacctaccaaaagtttgccatcatagactcaagttgattgcaaaagtatgttggcagccaaaagcaacttatggcataagtaggaatggattgaaccattgctttgagaagtacttctcggccccctgcagaaaaaaatttctcactccaagtgttcataagtttccaaatttttgctttcatatcactaaaaagctgtttcttatctcttctcgagtatgacggtaaccccagatacttctcgtgacactcacaaatgggcatgaaaagttttgtatggaagtaaacttgggcagctagtgttgtgttgggtgaaaaagacattacagacttgttcggattaaggacctgacctaaggcacggtggtaaatgtctaaaactcttttaattgcaaggcatgagtgctcattcgcttgtaaaaaaaataggcagtcatcaggaaggagtaagtgagaaatggaaatagcacgtcgagtaagcttaaaaccattaaggttccccacagcttcctcatgttgtaacagtcgagataacccctcagagaaaattaaaaacaggtacggtgacaaaggacaacctcggcagagacgtcgcgaaggagctaaagaacctgtaatttttacatgaatgagagaaactattagtagtcaagcaccccgtaataagagagatccattattctgcaaaacccattttcctcaatacttccttgagaaaataccattcaacaagtttgaacgctttactcatatcaagcttcaaggatgctataccattacaactcgcagtcttgttcttaatagcatgaaccaattcaaaagccaacaagacattatctgtaatcagtcgattcgggaaaagagcactttgagattctgagattacatgtggaagaacttgcttaaaattggccacaagcatttttgttatgagcttcaagatgacgttgcataggctgaggagtcgaaaggctttcatataatgaggcttttaatttttgggataagggtgatgaaagttttgttgaaaagtgatggatcagccccatcattcagtaccgccaagattgatttagtgactaaacttccaacagtaggccaattattctggtagaacatagcagacattctgtcaactctaaaacttttattcgatcccattgaaagaagggctgattccacttcaatagcttgaaattgctaaagtaaagtcatattcatgtcttcagtaatcagtgaaggtatggtgtttagagtgaaatcaaaagctacttcatcagtatcagatgctgaataaatgttgacaaaataatcttggataacagtagccattttaggtttagattgcaccttaactcctgcatccgtataaagaaacttgattttattatctgacttactagtagatgctttggcatgaaagagcttggtgttacaatcacccgaattcaaccaatcaatatgagggcgctactgccaataaatttcttcttgctccaacaggtcgtcaagaatagcttttgattcctttaattcagccattgtatcagctgtacgggttaggtgttgttcaaaacattaactttagaccatgtttctgctaattcctaatcatgtgagcccgtatctacgcttggtactcatcatatgtcattgatgcccatatctacgcctggtacgtcgccagatatatcgcatcacctaatcaggtnnncccatatattatgtccatagtatcatcactttatcattgcctaatgagacaattgataatttcaaaacctgtcatgccatgtggtacattatacttttcttacctcaagttccagtttaggtatgttagccgacctacttagagtacgataataaacttataagtgtttactccaaaacactgcttaataattgtaaaggaacacctagagtttcctacaaaaccttgaggtataagttcactaaaataaaacttatattttggctctaaaacatataccatatggtagatcttgtctcaagctttgaaacggtatatagaatgtccaaaatagacactcaggttcaaagttatggcaaaaatacgattcttgagttctcgagactgcccaaaactggctaaccgcttctaccaaaactggtaggtcggttcccattcggttgaccgattggtcaggggcaaaaaatgtgattttccaaatttacacactcattgaaatgctactggaacctatccaaaccaccccaaacttcatagggcacatatataccatnnnnactaccatacttacacaatagaaactaaaatcgagcccttaaatggaaaatgccactaatgtttagacttaagctataaaaacttctaaactcaatttttaacccaaaattacctcaattttaggaagaaaatatcgaaactagtcccatgactacccgagaacaattctataaggtcacaaccttcataactattctaattagcaaaatctctatatgaaaccaattattttaaacttaaaatagaattaaatcttaccttaagttttctctctctgagaatttgctatcctgctactaccagagctaagatcgctaggtttcggattaaaattcgaagataatggatagggagagataaaggtttcatcgaaggacgagggtttggtttagtttcgtatgttttttgtttataacttataacttatataaatatattgttaacgttaataataatacattaataataataataataataataatatatcaaaaaaccttttaattaatggttatcctatcagtttttagccactaagaattttctactttaagggcgctaaattaaattctgcatattcctaattactccaatacctacattatcaacttaccataatattcctattagttctatcaattaaacctattttgacatttctggcccctgatcgagcctctaaggtcaccaaacttgaatatatttttactccacatatagttcatattgcattcacacatgtcatataaatcttcaaaattttaaattacgcgtatttacttgattaacccaaaatataaatacaaaccctaattatttattattaggtttatcgaaatattacaaccatcccctccttataagaatttcgtcctcaaaatttatctgaataactcgggatattgctcccgcatctgtgactctaattcccaagtcgcttcctcgactttactattcctccacatgactttaaccagagggatcgttttatttcagagtactttctcctttctgtctaagacttgagcagactatttctcataagataagtctgtctggagctcaatatcatcgtaactcaaaatatgtgtcggatttgacacgtacaatctcaagatagagataagggagaaaaaagaaaaaagaaatgttagagtgaactcgtgctaattacatcgtcccatatttaagagcagggttagccctaggctaaggcaggtcaggcccgcgcctaaggcccactcatcctagggccctacataaaaagatatattttagtaaatatacatatttttttgaaaaatttttaaaaataccatttacttttttaataagggccaaaaaaattatttttcctaaggcctaaatcaactcagggctgaccctgcttaggaggagtttagcaacaaaaagaagaccacaactagggcagcgtcccgctcccagagggtttcctgcaatcagggagaaaatatctgctggatgcagcgtcttgcttctagagagtttttaatgattgatgtgtttttcgttcttttttatttgtgtactccctagaggagaacttgcacaagaacttcagatttataaaattagtcacgaaacttttaggtgacctcaagcatttatgaaatcataaaaataaaaacttaggtgtgtaaaaattactaggagagatcgaagctgcaatcaatgccattttcaacatagatagttgatagctttttaggacatggttgtcgttcgttttctctccatagtttagtttttttttttggtcgatctagtctgggtggcttattttcctatatccacggtgacctctaaaaattttccaggtacaaatataatttgcacgtgtggtgtgattaatttaatgaactcacaaacatacacacactgacactttaggtttatgaactatattactataatcgttggtaaccttcaacattcatcaaactatcgaagtaccactcaattttgtgaaattcattttcatgtatgatggtgtttgaactccccaagtgatcgaagaaatcatttccttggtcatatgccataccaaagtgccatttgaatttccaatcatgagccttggtggaattttttaacatattgaacattgatgtcactcatccgaagacttgtgaattggcagagttaactcattaaagagacaattgagatgatctgaaggccacctatccaggctggcctgtgaggtgcaaatgattgattaaaaataaagtaccaaaacaatgataattcatttctttattcattatattaacaatcaagttctataagaggacaattgcgggtctctagctaatttggaaaacataagtgaggcgactatgcaggcctcgtttattcaaaaaagattatccgctacacttgagtaaggcccatcatgtataaattatgtgaattctattcatcaatagagatatattatattgggtctcttcaaataaataggttacttctcatccactaacaaagtttatagtggaccactattgaagaacattgtgattttaaggatcgtcttagatgctccccggtctggtgccttggtaatggcattggaattaagctggggcaattagaatgcaaactatgca

SEQ ID NO: 26873 - DNA, 2734 bp, Cannabis sativa
tataaaagtgggtatatctcatagaatatgaaaatgaaggtaaaaattaaaattgataaagtaaagtgggtatacaatacaatttcctcaatttttggggggttttataccatatactgaaatttctaatttttttacgtttttactttgagatgatatttttttttaaatactgtgtaaattttatattgtgtattgtgttaagttttcactgttgttccacgattgttttctagttgttccattgtttaattactctgttttgttgttttacagttattttataaaaagatagtattttttttaaaaaaaaaaatcatgtgacagtaaaattataaaattttaaccaaaatccagtatttttgtaaaagctcattttttttaaggggttcatgttttgcatatgtcttccccatcccatcagtcatttttgacaattccgaagatcacttgtcagctataaggattttatatgtcaacttgctttaattgtgtcattagtagtcacctcaagaattcccatgacacttcacttttaatcctttttaagagagattttggtgactttagaacccttaatccaaacaagaaaggatgcttgtaaatatatccttaccactacaccacataaaacatggtattttttaattttttaagataatagtatgattattatttttttacaaaagatattattattattattactattattatcttccaaaaacaaatagattatacaaaaaaaataaaaaaaatatgatataataaaggcatccagcctaaaaaacaacaaaaaaaaataaaataaagtggaaggccatttggtattgaagactttaaaactctttttcaagttgaaaaaggatcgttaattaaaatattcacatacatgacaacaacttaacaaacttggtttctaaaaaaaaaccttaataaacttggtacgataatacaatcacatatgatatgttggaacttttcactctaaatctacactaatttaaattaattaaacaaatcgtctttttttatttttaaaagaaaaacaacattaaaaaaacatttacgtataaattaccttataatgataagtacacacaatttatatataaacataacacacatagtgatagtggcaaattacttttgataattgtaaagcgacctattttaaataaaaataattaattaaaattacttgttacataaatgtctatttgtatataaataatatgccaacatattattattcataatttatatagatgtgtagaactcagtgaaaacactaataatatatgtttgcttaactattatttatgtggaactcacctaaaatcactctaattttttatgtatgtgttgcatatttattaacaataataatgcatatttgcttattatctatttaattttactaatataaaattgtaatcatttttatgaattaaaatatagaaataattttagatttcattgcaagcattaatttgacaaataagaatttaataaaatctaaattatctaacataaattaatattttttatgcaccattaaaaaagtcttatagaagtaattttatttactatccagagatttgggattcaaatttaactcgtgagtatgggactttgcgattagccaaccctaatagaacagggattccctgcctaaatgtgaaatgaggtggggacaaagataattttctgttctcgaatattaaactacgcggggatggggatagcacccctgccctaacgaggaccagtttaattttttatttacttataatattatttttttttaattatttattatacatatatatttatgtgtttttgtagtttattaataaactttaaaatatttttattttgatttagataatattgtatattttaaattattaaaatctatataattttaaattttaaatttaaataaataattgggttccttgtgaaaattacccagctcaaggggattcaccgccctacccctgatggagaatatgcggggattgggacgaagatagcactcttcgcctattatacacgccccatttccatccttaccaagcatacaccattaaggactcgtatggtacaccgtgttgtattgtgttgtattatattgtatataggggcagagggtgtcatgaccctgcctaatttttaattttttctttaaagaaataaaaaaaattataatgcttacatgtattagcacccattaaattttggtctaactccaccattgattgtatagtatagtgttgggttgtattgtattgcattgtatagtattaattattataatattatgtttgatattaatttattttaataatttgggtaaaattatactatctttacgataataccgatgccgactctatctttcctcggacccaaaccccgaccttgaccccagatctcaaactcagaccccgacttagacattgaacacggacccaaacctcaaaccaggacttagacctcgaacacggaccccagaacccgactacaaactctaaccccgacctcaaactcggactcgaaccttaatctcgactatggacttcagtcttggactcggacttcgatcccgactacagacctcagtcttggactcagacctcgatgtcgactccgaactccaaccttggacccggacctcgatctcgactctggatcccaaccttgcactcgtatctaggtacaatttaat

SEQ ID NO: 26874 - DNA, 3418 bp, Cannabis sativa
ttgctgcgatttgatatttggttcattaggtgtttcaagttttgattagtcagatttggggtccgttgcatctttggctctgcttgtagtaatataactgtatgaatgtggaaggagctagctttttcggtttgccagtagtcaattgtagtttttctttgtgaatggatgaattacactatttgaaatggcatattactacttgtattgtatttaggaaaagttcacatttttaagtgagttcttatatttagttttaccaaacaatacttgcttggagttgctgctgaagtaaaagaagctaatttaatatttaatttaaaaaaggtggaaatttggagcataagggatgattagaatgaataagaaatactgttttaatgtagtaaatttacatggtttctatgtttcctcatactagtatgatatgtagccttgaatgttctccagtttctcaccgcttgtatgtttttccccattgtattttcttgcagctcaattcagataagagcccatttcagcgaacttatgctactcaggtgattttatgtcctgtattttttaatttaagattactgcattgtagatcttaattttattactatctgattagtggattttctttttgtatacaactaacaactcacaatagaagctagattaataaatttgcaaaaggttacgattccgtaaaatcttcaaggtatatcaaataggaagatattcacccgcaggtgatgggttcaagggttttctagggcttaagcttgccttttggttttatttacccagttagctatacgtaattagcactcttgtatctgaaagatgaactcgactctgtttaggataagtagttagaagttttcattgtaacttaaagatatctagcgtatttttggactaagctgaaagaagtatacggtcatcattctaggtttttgcgggtatatttctttttaaccctttctgctgcagatataatttttatgatattatagtatgaaaaatactcaacttcacctttatgggatcaggttaaacagttttatttagttatttttctatgctattctattactgaggcttggccgattctaagagtctgacatcaacaagctagactcttttgttgcttttaatgtagaaaatgagagcgtaaatatgtaaataatatacttatattctgattgtacatatcttgtattgatgaaaaatacattttttggtcatgtgtactaataaaatatttaactgctatcattcaaaatattgatttttgctgttgtatttaatattacttttccaataaagataaaaagatgtggagagttggcgcgcaagctacgtttcttcaaggagcagatgtcaaaggcaggattctctccaaagacatcttcaacacgagctgagatcaatttggatgacctagaggtgagctataagttcaagaatactaatacttttttttctttatttttctcctaatgctgtttaattgttgtgtttatgttcatgctaggttaaactaggggaacttgagtcagagctggttgaaatgaatgcaaatagcgagaagttgcaacgttcttataatgaacttgcagaatataagctagtcctgcagaaggtacatcttcttttgcatttttgtaattctcgttgcaactctcctcatgaaatatcatgagattggaatgtttgtattctttgattcaaacatgattaagttcattcctaatgctgatttttctactaatgggaaacatttaatttagaggaatgtatagtgtgccttccttattgccaagctgtcattaaggggttatgttgtttgtgaattgatcataaaatggatagatgtgttctcaatataaatgaaaagttaaactgagatgaagtaataacacggttattaacttaattatttcctacttttcaggcagctgatttttttcacgcagctcatagcagtgccctggagttgcagagagaatctgaatcacgtgaagcagatgattcgctggagacccctcttctactagaccaagtactagcgccagctttgattttatttagagctgtaaataatctttcaaattaaacaattgactcaatttggctgttctgctaggaaatatcgactgatccatccaagcaagtgaagttggggtatcttactggccttgttcctagggaaaagtctatggcgtttgaaaggattctatttcgtgctactaggggtaatgtatttctgaagcaggccacattggagaatcctgttactgatcccatatcaggagagaaggtgataacacttctttcaatagaaaaagttaaatagtcaaaatatagaaatagctgaagtgtcagtcataactcgaagtatttaagtacccctttctctcttctctctttcccacttaagttcataatgttattaacataaccgtttttttttttaaataaaaataaaaaaactcattccaattatctatttatttttgaaaattttctgtttcatttgttaactactttacttaagcaaaagtaaaatattatgctaattgcttggttgtcatttaaattttgcattcctctttttttttgacatgtgattgttaatgcacaggttgagaaaaatgttttcctggttttctactctggagaaaaagcaaagaacaaaattcttaaaatttgtgaagcttttggtgctaatcgttatccttttactgaggacctaggcagacaagttcaatcgatcaatgaggtaggggatgcatgcatgtttgcattatttgttatcgtgtaattgaaactaatatctttattttggcacgactttcttcattttattatctacacctcggtgatcttgcttctttgttagtcttgtctttgtttgatgtgggcacatttatctttgataagtgtgatgtagcacaaatctcgtcatactcattaaggactttattgtggtcacatagtctatcattgcttggttctgcaatttttgtatttgagatgtgtttggtatagttcaagctttttaacttgtcagaattttctggttatgtaactcttcaagcatgagattgacttaggctttcattttctaaaaaacaattaattgttactgtcgtggttattggctgacttgatttcttggcttagaaggcttctatactcgttgatgcaatgctttcactgagaatgccttactacgttgattacaattgaatgagttagtaggtaaattgaataggcatcaagcaccaaaagtatgagattattctaatgtggtagtaacagctataaagatctcatctataagtacaatttgaatttaactcaaagttcaggttaaattattggactcaagagaggttgctcaaatggacagatacatggttcgctc

SEQ ID NO: 26875 - DNA, 1460 bp, Cannabis sativa
  modified_base (1094)..(1101): a, c, t, g, unknown or other
tttttttttcgtctgaaaatttaatgaaaaataaattagatatataaagtggtggatgtacattattacattataatgataatgttatatatatatattatatatattgtatggttgggtaggtggttctcatgtaatattaatggtttgattggttttgaataagaagtggaactaaggagacagttgtagatgatgcttacatataactaagataaacccattaattatttaattaattaataattgattgattgattccaataatgagccaagtgagattcttgagcccccttttcattttaattaaatgttttagcatattattaattattttttatggtcttatattatacatggaacttgtttgtgtgcatataaaaaaaatactaattattcataaaatgtatttccacaaaagattaattagataaatttattgagttacatattattttagaagttataaaaattatctttaaaagaaaaaaaaaagatgaaatttataaaaattagaggcacagttggttggggtactaattgttggggttgttggatgcctatatatgcatgtgtcttgtattgagtttttttttatttttattaaaatcttattttatatatatttatataaaatattgaagagcaatatattgtttgaggattatcaattaatatttataaatgagctgcaaatgttgaagagatttttcattttatttgtatattgtttcttactattagtactagtggtccttcaaatatttattatgtttgcacttaaatcttttgatttaaaaaatatacaatttttggtgctttttttttttttttccaaaaacaatgtaatattgaccaagagcatatatatatatatatatatataagaattaatatttactttaagctaatatataattgtaaaaatcattacgctacactcaaaaaaaaaatatttacttagtatactgtatttgttttatgaaatatataaatattaaaatgtaaataaaaaaaaatagaagtatatataaaaagaaaagaaagttctgcaataaataaataaataaagagaattattttatatattattnnnnnnnnttttttaatttacagtttgagttgttttggtggtttttatgtgggttgctatgtgaattttagttgcaatttaggttactcaatcggttgttatgtgaatttccgtaaaaatacaaaaaaaaaaatactttaaaatataaaaataaaaaaatcccatatataaaccaaaaaaaaaaatatcatttttacaaatttttgcatgtgcttgcatcatagtttccaaaggatggtataaaatgcaaatttaggacaagtttattaattatattgtaattttttttatgaacaaaagagattatttcctcactcctttggtctttttaataattttggagaccacatatcacttataaagattt

SEQ ID NO: 26876 - DNA, 1919 bp, Cannabis sativa
taataataataaaaaatattttttctattatatatataaaaaaataattattattaaaaaaattttcatttttatatctcaaaatagtttttatatatatatatatatatatatatatttttatagaattctacgtagaaatttctattgcaactagctctgcaacttaattcgcaataaaaaaatcgtatagcaacctacataaaagctactagagaaccactttagaaacccaaataataaatttaaaaataaattaaaaaataatatataaaataattctcttaaaaaccttattattattatctcctaaattattttatctgagaattttgtcttttaatttttgtatatgttacattcctcaattctttaaacaatttatttatatggcactaatttaatttaatttaaaagtttaaacaaaaaataaatataaataacagataataaactataagagtatatatgtattcttaaaactattatttatatgtttaatatcataaattaaattttaattaacttaaagtaattaaataaatacatagactataattatacttgtaattcatagttgtaccaaattatattctaaattttgatatgtaccaaattattttaactcccaaactttgacatataccaaattatgttcttgaaaaattattaaaaatctcttctaaacttttgagattgttgaatgaaagtttaaaagacatgatttggaaatgttaaagttcgaaagacataatttagaaagtattataatttagagaacataatttatacataaacaatcactaaaaataaaattaaatgaaatcaacaaaaattcttaaaataaataatttcattaatttaagcaaaaattttaatcaaaaaagttcaaaaatatagtattcagtgcaaaaattataattatcctattctaatttttatattattaattattattaaataaataaataaataaaaaacagctgcttcgcaacaaccctcactcttaaacacttccactactattacatacaaacactcaaagttcaaaacaaaaaaaagaataatgttaccatgcccatattaacccacgcgccccacgcgcttctccccttcttcttcttcttactttctttctcctcctcctccgccgccgccgcctccttctccgacgacgttgatcccaacctcccattccaaaccacactcttccaaccaaccgacgccgtttcactcataacatttaaatccaaagccgacctcgaccacaaactcctctaccttctcaacgaacgattcgactactgtcaatggcaaggtgtcaaatgcgctcaaggccgagtcgtccgtttagtcctccaaagcttcggtctccgaggtaatttccctcctgactcactgagtcgactcgaccagcttcgcgttctcagcttgaacaacaactccctctccggtccattacctgatctctccgctctcactaatctcaaatcgctctttcttgatcgaaactccttctccggttcttttccgccttcgattctcactttgcatcgtcttctcactcttgatctgtcgagtaacaacttcactggtcccattcctgttgagattgttaagcttgatagacttaattcgcttagactcgagttgaatcggtttaacggaactttaccgccgttaaatcagtctatgcttctcgtctttaatgtctccgggaataacctcactggaccgattccgttaactccggcgctttcgcggttcagagcttcgtcttttttgtggaacgatgtcggtctttgtggagagattatcaacaaggtgtgtaactcacgcgctcctttcttcgattcgccgtctccgtcgtcggcggcggctcagcaaccgctggttcagagcgctgagtcgtcgtcagg

SEQ ID NO: 26877 - DNA, 2974 bp, Cannabis sativa
ggtttctcgttaatgtacaaggcaacaattaatgtatctttatcttacgtaggaccttttagtcggcaagttgtaaatatactctgtcaattctgcgttaatgagttattcaattttcaaatataattaccgttacattcattgattcgtattcttcctaatttgacacgtgtcctcctttcaaatgatagccaaattttgggtatcacaattgccgcttaaaaagtgttttttaaatgatcatagaaggtatatttgtcataatctctttttgaaattttgcatgcctttgattttggtggcttcatggtttcaagggtcattattagcattaatgactcgccctttcaacgtctagccgtgagatcttccatcttttgaccatactgttactgggctcaaaatataaaatggtaagaatctattctcctccatttccatctttaatactcttactggaaacttgttcagacccgctcttcgactcccgatttttgaaaaaacttattttgctggttgttatgtcttcatttggagaattgcttagcatccagcctttcaacttcacaaagtgagtatctcattctttctttaattttactcaagtgatgatccaccttacacctcattactttgtttggtttaatatccagggttcatatatatatatttttattaagcatagtttatgttagctatattccatagactcctggtttggtaaattttatcgagaaatcgggattgtcattctcccgtggagatgtcccatcctggttcagaaatttatcctccaaaatttgcaccaccagaatataccaaacatctatcctccccatatacacccaaaaattttgaatctcagtccaaattagaaatgaatgattccaggattgaacatcatccgattaaaccaaaccaagaagaaatggccaatcgttataggcgattcttataagagatttctgaaggtaagcatcgttctttgttaattgtggcctggtttgaactgatccttttttttttcatttacaaaaccaatgtttttaccaagcgtcactctttgtctttgcaggaatggatatagattttgagagcatgttcaaaagttctacccaagccgacaagagattcagaaagaaggtagtctaagccgatgaggtctcaaattctgccaaagaacctaaaaggaccaagattaaggctttcacgaggacatccttgagcaagcttattattgatgctgacaagtctctcgaggcagggaatgaggtccttactgcggggattgaggtctctgttgtaggggttgttcaggagcaacctacccggtcggcacaccaagtcaagttctctagttctcgtcggtagatggttctcctcgagccctcctgcccctaccccttgagtttgggactgaggggtctcaactgagctcacaacacggcaccaacaattggcgcaacctcttgacacttaggtctcacgaatgggatcttgctattcgcgacaataccgaagatttgaccaaaataagtcatgaacttctacatcaggtcaatctttgtacttctttgttctcactcatccctactcttatctttcttactaacttcagtttgtcctttttcctcaggcttcttttctcgcttacgctacacatcaccggtcgtctcaaaggatcgagatgctagagacgcagcttcaccaaattaaggaaaatagcgatgtcgtagcgaagaagtggagcaatgctaaagctgaggtttctcgcactaaggatgaagcagaaaagcaacaccaagctgaacaacaaaaaatcaaagaactcaagaattcggttaaatttctccaagctagtctcgttaaaaaacaagttgatcatgatcaaaagctcaaagagttggaggctggaaccaaagaaagggtcaacaatatcggtaggaggaccatctatcagatttggtcagccaaccccgagttagattttaattttttgggtgataaggctgaaatcatgctttcttactgcgagaagactcggaaaaaagaattttgtgaggaagaagaggttcatgcagaacaagaaaataccaccaagtcccctatgataatgtagacttggtattgtatttatatttatttattttttgtttaagaaaattgcttaatggtttgccccttttggcaatttcataaagacaatttcgcgaagtttgttcgccaacttactttttatttatcttaaatgcctcattcctttacattcaaacttaatatatttatgtttgtttgcgttttcattcacaataattatattttgatcaaatgcataatactcttagtctttccatcgctcgtatttttcctatttaagtagttagtaatctactacgtgcacgagcagtttattatctgtcgggcttttgatttgtgagcagttatcaactctgcctcgcgataacagttataatctgtcttaagcaaacttgaatatactatttgaggattgatcaccttgaaagatttgccactttgtatattcttgattgcttatatgaatagttagatcatctattcatataagtacttttgtaaggacacattgatatctcatttaatactttcctatattgtgcaagccgttaatattcagcttcacacatgttatgagttatttctcatttataacttttcattttcctttcttgtcaaacaggttctaaatcaaaaagttacgatgatttgatccctttctcgttagaaaggtttgatcaaaaactttaaaaaaatttaaagttgtgggtttgcactatatcatgtatttctagataaatttcggttaatcatacacctataccccttaagtaattttaaagagtaacactttgtaattacttgaaaaaagaaatgattaactttattcacaattgaagttcaaaacattacttccgcaatgcgagttacaatcatt

SEQ ID NO: 26878 - DNA, 1738 bp, Cannabis sativa
ttgctcctttctccatatactccctctaccactcacataaatattcctctgcttatatatccaccgacaccaattgactggtactgaataaatttagggatctaatttcctaatttacaactatactgatcaatatggaaaacttaattggtgtgtcgttttaacaccatttgtataaatgctaggaagactcttaaaatatgtttatatgacttgcagtcgacacacgcccgttttcctcctcttacgatccctactggcctacatagtcaatttgttctgaattctgatgattactaactgggggaagtgttcactttcagtctgacaaaattgaatactaaataataaattagtactaagacttggcacaattgaagaaagaatatagtatagggacgaaactgtttaactttacgtacatcatacatgtctctatattttagtgctatatatatggtactcatgtatgtaaatcatctttatattgattggtaattaataacgaacactaatatgataaaatgaaccgaaccaaatagattttcactgcatgaattttgagaatgaatacattaaacatatgcatgattccacagtgtttttatatattatacatagggatacaatttcattatctaaacaatacataaaataataacttaaaaaattacaccaaataataaaataaaaaatccaataatttcaaaactagtccaactagagaccagagttgaaaaccaccttagtggaaggcagccatgaatttccaccaattaaattggcaacagtgaacttagaagcatcactaactccgatcaagtgaaacccaggccagttgaccctttgaccagtcgcagccccgggtcccacattagcatactcagcaaaatacagagtactcagaacagagcttccagaaccaggccactcttcccaccctttaggggagatagcctcatcaatgttagactgcataaccacagctctcgaatacgacttccacggccgacccaggtaagatttgaacgagtgttttacggattcgaattctgcgctggctgtgatacgacagttttggacagagaacccggtgttttgacccgggtcggatctgccgtgggctaggatgacgttggcaccacgtggacggcggagggcgagttcgcagttttgaaatacggcggcagcgttgccgaagatgaaatcgacggtgccggagatgtcacactcgcggtagaattggcggagagcgagagcgtagagtgtgtcttggtagccggcgatgctgcacctgtatagggctgatcggtccgaggcgatgtacagagccaaggcttgttttccatgtggtcccgccgtgttgtggaacccgatgtcccgtgcgatgaacccgtcaccggtaacagctggccgtaatttaaaagttaatattggttgattttgcgatgtacccactacttattttggtatccggacaaaaattttagtttaattgttttttcatattcacgtaagatatagctatttatcatatttacaaaattttgagaaatttaaaataatttataatacagaaaataatgttcaaataatttattttatactcatataaaataaaatagttacgcatacaatacactgcttgaacataattttattttttaaaatttgcaaaatatcttaaataactataatttaaaaaaaatttgactaaaaaattattttaaatgctaaa

SEQ ID NO: 26879 - DNA, 3122 bp, Cannabis sativa
ccacaagttcatctctctctctctatataaatacatacaaacaaaaatgctatcctgttcaccatttatcgaaaaaaaaaaatgtaataattggattttaattttttattttataagtatgatttgagttgatatatggcctttgatgttagggaaaaaaataattaaatatatgggtcctgtcctgacatctcattggatttatattctgtatgactcttgtataaatgagggagccattcaaactcaaatcactttatcatttcagtatggccacctctaaataatatttcattctcacgcatttaatggattagttatatatgtgaatagtagaaaaaaaattaaatatctttcatttaattaaataattatacgataaaataataaaaaggtcctacaaaataattatataattttaggtaataattatgaatattttatagcaatcaaataatcaaaaatcttaggtcagtcactaatatatatatatatggtattagtaatttgcaaagcatgtttgcttaatgttataagttgttattactccggctttctactagaagtgttggaatattgtggagagtgatgtcatcaattgtgtacgtaagttctttgaaaatggtactcttaagaatgattgtgatgctgctaatgtcattttgatcctgaagaaaaagaatccatatcgtatgactgatctccggcccataactttatgtagtgtcatgtataaaatcatcactaaggttatggtgaatagaatgaagcctttcatggatactattgtttcagccaatcaaagtacttttattcctggccgtctaatctcagataacattcttgtttcgtttgagatattacattatcttaagaggaaaagaaagggtaaagatggctacatggctttgaagttagacatgagcaaggcttatgaccgggtagagtggggctttctcgaagctatgctacgaaaattggggtttgctagttattggatccacttgattctaaggtgtgtgtcttccgccagatatcatgttatccacggtcagcatgaaataggtcctattgtcccttcacgaggtattcgtcagggtgatcccttgtcgtcgtacttgtttattctttgcgcataaggtttctcggcccttctccgaaagtatgaacaacgtggttggattcacgggtgtaaggtggctaatgggcccccccgtatctcccacatgctctttgcagatgatagttacttgtattgtaaagccaccaatgaagaagctctccgaataaaagaagttctctagaaatttgaattagcttcgggtcaaaaggctaacttctctaaatcttccatcttcttcagctccaactctagtactgaaatgaaggataggttgactacgctctgaggcatgtgcattgcccctgaggggagattgtatcttggtcttccaagttcaatggggcgaaacaaaactgcagctttgggttacttaaaggaaaagttaaggaaacgactcctagcatggggcactaaatttctttccagagctggcaaggagatccttattaaaacggtggctcaagcccttcctagctatgccatgagtgtatttttactttcccttgagatcattagagacatggaaagcatgatatgacaaaatactggtggcagtcctctagtaattctccctcaagtattcattggatgtcctggaagcgtctttgtggtcacaaaagtaagggtggtatgggttttcgtaaccttcgggactttaatctttctcttttgggtaaacaggggtggcagctgatggcaaatcaggattctcttgtttcccgtgtgtttaaagctagatatttttcctatggttcgtttctcacggctactattggtccaactccaagcttcgtttggcgtagtattttggaagctcagtctctagtgaaacaaggctcgatatgggttattggtgatggaaaaaacatccctgttttgggggaaccgtggctgcctgacgaagaaaatcctctgattatttcaaaccatcctaggctccttaatgctaaagtttgtaacttgctcacaatggatgggactgagtgggaaactgatatcttagaagacttgttggtgcctcgtgacgtccaactgatacagagtattccctttcaatctcagcctggtgaagatgttcttacttggttgaaagactcatccgggatttacacagttagaagtgcttacaagttacttcagcaaattagtggtgacttcactctagacgtctcggctgaggataagttctggaaaaagctatggcaacttaaaactccttcgaaaatgaaaaatctagtgtggcgtgcggctaaaggttgccttcctacaatgactcaactgttgtcaaaaaaagtgaacgttagttcggcttgtcctatttgcaatatggatctgaaactactcttcatgctcttgttgtttgtcctgctgctgctgctgtatggaaccgagtggggataggaactttgttgcactagcaaatgtccttccttgactggtgtatggagcggtttgctatgttgaatacagaccaatcttgtgtgcttgtggcggtctgttgggcgctttggaatgctaggaacgataaggtatggcaaaacaagtccgtaggagtcgagagcattgttatttcagctacaaactaccttaatcaatggcgtattgctcaaaaatcaagcaatgaattgcttttctctgggtacataccgggagacggtgctgagcaatggaatgcaccaatggataatagcattaaggttaatgtcgatgcagcagtgtttagtgattcctcatcttatggagttggttttgtggcaagagattgtgtgtggcttccttgtggagggtggtataaaactattccatggttcaactacgcgggaagtggctgaagctattagtgttcgagaggccttaagctggatcaaggatcatccgtggaccaatgtcactttggaaaccgattgtctctcagttgttcaagctatgcgaagctttatgtccatggtttcgatgtttggcaaagtgattagtgaatgtaaaactttatttcatgctt

SEQ ID NO: 26880 - DNA, 2094 bp, Cannabis sativa
gtttagccgccaatatcccaaaaagaaaatatttttaaaattaattttttttttaattttctaaatatttgtatttatgttttaaaattaatattacgtggatcactaaatatttgtcacgtgtacaaatgtgtacacgtggtcagtccactttggtacttaacagtaatttttgaacggaggagtacagggcaaaacagaatgtgatgagtttaggtagttttactcaaaaaaaaaaaatcaatttttgtgattaagtgttaaaaaatttaaaattcaagtggtttaacactaatatcccatttgtaaaaatgtaaaggaaacgtaaaagaaataaatttttatgtaagaagctcgtaaatatgtacatgtataatatatttatatgtattagctcacttaccataaggagagtctgtgcatgtggtgaatacataatagaatttttgaaattggctgcatggaatatattaagccaaaacagctacagggcaactcctcttggcaaggcatccatatatacatagatacatgaaataatgacagctaatattggaaagtatacccatatattagaatcaaaacattaatattgatgcttgccaaagaaggcatgccctatggctggatttgcttactcaaagtctgaaacaaggtttttcttatttcttgtgcacttgcttggttggttctccaatgacttattaccaacccttatatagggcgtttaattcataattcaaaaacataggtaggcaggatatgctgacaatttatacgaatatccaatattcaaagctggcgttttgggagcaattatgggattgattattcatcatgtctctatgccctggtcttgaaaatgatctctcagaaatcagattctccacaatttatactttttcattcaacaaaatcagttgaaaagttgagaatcatagatgcctaatattatccctgccttttaggtggcttatacctttctttctatctctcgctttccttcttttttctttctcatagtcacagtaaccaatataacgccattgtgtcatcacttgttctaatgcatttttttcttttctctcttgtaacacttggtgtttcatgttaaatttatagtgatgagttcaaactgtaaagtatgaacaatcaggcatggttgttagggtttttgattggtaagctcaatgtcattgtttgagtgatctaggccacattgtatatctctaaatatatatatatattttatcttttttgattgtggtattcaatttgtgtattattagtttgtggcattagtactatattagtactaattaagttgtacaagtataaaaaaatataataataaaaataaaagttcaaattatattttcaattgatcaataaagagacaagacttcagcctttagatagaatgataaatgattctcaactataaaagaagagtatttaaagaaatgaagaaacagatataaatgaagctataaataaagttggtcaaagagagagaataagaaccaaagaaattatcttttcaccacaatgaatctatactatctttaaaagattgagtttgagttttttttttaaaaaaaaaaaatagtaaaagagtcagccatacaatattattacgtaattcaggagttaattcataattttaaaaaacacaacctgaaacaaaataagagcaattaatttgaatttgagtttgagtttgagtgagtttttaatttactcaaattattatgtcaattagtgcagttaattattttgtctttttgtgaattctattatatattctaaatattttataagttagtatagactatctttaaatgagtgagtatgagtttttaatttagtcaagttatttttatctataagtgcaattaattatttttccttttcgtgaatatttttatttaatagctatactattaactaaagaaaattaataagcaatacttttaaaagtgttgtctctagggtgttgctaaaagtgcatatataagacaacacttgtaaaagcgttgctatatgttgtaacattatgaagatcatataacaacactaattataaaagtgttg

SEQ ID NO: 26881 - DNA, 1422 bp, Cannabis sativa
caaagttttaatttttggatttcattttggtttcttgtgttttgttttgttatacaggttaaaagggtgttaaaaattggtgggaagtttatttgccttactttggcagaggctcatgttcttggtattgaattttaaggaaattattttcaacatcttattataatgtctttcattttcttacaataagggcacaacttttgtcagtagggaagtctaagctctttatttttagtacatagataaattattactcatattttgttatataactattaactatgtagattgtagttatagtaggcattttacatgttttcggaaattttaaataatttacagtgttgaaaagaatgttcaatcattagtttcactcatggttatttttgtgaaattgattactttaaattcagttttcggcattgtaaattattcatttttttttttcgaaaataagtgggatgtctgctataaataaccataatgtagaccttcatataaaaaagattgggttataatttttcattttcgaaaatatagatgcccctactagtagggataaaagtgataaccctactatagttcctacatataatattatgtatatagtgctcatgctaatgttggattaatcatgaattatattcttgtttttgctgttctcatgtttattatgtggtgttgcctatccttagtgtgttcaatttctccatgttcaggtttgcttttctctacatttcgctttggatggaaaatgagtatccatgtcatacctcaaaaaccatctagcaagcctagccttcaaacatttatggcggttgtggaaaaagagtcatcaagtatgctgcatgagataatgtcatcattcgataattcctctcttgtttgtagtggagatcaggtaaaataatctgtctacatgttttctctaattttttaaggattattgtgccttgaaatatgataatgccatgagggcgttagtctctctcctgccgtttcctatttcaaggtaattttatttaatttccgagcatgacataagctgctatgtttgcttcaggcccgtggtctctttgaggctcttgagagtgagaatcaaattcgtagagggaactctagtggttctgatatctcattttctcttgaaggcttgcaacttgaagataagccggatttgtcaaagctcagtgaaggccgtcggttgcagcttacattgggaagacaagggagctcctgcttcatttataaagctgttcttctcgactctcagtctcagtctggctcatttcaataccattgtggggtttttattgtacctaaggtttgtctcactgcgcctactacctgtgcactcaattgaaccagctttcttaatccttacacatgtagattaagagtctcaataccaagaggtctcat

SEQ ID NO: 26882 - DNA, 12600 bp, Cannabis sativa
  modified_base (3739)..(3747): a, c, t, g, unknown or other
  modified_base (3805)..(3806): a, c, t, g, unknown or other
  modified_base (4137)..(4137): a, c, t, g, unknown or other
  modified_base (11889)..(11891): a, c, t, g, unknown or other
taatatatgtatatatctacatataaaaaatttgatgtatacatttgagtgagggctttagcccacatatgggctaaagtccctccgtccctgcccacaaaggaagccatcaagaggagacaacccatcgccctgaaaaagaacctcaaggatcgcaaagaactaacacgactgaaacacaacgttctgggaggaacgatggaaatttcaatcctgctggtgaacgaatcccaaagagaggaagtgaagatgcttatgatcctaccagatatgccccactggtagaattagaaaacaggcaacttcgacaacgcctggctaaatcaaactgacaaaatattgagttggagcgagaagtcgcggcggccaaggctgcacagggaaccattcctcaaactcgacctgatccatctgtaagcagaccacgaggaagacctcaaggttctaggactaggaggcaagagaataaccaagggaatctcacaaatgtcaggaagaacaatcagaatgcgagggatgtcccaatagatagagaaaatccacacaacacaagtaatacaagaaatcatgagcatcgacgtgatgctccaagaactttccatgggtttgcaaaccagggaaatgaacaaactaatgtacctgagtcatctcgcatgaatgcaaatgcaagacaatcgcgaccaggaaaccaggaaatctctcgtaatgatggaagaaatcctaaaattaacttgggtccggtcgacccccaaggcatccacaaaggccttctcgcacggacaaagagaatacacacacttacgtgagtaggggacgtgtgtcaaatctctttcagagaagaggaccaatgcgagatgagacacgtgaagcaagttcgagtacaagagagtcacgatcctacgagcatagtaggtcaactggaactaatagactaacgcaagacgagaatagatctcgacgttattttactgaccaagaaagtatcaataactcgcgtagttattagtctgaaagttactcagggactagatatgtgagtaattacaagcagaggcattgtgaacctaatctccgcgagcgattaaatcgaaggcagtcagaccttcgtgagcacttgaatcgaaatgtacctgatttgcgtaaccaacttaatcaaaacacaaatcaataacttgtggatcccattcagttgtgagtaatacaatcggagaacaaatttaagaaatatcaagataaagaatataacaaactgcatgtcaggatatgattcaaatgaagaaactgaaccattccaccctgacatcctaaactcacattttcctcaaggatttaaaaatatgcatgtctcgcaatatgacaaaaccactacacttgttgcccacttaaataattttaacaccataatgcgagtaagcaacgtttcaaataacttgtgatgcatattatttctaacttcattgacaggagctgcaagtagttgatttgacaaattctccaaccattttataacttcttgggagcaattatcgaaggatttcaaaaagcaatttcatgctgcgagagattgtcaaccagatgcatcctcattaactaacatcaagcaacaaccaaaagattcccttaaagcgtacttgagtcgtttaagtacagttgcagctaaagttagaaattttaatgatagcattcaattaacaacccttcaggttagaattacaaatgatttatccactgcagggggataattatgggatgatttgcaagggcatcctgtaagaaatatcaatgaatttaatgaaagaggatagaggcttgtgcgaaaagaagaagcacggaatggaatgaagctgttaaagtcaagctcgagagataaactcagcactagcacaacaacagcgagcaccgtgactacgaaggtagaaaattcgaatggatcgaatgctaggagaaaggataagtcaagagactcatccaagaataagaagaaacaaaagaagcatgagaagtatgtacctatttatttagtgtatactgaattaaatgagactcgcaaaaacatttaccttgccaatgaaaattgggtcacatttcgcagactaaaattgatgaggcatgcaaagaataagcgagatttaactaagtattaccgtttccacaaagatattgggcatacaaccgagaaatgtcgtcaattaaaagatgaaattgaaaatctaattttgcaagagtattttaggcaatacgtgaagacacaatgaaatgagcctaatcagcccaataacccaaataattcaagattacaacctccccccgtagagggcggtgacattttagttatttttggaggaccacacctcctaggaaatagcaatggtgcacaaaagaggcacataaatgaggtaaacgggatttttcagagtttttatcacaaaggctctcaatgaaagcatcaaactgttaacgcaagttttcgttaactaaattaatagcctttatttttgcaataaatacactacaaaaataaataaataataaataacactagatattttacgtagttttgtagttaaaatttacatattccacgagtccttattattagggatattttctgtaatacagagtacaatctcaatatttgaataataagattttctctctctattttgtcgtctctttttctatggattctgcccttatttatagaaatacagattggcaattattctttttgagattgattcatttacaacggttaataaaatgtggatattcttcacatttcatttattcacacatgggataatatctaatagttacccaaccgctctttattattatcctttagacggttatgctgactaggagagttatatcttgtcaattgtgggttcttcttatgcatctttataggataaaacattaagtgttagaagcacctcatctcgttgtatctcttttatttgcattagtgatgcgagatgatttccacaatatgagtaacgtgaggcggttgagtgttgctacttttattctgctcgtgtgggagaatatcctcttcttgtatagattatcctgagacagatatatgtctcatcaaccagcttaatagttattattcttgactcgcataagactaagcagtcaataagtatgaacatttctatcaaacttgtatttaattggaacaagttatttaaattgcatttaatgatacaatgccgttattatattatttgagttagttcaaattatttatattggacatgtgtcagtttctggtacatagctgatttttgagtataataataataataataataataataaacctgtattgttattggtaaaatgagattttctttttatcaaatcattttgcactttaacctaattttgataatcttttcattctaaaaaaatgataggatgtctatagtattggagactattttgttgagaattatcgaaactagtccaaagtgtcaaattacttatttaattgttattattatcactacccttaacataacccaatttaatttatttctcattatttaactgctttagattggagggaagaatgtttattggatcacatctaatatttttagggggaatttacaaaagtactggaatttgggttaacttttacaaaaatactgtcacacggaaaagttttcaaaaatactatgtttttataaaacaccagtagaacaaaaaacagaacaactcaaaacannnnnnnnncaactaaaaaacaccagtagaataccagtgaacacttaacacagtatactgcagtatnnaacttataaaaaaacacagtaaagtaaaaaataccgcctggcagtatttttgtagtataccatgtaaattttcctatttttaggcctatccatattcgatccaattatatattggatgttagaatttactatctgatctgatttaattaattttaatcatccaatcgatccaacattcattggatgttgaattagatcggttttattcattgaatgtatttcatatatatttattagtttaatttagcttacctattatttcaaacttaatataatttagatcgaattcatctaatattttaggtgcagtatgtattggattggactgganccatccaatccaagaaaaaaaaagagtaaaattttaatgtaaattttcaaacatgcatatagattttacgtataacaatataaaatctaattactcatataaactaaatgaaaatactaattagtttgattggatgtattggattttcagacaccacatccaccatctgatccgatccaattatatatttaaaaataacatccaatccgatcacaattggatatctaatatttgactgtcagttctcattagattggatcattttatccaccattttgttgagtattagcgaaattagtccaaagcgtcaaactacttattcaattgttattaatatcactacccttaacccagtttaatctatttctcattgtttaactgctttagatgggatgtttttgtggggagaaccttgaaaagcaataagagaccactaaacaactggagtatcgtatgttgaatatgaatatcataattggcgggaatcattgttatgcaacgtacgaaccttttggcctacatatataacaataacataatttattggttagtaaccttacaaattatttaaataacaagaacttaaactagttgtaaagatgtgacattatgattagaaacctgcacataaatacattaagtgttaagaactacaaattattaaataaataatcaaaattaaaaagagattaaatgttgatctaaccttgttgtcatttataatagatatgtcacttacattgtttttgtttgctagaaagaatttgaatttgagattttaactcatttaatttagatttttaagcttttttatatttgcattgatttcgtttcctagaggatttgtttgcccacacatcagatcggcaaataccatatttatacatgagaaaagatccatactttttttacccataacttcaaaagatgtgtcattcatactcctttgttttactaaattttcattcaattcttctttcttttatattagtacctatcattaatttaatataaattaagaagtatcataaaaagatgctcaaaatataaataaacaattattccatcatatacttcttttgttatcccgttgtaaaatgtaacaacaaaaaaagcaatggtatgattaaataattcttaatttatgtgttttttttaacttatattacattagtgataggtacagttacaatagaaaaaagaattgaacaaaaatgtagtaaaagaaagtatgaatagttatgggtaaagagaaatacgtatttgtttgcccatctgatgtgtgggaaaacaaataagctaggaagtaaatcaaaagaagtatataaaagctctagaatctgaattaaaagagttaagatctcaaattcaaattcattccagcaaataaaacaatgcaagaaacacatctactatacatgataagattagatcaacatttaatctctctttaattttgattattattcaataatttgttatgcttaaaattgaatatatttaacgaggaatctcgacaccaattatgattttcatcttcaacatacaatactctaattgttcaggtaaatattatatgattatataattttgatattagttaaataaaatgaaaaataataataataataacccttatgtgcacaagcaagggctagaaaacacctgaattgttttattatatgtgcaacctacatattcccaaatatgaaagcgaatagaataataagtctgtctttgacatagcacagatggaaaatgaaagtttgcaaacctctacaaaggtgacgatgcttttaaatttttcatcattatttgtttcgttgagtttgttttagctcagctcgacggtccaattcatattgtcctttacaagacccatctgtaatctggtaagcaccgagtagagttgctgcgacacagcaccaacacctcccttgttgtagagcaccctgaacgaacaaacaaacaaacaaaaattacaaatttgaaatgagttgtaacttgattgacttcatgtgaagtgggagataatcctttcttgtatgtctgcatttttcggcactatggactataaatctttattttgaactgaagataatcaagtcaacaagttggaaatcgcatgcgtacaggtcttggattagggtggttaagaattactttttatcttctaatgaaatttctctcgtggtatttatgctgacaaaacactctcattctaaagcatttacctttcaccgcgataagtaatacttcccacaggtgatacaacaacagctgttcccgtacagaatacttcgtccgcatcgagtaactcatcaacagtcacaagacgctcctcaacctgcattttatttaatgaacattggacactgaaatgaatcaaaacttgcaaaccacacgatcaagacaaactcatactgagaaattaagtaaagcaaactaacagtgatccatgtcaggagatgcaaataagatagtggcagcaaaatcaaaaggtaaaaaattaggtgatggttaaattatatgttgtaaactcagcaggtacataaaataaacatttgaaaaaaaagatctggcatgtgtaaacttacaaagtagaaaagaatttattttgaaattaagtttctcgattgacccaacaataatttatttatttatttatttatttgaggaatagaaaacaacagcaattgttctcatttttatctgagaaaataaaagcttattttattacttcgaaaagaaagaatacctgaaatccttggctacgagcaacatcaatgatactctttcgagtaataccaggtaagatcgtccctttaatttcaggagtagagataactttaccctgaggaacagatcagaaatgagattataatcgggaatccctaactatgagaaagggcaaagtgataaatatttctatatatagcatgtatagaagacaaaagacaaaacttaataaacttcttttttgcattccctcgtacagcagctctttatatagagctattgactcatcactaatcactagaaagtagggaccacttgttcatacatgatcacatcataccactaaactaacccctacaaataggtagcgtctactacatgtaacacattatttcctacagaataggtactcaccaactaactgaattattactactttcttccgtaaatgctaactaacaataaacactaatagttctcaacaacaaaaaaacaataaacactaataaattaaatacatttttctaataaaaagcttagtatatacaaacatgggtaaacaacttgcccattctttgcatgttcctcagacataaaacttaactctcagtttgcttggagaaatattccttcaaaattggagtaatgctaaagacttattctttacaacaaatagtatgttccaaatgaagtggtgtaattttgaatcacatcttcaggaccataaagtacaagctgtgcagttaaaactcaagacagctcatttggtgcaagtttttccctagcgctactttatcctcctacctctcaaaagtagcaatcataaagttttgtattttgtcatagagggaagtacaggaatcaaatctagacatatactaccttcacaacgaaaatgttgcaagaggagacctcctctagatattttttgtgcacacaatctaggtagagaacatctgaatacccttgttctttagcagccgattgagccttgagaacctaaacacaacaattcaatggttaaaggagatgtatcagtatttcagtaaaaacacagggaaacttctgttacaaaactcaaactatctacttaagaaacagtaaataactatttgtctactctattcacatttaaacaggtggattgcatgttgaaagttctctcagtctggctcaagtgaaatgcacatactacatatttgagaccatgtaaactaaaagatttccttgtgttggagagcacatggtaatcacagttttcctcagttaagttgagtcacttaagggcaaggctgacttcttaaaaaaatgaaaaatttgaacaataacaacctagccaattgcacattatccttaaccagaagtacgttctcacatactgctgattcttaatagtgatacatgaaggaaaatacagtcataagtagtaacaaaaaaggaaatgataaatgaaactgaaaaggaaactgaacattcagagcccaagacctaaccttaagaacatatgcaacaattgaaaattttggacctaaccaatccaaacttatattactaaagaagcaaagaagacgatcttactgcagcatagtttcctatagtctttacacctccagtacctcctggagttgcacggtgcaaatcatgctcaataattagatgaatcggtgccacaccttcctgcaaaaatatgtgtatatagatatatgaatgtgtaggctgacaaaaacttcacatctaaaatgaaaaagaaaagttataagataattgaaaggtcagaaatggaaaaataggcaagatatcctacaaaactgcaaccactattacaatatgttctcctaccaagttgcaaattaacacataacatcagtaggttaaatattagtttcttgtacattgatttggataattcaaggttaatatcattggctgataggaaacattacataccaaataaatcattaaaatctatttactctactgtaagatctagaaaatcatcatatagaaagattcaagtaatgtgtcaacaaattacataaatattaaaatgctagagggaaagggggaccattggtcagaagccaacagtccaactttaaatgaagcatgaatacaaaataaacaaatacatgttttatgaaaagacaagaaatctgaatgatcatcaatatttatttagaaagaaaaggcattcataagcagacataacaaaccttaaaatagtttccaacaggtgaaacataaatcagaaatgtgtactcaggagcaggtgcaagaccaagaactgctccactccccattagcaatggcctaatatacaaggatcctttaccagcaggaggaatctgaaacaagacatcatccacttgttaatcttaaatgcactcccataagaaaacaaaatacaatacaccagcttcaagatgaacattacccaacgtttgtttgctaagacagtggcctttacagcatccacaaattgttcaacagtcggtgatggcatgcacatccgttcagcacccagtctcatccgcagtgcattctcctcaggacgaaacaggagtatatttccatcttctttccgataggctttaagaccctcaaacagcccctaaaagaagaaatacaagaaaattaggaaaaagagacatcatacaatgattcctaatgatataatagtgcatcagttaaaatcctaccaaaaagcacaaagttaatgattttataggaaaaggatcagggaaatatataacaaataagtattattgatgccacaataagtctttaagatctatttttatcaaagaggaagggaaaaaaaaaaggaaagagctagagctacttcatgagattcccatattcaataaaaaaaattaaatattgctagattctaaaccaatttcttcttttttcatgcctataattttaatgaaaaagtgggctatgctgaaattttcattctctggagagtatgaaactcatggttcttcccaaccctatactttgtaggaacaaaatataagtctcagcaccaaactagcccagcaagaaactcacaagttattgttccagcccaacaactctaacttgagattttagtactggaaaatctataccttaaacagtcttcacctataaagatcagtatcatcatgtttgactgtgtcaaccccatgaaacttactattcaatgtggtatattcaatgtggtatagaaagaataaagtttctcagataaacaaattgagcaacacctttaaatttgaaattgagaaggctaatattttgtacgctttgttaaactaagtcttaagaattcatctaatgttcacagttcaagtttaatcaaacacacacgaaaaaaaaaaggaacataaaagaaaaaggaaagagatgctcaaaaacagatgttatcaaacatctttcttcaataacacccattagaacaagagtacctacaaacacaggtgcaccctctacgacaccatataaactcagtaaaatgtcattaatggttacaataacaataacaaagcaggaggcattaaagaccatatcagaatataaataaaataaagcacagcatagaataagctcgtgaacgctccaacgacaacaaccaaaaaaaaaataatcatatcaataagaccctagaagctaaaattaagatgagaataatgtggaagtaacattattattgagcatttaacctggccatagttcaaaactccagctgaagggctcaactcaatgttcccaaatcgttgtaattcaccatttgaaaagccctcaccttgagaacatttcatgttatacatataatcagtaggaagaaacgcaaatccaaggttgtcccaatcaatgttggctaattcaactgtttcactgctccaaacaccaaatgattatcatccacacaatcagagcgttgaaataaacaccaaacacttgcaaaacaaatctttctaacattcacacacatataactaatccatctaaaaacaattttcagaaatggagtacctgcgagcatcagacaatgtagcattgcaaaaaaccggagtaattttttgagaagaagcaaaagaaagctgctttgtttggagcagtaactgcataaaaaagaagaagaaaaaaccaaattaaattaagaagaaaaaaaaaatcgaacaagaaggaaaagggaagattatgtaaaccttgaggggagaagagaaatgggttttggaaagaagagaagaagaatggcgggaggggcagagaaggtaattagcgtgaaggcgaggcaaaagggcagtggtgcaatccattttctccggtctccggaagaagtttggtagggcggcgaaggtgaagaggaggtgaggtgagtaagagtgtggcgtggcgtgggtgggtttggttttgtcgggttggttatacaatacaatacagtccttttaacctaaagcttcgtagtctcttctcttttatattttattaactaggaactaatcgtgacgtgttagacaatatttgttaatttttggtactcaattagtaatgatataaaatatagaaaattcctatactagatagatagatccctaaaggataaaccctattttcgtatgcagctgacttttctagtttaattttctttataatggcatatgtcgtaatacgggtttatggaagaaataagggtttttttcatttttgtattttaaaaattaatttttttatataaaaatttatatagtaattacgggaataatttaaataacaactaaaatttacatagtaagttatccaaataatttaaactataaattaaaaaataatatatagtataatttctatactgtaaacttattttaaaatataatattgtattctatttttatatttaaatgtgtatagttttaatgataaattcaacatttttaattttattctttgtttttttttaattaaaagatatcattttcaccctgtattttgtaagaattattaattagactctctgttttnnnaaatgataaaatagactttgtattttctaaaattgtacagataggacctaaactgattttttattaaaataaaacttaataataatctgatctagaggtgttatgacaaaactaatctgttcgtactaaaaattgtcttaaggtagttatatgaaaaaataaaatttttgaaaattaagctcatggtcctatttttactatttcagaaaatatagggttcattttattatttaataaaacaaatggtccaattaataacttttactaaatacatcgtctaaaatagtatttactcttaaatatttaacttttaaacatgttctattttttttctacttctttcttgcaattttttaagagaactttttaacattttatataaatattgaattgtttgtaaattatatataacgtttttaaatagaaaaaaaaataggaagaattacctcatatactattttttaattttttttttttaaatttacagtttagattgttccggtagtttctatatgggttactatgcggattttagttgcgatttatgttaatagaatataattttctaactcatgtatatatgtgttatataattttttattttaatttttttcgtaatattaaaaatataatttatttttgtttgattggtttattttttaagaatataaattgaaagaaaaaaaaatttaaaaaaaaaaatagtata

SEQ ID NO: 26883 - DNA, 2858 bp, Cannabis sativa
aacagaatacattttgttttgttaatttttatttttttttttttttttaaatgaaaatgaacatttattaacttaattgttagatttaagcatcttggccctttgtgaaataatcctttttttttaaaaaaaaaaaaaaacaaaatgttccgaaagggattaaccataagagaatgagactgaacgaccagcctttttctctctttctcaaggctaaaatgaaataaaaatatgaaaagccttcactccatttctctctgctcataccaatcaattacattgattgttatatatctacagaatcaatgaaaaataaaaacttaatatgcaaacagaaattggcaaggcttcagcttaagcaaaacagcgataaataatgtcataaaacagagaaatagcggctctcacacacgcacacaagcattacaagaagccatttgctttgctcgtaatgtttttctggtgcaagaaaagaaaaaaagaaaagaacgaaaggaaaacagcattttatccatgccaatggggtataacttccttctcagattattagatgcatgataaaacccaagacgatgagctgatgaaggaaaccaaaatataatagctgggatatacacaatgttggcggaggcggcactacccctacctccctttcattcctccgaaccactgttcacccttatctccaaaagccgctcaacaggctgccggcaaattggacatctgttggtctgaaaccgcaaaactttagcacactcactgcacatacactgcaccaaagaaaaaagggtgtcaataacaagcatgtaatatttacatcaagatgaacatttggagatcaataagctacagaaaatgctatataagagtacacaagagagactctccatttgagctacccctctttggtcacagtaaaatgaacattagttcaaaagattgctataaggttttcatgtcctttatgatttgttttcctgttttttgttcctagctttgctagtgttctgtcttgagtcacggtaaaatgaacattagttccagaagaaactctgataaggtttccttctcttttgtgatttgttttacgatgttttttttctttcttccaagcattgctagcttgcagaatttgaagtagctaaatcacacaaacaaaatcagagcaatctgaaaaaccatgtgaagaagtactctcatttaacaatgaactgcaacattttcatgagaaacactcccctcgtcaaattgactgcctttttcaaaggtatgagtacatttaatgaacttaaggaaaagaagggaaactataattaccatgtgccggcaaggaagaaccgtagtatcgcgtggttcagacaggcaaatgacacattctttcccgggatcattgctgtctaaatcaccgtcaaccgaattaccaataccgtatatctcctgcagctcatatctcattccatttacccacaatatctgctttgcaacccttgtgcgaaattcacctttctccttctcaaaaatcgctagagttatctgagaattcattgttccagatccttggtttgattcagatccatttgggagaactgaggaagcctctgccttcactgctagaggatagttatccatgtctccagctttcgataactctgtctcctcaaacatcgaaaagttaatcccagttcctgatggctgtctgaatttctggcccaaaccttgtgggaaatgtacagtcacaggtgtgtgattttccttcactggtgttaggttgcaatcttctccctctttggcaaagaatattacagttatgctgtttaaatgagaataaataaaaagaagaaattcgatcataaaaagcatgatttcacaatcagattaaatgtaccagaagatgaattgtgagaatttgtatcagtaaccaagactattagctctataacgtgtcaagtttcttctttcctaaactctctagatagatattaatactccaaatagataaggacttaaaccagcagatcaagaattcaatctatcaaaacaagaattcaatctaaaaatagtaaaaataacagtatcaggcatattctactgcatttcaagaatactataataggaaagtgtataacaatcttgatctcttgagctaatattttccactaacacaaacaaacccaaatattctcttttctccttaacaagttaacccatataaacacatgacttcagttataattatcatttgcaagaaaccattggcatcataaattcatcaaggaaaacaatctcaaaaacttaaaactaaaagctcgaacaagggtatgtaagactaaaattttgtttaccttccggcaacagtggcatcgaatgtgaaagccacaagaaagtgcccaggattttcctcatcagcctcaatcctaagagtctccttcttcaaattcacatcgtttcttatagtcacagccttctgatgctcaacataaggtgccacgggttgcataaccggtccacaagggtacctgccaccgacccaattcccgtgacccgattcagcatgtgagtgtgctccgcggtggtggtgatcgtacggcgccggcaagggcagaggcgtggtaggcggcggaggcgggtaataacctgggtattggtaatactggggagcattcgggtttgtgtattgggcaggatatggcgttgccgcagtaacaacatagcggttggctgagagttctggttggggtggtacctgaggtggaggaggagggtggttgtggtggtggctacgccggctgccatggggtctccggcgattcgttgaaacgctactacccatattacccatataaaaaaattaaaaaaaa

SEQ ID NO: 26884 - DNA, 2173 bp, Cannabis sativa
ctgccattattgattatactccgagctcgatgaatgtattctttatttgtttcttataataaaatgagcatacctatttaacaatatatttattaaattaaaataaagattaaattaattagcaatatttaattgagatatcatactaaatgtaattaaggaacaatatggacactgaaaagacggctagataccaataatataacttttgaaaattctctattaataagacaataatatatagagcattgctattaggcactagtactgatatgtcgtgttgtgattgactagcgactctctaaaagctattatattaagttatatgagactcgatacttagtttgaccaataccgatattgacatacagaagagtgctaggtagagtgataccctctgcctagtatatataccctgttagtacatttagttttccaaataagacaataatatataccttgttagtcaatacatttagtttgagaattaatacaaagtgagaatattattagtttatagagtaggaagccgggaccacttattttattcatttaattgtgtaaaagtatctaggaaaacttagataattactatgctttttgttttggagaacgtccagaaaaacttcattaaccatatacatattacatccttattataagattgaaattaatattattttaatattattttattttttttttggtgataatcactatgttgatgaaataaaatttattttttaataacattgaaattaacatatttgtatacacatatgcctttactatattatataatcactaaaaaatagatttttagtcacaaaaaaaaataatttataagttagtatgtctttctgtaacaacttacggcaaataatattttaattacaatagattattcataacaatttttaaatttttaaattttataatttataaaaggtcacaattaaatgttgtgactaaaactatatttagtcacaattatataattttatggcaaaaatttgtgactaattattatttatagttactaattttataggttatcactaataattctgttttagtcacatctatttattttgcagactcgttagtgttgacagtgagaactcatcaaccaacttgtagccggaaaataaacttatgcttgaagatcagaaatgagatgaagaaaaagatgaaatgtaaactcaaatcgctatcttgaaatagagagaataatggagaaatatctattgctctcaatatggtgttcaagtatgattttctaacccctcctcacatttaaaaaagggatatttatagactctaatggcctgaggtacaaagtggtcccagagtgacaaaacgtccctctcatgctgcatctcgcaagtgcagaaggtggccttgcaccttgtacccttgtctcgtgtcaggtggtccccggttgctgacatgtgacccctagttacaggttccaggaaggtggtccccggttgcaagcatgtgatacctggttacaggttgcaggatggtgatccctgattgcaggcatgtgatccccagttggaggaggatggtccccgattgtaggcatgtggtctctaagtacaagttacgtgagggtggctgtagtgtaccctaggtcgggtcttcagaccttacaagtccattgtctccgctactcgtactttctcacttttagagcgttcaggaggtgtggttgtatggttttcccttgcacgccttgtcctcctcctccgttgtcattcttgtcgatgtgcattcacctctcactttatacttacaacccttgaaacaggttcacgcaacacacataattgctcgaatgcgagaccccccatgggcttgcatgcgagcccccaacacctaacatatgcacacagggctcgcatgcgagccccccatgggctcacatgtgagctcccatacactccttatacatacacgacaccccttccctacacacacaaagcttgcatgcgagcccccatacactcgcagcaatacacacacatgacaccccttcccccacacacacggctcgcatgcgagcccccatacactcgcaccaacacacacgtagcacaacactcacacacacccacgactcgcatgcgaaccctcagcttgaaccaacacaccttttcacatgcat

SEQ ID NO: 26885 - DNA, 5728 bp, Cannabis sativa
tgttatggacttaatagaatttatacattaaacataatcataaaataaatcatgtgaaccatgcaacatagaatgatttctaatctgttattaattaaaatctgattatattgaaatgcgttttatttagggcacaaaacataccagaactatctttcccccacatcagatcatcattacaattattgtcagcaatagggacatctagaatgctatcaataaggttatcatcaaagaaataccacaacttattgagatcccaagaactagaaggggaaataaagagagacaaattaggggaaggaagaggatgaaataaggaattataattcaggccaaaatcaagttgttagcgatcctccataatattattattatattattaatattattataatattatttttatatatatataaaaacttatcagtatcgtttatattatatgttataagtttataaacaataaatgaaacgaaaggaaaccctcattttttcccttcgacaaaactttttcttcctatatcaatttttttttttattttcaatccaaaacctagcaatctaagctctaccaatagcaggatagcaaattcttgaagaggaaaagcttaaggtatggtttaattatgttttaagctaaaaataatgggttttatatagtggctatgcgatttagagtggttatggagattctgaattcgtaaaattgttctttggtagctatggactagtttcgatatttacttgttgaatttgaggtgatttttagttagaaatcgagtttagaactttttaaagtttagtctgaatgttaatagcatttttcatttaagggctcgattttaatttctattacgtaaggatggtaatatttatggtatatatgtgccctgtgaagtttggagtgatttggaaaaattttagtagtgtttcagtgagtgtgaaatttgggattttcgagtttctccattttcagaaattcctatgagatcagaaattatatttttgttataacttttcactcgagtgtccgttttggacgttgtatatactattttgaagcttgtgacaagatcaactatatggtgtatgttttagagccaaaacatgagttttattttagtgtatttatattgtggggtttggtagaaaatcctagattgtcttatgtgaatattaagtagtattttgggataaacacttattggtttacctttgttgtgacatagagccgagatcatcggggatagttctccacttgggttagccgacatgtagaacttggattaaaggtaaaaaaaaatatattgtattgcatagtacattgtattgtgatacaattagtattattgtgaattgattaatatggagatatggtgattattatataatgaaaagattgattgattaagcaatgataatgtgatgataccatgcgtgggatatgcaggctcacctgattaggtgatgcgatatacatggcgacgtaccaggcataggtacgggcgtcagtgacatatgagtatcgagagtaggtatgggctcacctaattaagtgatgtgatattcatggtgacgtatcgagtgtaggtacatgcatcaatgatataaaaattccatgttatggcatagatcgaatccattgttaagtttcttcctagcaacgtatcgggcgttggtacgggcatcagtgatatatgagtatcgggcgttggtacgagcatcagtgatatatgagtatcgggcgttggtacgggcatcagtgatatatgagtatcgggcgttggtacgggcatcagtgatatatgagtatcgggcgtaggtacgggctcgtctgattagatgatgtgatatattggtgctaggttgtagcactggctcacctgattaggtgatctaactatgtaccgggtgtaggtacgggctcgtctgattaggcgatgcaatatatttgagccaggttgtggcacgggcttacctaatttggtgatgcaattatgtgatatatgggtgcaggtttttgacacgggatcacctaattaggtgatatagttatgcgatatatgggtgtcaagctatgtcacgagcttgcctaattaggcagtgcaatacatgattatcagattaaagcatcgacttacctaattaggcaacgtgatgtaatgtagatagttactttatgaggtaacatatatataatttatatgattaaatgaatatgaattctattattggtataatagttttgtattaccaaatatctgtataatgatgtttattcgtggtagatgccagtagtaatttggatttcatcttatgaacaatacgtgatagtttgattctgattgtgtataaatgctaatattcgaataataaactatataattattattattattaatttttctgctgagtccttgtgactcatgggtgctatgtggtgcaggtaaaggaaaagaaaagttagatcaaccatgaggtgatagtcctctctagcaatgtacatattgaccttgttggcctgcgtgtcaggttgtcaggagttattttgggctgtatctattgtgtattttagttttatactttgaggcatcgtcgcatatatttttttgtaaaactttttataacagggatccccagaacacactttttatgttattataatgttcgtttttagtgttttattttagtcaagtttttaatattatcgatgtttttaataattaatcaatctattagtatttaactagtttataaaatcacacatgtggtgtccctattgattaggacattacaattgttgctcaaggttaatctcttgactaagataagaggaagtgatgtattttactgttacttcaacccttaaggcgatacactaagttaagtcatgaaatttaaaatatgggttacactcacaaagtgcaactaagctttatagtggttagttgttaacttggtcaaaaagtggtactttatattttgaaaagaaaatatgagatatttaggtttcaaaataataaagatgagaattgtctcatagactcaatgaaattgactcgatgccgaccctaaggcggcggttcattgtcaaagatttttatcgtagaataacttaaacaagattttgtgtgttttacttgtatgcactcatgcatcacgtttataaattctgaaataatatttatatttcaagtataatcataatgtcattttatttattttcaaaaatatctactatgtcaaatttccttaatgctttactagcaattgaaaaactaaatggtaaatattttcttaagtggaaatctaatcttaatatgatgttagtttgtgagaaccacacattttttccttactgagtagtgtctctttaagaaatcatgtattgcaagtaattaggcaatacatgaggccgagacacgtatgtctatcatagacaagaggactcaagtatgcattattcttgagtcgttcactcattgcttcaaagtgttcaatacaagctatgtgatgaacaagatataattcaacatgactcaatagttgaacaagttgactatgtttgaaaacttttacaagaataagtccaagaaaggtgagtaaaacaagttgaagcaaagtccaactttccttcttattcagataagaaaaggaaataggacggtaaggacaacagtagtggcaagcccaagccgaaaggcaaaaaggcacgtaaagctaagaaaaacaaagccaatcctaagtccaaggataacaaaaatgagaggcaagtatttccattgtggcataatgggacactggaagagaaattgtaaaaagtatctctctgagcttaagaaaagtaaatttgatttatttgttcttgaagctaatttagtagaagatgatcaatccttatggattgttgattcaggagccactaataatatttgttcttcaatataaatacttgatttttcaaggaaactgactaataaaaaggtgaccatatgagtgggcaatggagcacaagtgtctgtcaaatgtgttggcaaagtccatttaagcttattaataatgagattattaattctatatttggaacgccaatttattatgcaaaatatagaaatagactttatgtgctcaagtcaagtgagcaattaattatttagagtagcattgcctcaatataataagaggcaaaaagtttctaatgatgatcaaacgtatctatgatatctacgtttaggctatattggcctaaacagaataatccaattaacaaagaatggttttatgagagaactaaaagttgaaactcttctagaatgataatcatttctaggaggtaagatggctaaaagacctttttttttaagaaggtaatagagccaaagaataacttaagcttattcacactagtgtgtgtggatctattaatattcaagctcgaagtggttatgaatatttcgtcacttttattgacgattattctagatacagtcatacttacataatgttttgattatgggttgattaggtaataagtgtgattatgatcctactaatctatttcagcataaaattcaaatctactataagtaagtaaataagcttaaaaatatttttcaggttcaatgatcctgaagatccgataagtggataaagaaacgtaatttaattaattacgaagatttatttgaaaaatgtagatataatatgagttatttctaaaataaaatattttcaagttctgcaaccttagagacccgattggaggctaacaatttcacaataattttagttagaaatattgatagaattattgggataagttgattttagtaatactgaaatattttggagtactcgaagttggccaattaccttaaaagtagaagtttcttagtggctaagaaataataagataactattaataataaaatatttattaataatattatttttatatatatataaaacttctcgttaaaatttatgtatatattatatcagtaaacataaacaaaaacgaacgaacgaaaccctcgttctcccctttctacaaaaccttcttctcctatatctattttctttgattttcaacccgaaacctagcgatctaagctctggtagtagcgggatagctaatccttgaagagggaaagcttaaggtatggtttaattacgttttaagctaaaaacgattggttttatataggagctttgtgattgaaaatggttatggagattttgacttcgtagaattgttctttggtagctatgggactagtttcaatgtttacttgttaactttgaggtgatttttagttagaaatcgagtttggaactttttgaagcttagtccgaacgttaatgacattattcatttaaggactaaattttaatttcttttacataaggatggtaatatttatggtatatatgtgccttgtgaagtttgaagtgatttggataagttttggtagtgtttcggtgagtgccaaatttgggatttttgagtttcactgtttttagaaattcctaggagatcaaaaatcgtatttattgtcataacttttgactcgggtgtctgttttggacattctatataccatttcgaagcttgtgacgagctctacaatatggtatatattttagagccaaaatataagttttattttagtgcatttatacggcgcggtttggtagaaaaccctagattgtcttatgtgaata

SEQ ID NO: 26886 - DNA, 1158 bp, Cannabis sativa
tatatatatagcgtttttgggttgctgcataattatttaaagtactatatatacattaatgtaaaataaagatagtaatataccaatcaattgtaataagtaataatgttaattatatgaaaagataacaaataggtcaatttgtacataattagggttcatatcatattgatgtgatgaaaacttgctattattcatacgactccaaaaacagatcatattttcttagatttatatatatgtatgtatttatatactcaattatccgtaataataatttacaagaattattgtactttaattaattgacgatattcatgatgatgaaaataatatattcatcattctactcaattgggattatcattaattataattgtgtccttaatttatatgtgtcatgtgaacggtctaccttaaatatggatgattttggtggccctatacaaataatgccatatatatcataataattatatttatgaattttcattttcaaatatatataaatggataagagcgttgttattgggcacaagtgcgtctaatattttttataggtggtactttatgattggttagcgatttcacaaaaaagctatttttttaagttatatacttaattacaccaataacagtatgatactggggaggatgttaggcaccagcgataccttttaacaattctctatatataaataagcattgttatgaggcactttagtacttagcaccacgatgaagcgttgttctataattagttaaaaaaaaattataacatttattaaagtaaaacaagtaagacttgatattacccattcaaaaaaaaaaaaaaaaagacttaatattacccattactatttttgttagactttttatttaggcttacattaaattttattagttttattaaaacttgagttgattggatagttctttgttgtgttagcctatattattgatgatcaatagttaatgagcttaacatctgtgtgtaaatttggttaaagcagaactgtggacttttttaattaactgaagcttttgatgagcagacccagtccaattgtatacattttgataatgggtaaattgcggcataaatacctaatattttcgattttatatacttaaatacctaatgtttatttttggtgg

SEQ ID NO: 26887 - DNA, 2757 bp, Cannabis sativa
cttcccttgaagttgatcgaacaagtcgtcgatcctagataaaggatatttattcttgatagtcaatttgtttagttccctataatcaatacacatgtgtagggttccgtatttcttcttaacaaataacaccggagcttcccaaggtgacataataggttgagaaaaccctatgtcaagtatcccttgaagctgaatctacaattctttaagttttgtaggagccattctataaggtgctttagagactgactctgcccatgtgctaagtcgataacaaaatctatttctcgctgtggttgtaaacccagaagttcatcgagaaacacctctaaaaattcctaaaccacctaaatgtcttctagccaaactgattcgggccgtgtggtatccaataccactgccaaaaaccctagacaccctagacacccatcttgtaacaactctttggctttcaataccgagatcactggaatttaagatccttgaactgatcccacaaacacaaatggttcctcaccctagggtcgaaagatcaccatcttccacttacagttaatactagcagaatacttggacaaaaaaattcattccaagtatgatatcaaaatctgctaagcccaattccactaagtcagcacttaactctctaccctcaatctagatcggcatagacctaacccaccttttggagataactaactctccgctaggcagtagggttccgaaccctttgtcatagctatcaaatagtctacccaatttatcaataattttagccgccacatatgagtgagtggccctagagtcaaataaaatagagaaataagaatttttgagcgaagctaacctataaaaattgaggggctagcttctgcatcagcctgagtaagagcaaacattcttactggagcaagttttgcttctatctgttgttcttctttctttagttgcagctaatctttttgtaatgtccaggcataccacactgaaagtatcctctccctttacactcacctaaatggtgcttcttacagttaggacactctggataagtgtatcgagtttccgaaccaccttgacagttgccacgaccttaattctctcgaacactcttgttctgacttgagccaccagatgtagacggtgcctttctcttctgcttctgatcaatgattgagtttgagtcaagtcactaccactaccacccctaccataactagaggtaggaggagcagtggtccaccaacaacctgtgtcccttaggactcctgaatgcactcaattgcgccctcagctcatagtgcttttcccaccatgtcatcataggtggtattatcatctattgtgatcatcaggtcgtgtttgtgatcttgtggattcaaaaccccatccacaaatacttttctttcttactaaaattagttggcacaatttctgaggccaacctatcaaactgggttgtacattctataacggacatattctctttctgagtcaactagaaattcttttctttttacgctacggactacctcgttgtagtattttgcattaaaaaactcctcaaaatctttccaggtaatagtagtaacatctcgagtgagagccaccatatcccaccagactagggtatcctcctagaattggaatgttgcacaagccactttgtcattgccggtgagtcccgtaaaattcagaatccaagtaataacggtcagccactgttcaacattcataacatctgaaccttccaaaaagactggaggtgcttgcttgcggaacctttcgtacagtggttccatttgattcacaacagccatcaaccctacttgcacaacagggggaggagccacctacaccacaggagcaggcattgccagagcaccctgctgcctcaggcatctaatctcttcatcttgttcattaattcttgctttcattgctgcaaatctattctcccaattctgggcagcctgtgttggttaacatttccccgatcgcatgctctgcctcgaccacgaatgttcgggggaaactaaactccctaaccaccactagatccgaccgaattaccctggcctcttgtattccgcatagcatccattttaatagaacatcttgaaaaaccaagaaatatcctggtcagatcgcgatcaagaataaattataattacacctacttaagaaattaaaatatgcacctattcatctactaggctactaacatgctttctatcaagcttttcttatagcatactaataaaacaagctactaaagcaataaaggcttactgaaccgtgagtcgagcttatctgtgatgatgactgtacatatcgtgatgaacttcaaaagacaacctagcgactctaataccaagttgtaacacactactagattaggtgtgttaccgtgattttatatcaactgtgcaatctgttgctattcaatagtttagttaaaaatcgtgattaattaaaactctacttaattacccttatagtgaaagtaaataacttttacataaactgggatttcgtatttaaaatatttacaatcgtaatataaattatttgatacaaaaagttgttggctagcgactaatctaaataatacctgctatcccaaagattgtacgctccaggtctaatcgtcccgactcatctgcttgcactcactgttgttcatccttagctttgcccttacctaaacatggaaacagcaactgtgagtcgacagactcagtaagaaaagca

SEQ ID NO: 26888 - DNA, 1014 bp, Cannabis sativa
taataataataataattgttgtaatataaaatgaaagtcattttatgttttgtaataaatagtaaccaaaatgtgaactttctttttttattggcattcattcacgacccaaataaggaattactcattaaaaaaaaaaaattaagactttaaattcaaaatctaatttttatggcagtttattttcctatgaagagataataataaatgagtaactaatttagtattttattacacatccaaaaaaatttgtcattgtgttcaaaaataaaacatttgtcattttttgttaaaactctcactacatacattgttactccatattgcccattttgttttgatagtcaaattcaaaattggaaacttatatcattatttttgtattgtttgtatctgtttttgtttgatattgtaatcagatatttcaaaaacagtaatctcaaattaaaaaaaaaaaaatccctctatcaaaaaaataaaaaataaaatatcccaatacaaaagtttccattttttttcatatttttcattaatgtagaacttcaaaaatagaactatctcattcgtccatacacaatgaatcatttcacacctcccaaaaaattgcacaatcaattaaaaaaaattaacaataaaaaaaaagtaatatgtaatcatgaattaaacttaattggtaatcatactcattttcctaatattattaactgtaatacatatctccaaatattatcaaacaatttaaccaaaaaaaaaatacaacctgataaatcttaaacaaaatttcccttttctattattattattttatcatcagttgtaaattaataataatttttttttactctaaaacatttattttaatttatttttcattttttaaggtaaacagtaaattcggacataaaactgaagtaaacgttggactaacttagagtagatttagatgctttgggttagttaaatcttatatgtgagctggatccactccttcacccagtgacccacttttttttt

SEQ ID NO: 26889 - DNA, 3240 bp, Cannabis sativa
atttctcgggctccggcttctccaagaaggtcttcttcaaccaactaaatggctgaacgacccaaagagggaaatctgtgcattttgtattattattggggagggaaatctgtgcattttgtattattattaggaaggggaggggaatttgtgcattttgtattattatgggtttatacctttacatgttctctttctcattatattgatttatttctgattttctccataggacggacggaagatcacggttggtgactgtgctctgtttaagcccccacaagattcacctcctttcattggaataattcgttgggtatcaacaggcaaagataataagttgaaattaggtgtaaattggctttatcgtcctgctgaagtaaagcttggtaaaggcatcctattggatgctgcaccgaatgaaattttctattcctttcataaggatgagattcctgctgcgtcgttactccatccatgtaaagttgcattccttcctaaaggtgttgaacttccaactggtatttcgtcttttgtgtgccgaaggctttatgacatcacaaacaagtgtttatggtggctaacggatcaagattatattaatgtaagctagggcagtctttcttttttcttgcttttttctcatagataggaatcttttgattgtaattaatgccctttatttttggcaggaacgacaggaagaagtagatcagttgttatataaaacaaaagtagtaatgcatgcaacagtgcagtcaggtggccgatctccaaagccatcaaatggtccaacttcaacttcacagttaaaagctggctcagagagtaaccagaacagtttgtcttccttttcatctcaagtcaaggggaagaagagagagcgaatagagcagggctctgaacctttgaaacgggaacgctttgcaaaaacagaggatggggattctggtaactgtagacaggagagttttttaaaatttgagatatccaagataactgaaaaaggagggcttgttgacaatgaaggagttgaaaaattggtgcagcttatgcttcctgatagaaatgataagaaaatagatttggccggtcggtcaatgcttgctggagctgtagcagccacagataaatttgattgccttagcagatttgtggagctgcgtggtttgcctgtatttgatgagtggctccaggaaattcataaggggaagattggtgatagtattggatcgaaggatggtgataaagtaattgaggagtttctcttggttttacttcgtgcacttgataagctgcctgtgaatcttgatgctttaaaaacatgtaacattggaaagtctgtgaatcatttgcgctctcataaaaactcagaaatccaaaagaaatccagaagtctggtggatacatggaagaaacgggttgaagctgaaatgaatatccatgatgttaagtctggctcaaatcacgctgtctcctgggctgggagatcatcacgtctacctgaagttggaaacagacattcaagtggaccgtctgatgttgctgtaaagagctcagttgcacaggtttctgcttccaaatctgtttcagttaagctagtccatggtgagagtactactaggtctgcttctgcctctccagggtctgtcaaatcaattccatcgcctgtatcaactggtaacaatataaaagatggtcattttcgaaatgccagcggtggcatgtctgatgttcctttgacagccactagagatgagaagagcagcagttctagtcaatctcacaacaacagccaatcgtgctctaatgaccataacagagctggagttgtttctgggaaggatgatgcaagaagctctagtgctggttcaatgaatgcgaataaggtgtctggtggctcttcacgacctcgtaaatcaataaatggatttcaagggtctcttacagggaaccaaaaggaaactgggtctagcaaaagttcttcattgcataagaacccaattgtagacaaatcatcaaattctggattgactagtgacaagcttgagaggactattgttgacgggaatactcataaactaatagtgaagattccaaatcgtggtcgcagtcctgcacaaagcagtggaggttcatttgaagacccttcaatcaggagtagcagagcttcttctcctgtgatctcagaaaagcccgatgaatttgatcccgactttaaggacaaaaccgatgcttatagagctaatgttgcttcagatgtaaatgctgagtcctggcagagtaatgattttaaagatgtgcttactgcttctgatgaaggcgatggatcacccgctgctatgactgacgaagaacgctgtaggactgttgatgaaacaaagaaggtttcagaagttccaaaaactgcatcctcatcatctggaaatgagcataaatctgggaatctgcaagaaccttcctgtagttccttgaatgctttagttgaaagctgtgtaaagtattctgcaggtaatggatctatgtctgttgctgatgatcttggtatgaacctgcttgccagcgttgctgctagagagatgtccaaatctgatttggtttctccaattgcttcacctcagagaaacaattcagttgaaccctcctctacaggcaatgatgtaaaggttaaaaatttagcagaaggggagcttggacaaaacaaatgcatgtccacttgtgttgctaataatgagaatgggaagcatgctggtgaatctgataatgctgtggctaaggataaagaagataaaactgtgtttttgtctgtccataaacctacatccgagcacaccggacttgtagaatctcccagtaaggattttctgcaagctgaaggcattgaagaaagcaaaagaaagtgtaatgatgtcagtttaacttcacctgtgatctctgcttcgttgacaattgagaaagctacagacagggaaggaggcaaaccaactcaagggaaaccaattgaaggggaagtaaatactgaggacattttagatgttaaacccaatgcaagtgattcttgttaaatgaaaataagatcacaggtggcatagtgaatgaagtcaagacagaacatctaggaggattgtctgtgaaccttcagcatgaagaagaagaaagtataataaagacagataaaaagctgcacgtcttagttatgcaatctgaccctgtaaaagcagcttgtgaagatctattgcc

SEQ ID NO: 26890 - DNA, 2221 bp, Cannabis sativa
ggggaggtgggggcatgctttcggccgcctcctcgccttgcccaaaattctgaacataagtgattgggatttccacatagtttgcaagaatatctcccaagtttccttgcataatttcctgagtttccaaagctgcctttctcttgcttcgtgtcttaactcctgagctctgtttcttccttgaattaatggacgatacgtttttgcctcgtgttttcctcttcgatgattccccttgttccgtacttcccattgcgaagcatgcctcagggtcactagagaacttttttcccgcgtcatgatttgcaggggtctcgttatcattcatgctggcaataaaacagtgcgaaggtgatggaattggtaagtaccaggtatgggccttcctcttacgggtcccaagtaaatgatttatcaattcagataagtcaggaggatttgtgattaaagaagggtgggcctggaacttatttgtgatctcccacccataaagactcatgaagactttctgtaactcagggtcattgatgggccatttaataggcacctcatcaggatagttatgaggcctttgagaggcacagacccacgaatggggtatttcaagagtttgggctaaagtaggcccagtatcagggattctgtcctccccagcatttgcaaagtctgggttaggtaggtccaagtaattgggcccaattggcaaagggactctctcatttccaaaatttcccgccactcgatcaatagacatcttctgagacgtcgtaccatccacaggaacacgatctctgtcgttcacagaggaagtggcgtgaaccatcctcgacaccatactgacagtctcagtaccttcctggcggccctttgtactgccctccccgtcggagtttagcttgccctgtcttctcttccaagacccttttctttcttttttccggctacctagagcattttccggtagctcaatcatataacgagagacccctttcccagccatagagaagcagttgcttcttcctgtatcgttcttgacccacgggccgtacatttggacagcattaccattttttggaatcaccatagccgttggtacatgacagatcctttccaaatgggcaagcttaccacaggtaaagcacaagaatggtaacttctcgtacttgaactgtatccatgattcctcccttccttcggctttcaaaaagaaaccaacaacaaaaggatgagttatccaaacatcaatccagcatcttagatatccacgtcgaactagttcgactttggattttccatccgtcttcacaaactgtcctgctttcttggcaatgatagcagtgttctcatccgataaacacctcgttgggagaccgtgaaactgaacccagaagcgagccacctcgaactccgccacacggacttcaccttctacaggccagggttttaggttaagaagcattccattaaccagccatggcctcttgtccataatgtaagagcaatcttcctctgtctcaaagaaaaatcctaaaactccctctccacattttttcatacgccagcttccaatattcctccagacccccatgagaattttttttactacagatgctggcatatccttgcatcccatgactttcccaacacaagccttgttgagaactacatcttccagggtgatatcttcaaatagctccagcatctccatctccatagcactatctctttcaagcaacttccccttctccatgtcgaccatatcaacaggcacatctatcgtagccgcacttcctttctccatcggtggaaaccaaaagccacaaaaacttagaagatcgaaaacaaaatagtagcagaatgcactcccaagccacaaaaacttagaagaacgaaaacaaaatagtagcataatgcactcccaaacgccaaagatatcagtgtttagcacccgcaactatgtcaataacagaccagaccctacttggggacattcttctcctatccattttgttatagtatttctagcaaagtaattgaatgcaagaattagaagaaaaaaaatagcagcttcgtccatatggtagataaggaggtcatgtagtaagtggtgataaacaacatgaagtccctcgtgtatttggtagttaaatttcgaggacgaaatttctttaaggagggtagaatgtaataaccggtaaaaatatacatatattttaaattt

SEQ ID NO: 26891 - DNA, 2931 bp, Cannabis sativa
aaagggataaagaaaatttgttaagagataaacctggaaaatagagttttggtcatatgcgtagaacaatccagcagtggcatcgctgcacagcccaatgacaccccttgaaactgattctgatgtttgatcaaactgaagttcctctatgatttgctcactaattctgtttacaacctacaaaattaataagataataaaacaattacagatttttagcaatacaagggtaagacgcattcaaatatacaaagaggcctgatagtatgtaatatttatcactagcagtcccaactttaggtctcaataggcaatacaatcacaaaaaatcaccgaagacaactgcagatagtaagtgttagtttacaaacccaccttaaccttgtttcccacaagaagcaagaaatgaaattcagacagagccatagaactcggtttcactgcttcagcaccatcagataattttgaatttattaaaagagccttattttcgacaaagttttcatctccatttgaagaactgcaaaagaaattccaattaaggaagttgtgatgggaaaggtttttctgagtatagcttcacataaaagcaaaatcaaaacaataatatgaaagtactacaaccatgttcaaaagcaaaacaaaaaaaactagtgacagtggtgataaggaataaaagaatctacacaaatggcttatattatcactgaggtaagaagagaaaattccattatctacctgtgttgagctccaaagttgagatccccatgataaataccaacaccagaaagccatgcaaaatgtacagctcttctttgcttaatatagtagtgtagctcactgaagaaaagcaaaacatagcttctggtcagagtatgtcaaagagattggatgattatcagtgaaaccactgataacagcacatacctgtttggaatttcaccaggaagtgtcatgaaatgcacagctctatccaaataacccgcgaaaacagtctagaaataagcaaaaccgatattcaaaagtaagaactctaataagaaatctatagttccaatgcataaaatcatgcgtgtaaagaatttccattttttttctttcctatttctgttatctcactctttattttcttgcaggaatacagattgttcaactcgctggaagaagttttaaataagaaaaacatttgcaaattacatgccagaatcatatcaccaaggaaaatacatgcaacttctaaagaaaaggtgtgaagtttaatttacctccaatgatccaaaaccagtaaaagaataaagtcttgtgggagtgacagccatgatatagtacctagtcccactcggtatgctagtagtttccatctgtatttaagtaaacaacaagaagaggtaaagtcaaatttaagttgcaaagtttataatacaactgaacagactgtggaagaaatttaaacaataacctatttgtccacttgtgtgtgtgcaagttaccaaagtggagacatacaatgtaaagagaattaaaactagagttacttctccaaagaaaaagaaatagaacctgcagacccgtgaaggcttcaggaatttctaccatttcaaacaaaaactttacatacttctcctttttatccttctcatccactgcaatctcataaagttgtccattgtctgtaccgagaattacttcctttgtagaagctggatttttgatatgattaaattaggtagctaaaatagatacaaagataggaaggagctgcactttaccagattatactgaatagctaaaacaaaccaagatatgcacaacatttcaggccacgaactgtcaagaaataaataaactaccttctgtgatctgctgtctgttccaggctacagcattcacaacaataccctttagtttgcttaagagacggggcttactccatttcgcatgagtataaaaggtatctgcacccccactaccaacaactgtggcaatacaatggctcccaccaggatcaacaaaaactctatggatagactgatcgccaggacgacccgcagaaagatcaatatctatatctcaaacaattatataaccattaataaatatatatagaccgaaccaagccaaacacaataagagaattgtctcagaagttacaagttataaccagatgtaaattgcaagccctttgcatggtaatctatgtaattacatgctagcacaattcgcctattaaaaaaaagtttcaactcaatttacatcaaccttaattcagacacggcttcaaatacaaaagtagcaactaaacccaatacccagtatgatccttggttcaaaattcaaactgactttagtctttattttaacgaaacaagtagaattcatcctgaagctttccaccagattaaaaaacttaaaaaaggtcaaaactttgttttttttttctttcttttttatggtaacgataaagttctaatttttcaacagtttcagcgaatgcagaacccattactgcataagcaagcaaacttatttcacattgttcaaaccttcattcacagaactttagaaaattcaattatactttaagaacataccatacgaatcgccgaccccaaaatcatggcgaatgacccatcctttgctagttcccaatataatcacgtcattcccagcagccatacatgtgattactccacgccccttagccgcatacctttctagaagatcaaccgtgaagacctgcctacctggatccattatccgaattcgattaagagcaacaacaaaatagcctaattatacctcaaacttcccaattcaatttcattttggttcttcaaaatgagccgaagatggaagttcaactggccggcgatcaaattggaatttgcagaatgaaaaagatttttgagccccaggctggcgagctatgtt

SEQ ID NO: 26892 - DNA, 2345 bp, Cannabis sativa
attaaacccaaaaaacaaaaaaaaaatcattaaagtttgaatcttcaattcaaaaaatcaatcaataaataaaatcatctaaattaagcccaaaatcatcaaaatttgaatttttaattacctttttattatcagaagaaacccacttcttcttaacccaatcaagatgaactctcaatctggaaacaggataagcaatctcatcaccacagatttcgaagtaaacaaagtaatcaccattctctttcctcccagaaattcttccaacccaccaaccatcattatcccaagcatccaccaaatcaagatacccatactctttctcatcattctccggtgccggcggcggcaccggtcggagttcatcgagtctgactgtttcgactaaaggttgagtatttacaaccccttccaccagattcttgtacataacaacgaacagatctttcctcaattgagatacgattgaagcttcatagtatgatcccacgaacccagattctttgctgcaaacttccaccaaatcgcctctgctatacatttttttagggttccaattttgagaattgattgtgaatttgggaaaaagagtttaggggttttttatttataaagaaacatttcttgaataagaagaattaaaagaaccgttgaaatttaatattttaagtaatgagatatgtaaagatatgatttttatttttatttttaaagaaaaacaatatttttaaatgagcaataaaaatggaaactttggttttaaagtaagtggaaattataattcatctaggaattaattattaattaataataaagatgattttttttttaacttttatattataaaagttgccatcaaccaatttcgttttaattttatctttaaaggtataataaactcaaatacatcccaaattaattttaacagtaaagaacctaaaaaaaaactatagttatacaaagaattaatttaaattaatttttcttataaaagtaacaagttaaattccgcatttagggaatttttttagtctaatgttctttttaatagttttgtatattatagttatttaagacattttaaatagtgtgttgcatgcgtaatttttttattttacattcgtgtaaaatagattatttgaacatcactttatatattgtaaattatttcgaattttttaaaattttataagatgtcttaaataactataatgtgcatcactatgaaaaaaaaaattaaactaaaaaattctcttaaatatcgagacaaataaaaatgtactagtatatcccacattaaggtaacgtttggttagaagtaatgaaatagaatataatagaaatgaaataatattcattttcaaaaaaaaaatgaaataatattcatctcattcatttgtttggttctattattttgacaaaatgattattttattagaaaagaaagaccaataaaaattaatgatttttttttttatcaatatgcacttcaaatttgattcaatccctggatcccaatcctattcttatttttatattcatttatattttttttagacaatggaaacttcattaatatgcaaataaaataatagtccatgtaattacatgatgatatatcactcaaaaagtagaactaaatcaataatataaacaaattatgtcttttacaaaaatataaataaaaatcttaatagcactttcaactaatataccgataaactgttattgttaaagtattaaaaaaacacgaaaaatgttaaatctccaactaaaatgaacatgtgacaaattacacctatcaatgataggactaaacatttttatcgggtttgacccggactcgaccaaccctcagactcaacccgaccaatccaaaaatttaaagaaacttgttcaatttgggtaagtcgggttcaacccaatatacctttcgagcaggtgttgggtttgattttttaaatgatcgaatttcgagttggactcggacctatgcaggttttttttactcttcgaccaaaaaaacccttttaacaaaaagtccccaaatttatgttttttaaaataccatattttgtattttaactattacttattaaaaaaaaatacccaatttaattttttataatactaaatttaatattttattaaaataaaagactcaattatattttcaaaatctatattttaaattttgaccactatataaaaaaaagcaaaattaattttttataattttatttatttatttatttgaagcaattatactaatataatttttttaagaaaaaaattacttaaaataaaaagattgggataatgaatttgggttttgaacccgacgt

SEQ ID NO: 26893 - DNA, 1038 bp, Cannabis sativa
tttctcttttattactttattttcccattcaagtttgtgagaatagtgtttcttttgtaaaaatttaaagcatttagctgagttttagttagcttgtattgtagaatagcttcaagcattgaacaagtagtgacggactgaacatttttattttttgggaacttatttatcattaaaaaatatttatacttgtattataatcacttttactagattaatttaattttgtgagggcttttctactattttaatctataattattaaattaaaaaattacatttaattttttaaaaggcaataattttgttagtgggggcatgaatgcaagtaggttcgtccctgtgaataagtggtggtcttcgagagaaaatttgttaaatccttattttgggaggaagtgagcacttaaaggaccgaaagaattttaatacttgatgtgtttcaaaaattagattagcaaagtatattataacaggttgtgacaaaggtttaaagggattcaaactttgtataagccaatttatatgtttgtaatatttaatactttattaattgatttcatttcctggtcgtagctctgtggactagtaatattcagaataatattgatatcatgtataacttacttgtgatttttactttcggcataatttatttatgcaattgtttctagtaaccaacttgctacaacaagttatcacagagtaacgctttaataattgttattgtagaaatatattttttcgctaaatactgtatttcatttttgaaaagtatatttagtaaatttatttcatttttaatttttaaaatgagaatcaaactcgaaatatatttttttatgaatattatttaattttattaataaataattatagtatttgtgttctcttggatgttgacacaactcgggcttgagactcaaaccccaagtggacttggaaccctcaccacatatccctgaacctaaatccccatcacccgaacctggatgtaaaaattgccaaaatgacaacgtaaaatactaaaatttacaa

SEQ ID NO: 26894 - DNA, 3599 bp, Cannabis sativa
atatgggtcccgaaaattgacatattaacgatcattaaattatttgttaatacatatttgagctgagaacaatgaacaagtattaatttggtcttccgtttttatttatctaaatatatatactaaagattttgattagatttctattagaaatagttaaccaatgatcatcacatattaaatcttaatttgtcacaatttttttattataaaaaatagtgaagtaataataagaaatatatataaaaagagatttgtaattcacatattactaagtggacacataaaataaataaattgaaaagaaacttaaacgaaatatatgtatactgtatataatttcttaagaaaattactttattgttgttcctattcatattaatcacgaggatgcagtattattaaaacagaaattcattaattattacatctcacaataacaaaaaatacatcgtcattgctttgcaagtatataaaatatcatctctagccttacagtcactaaacacaaagaggaaatgatgaaagttgactttgtagattggccaaaaaaaaacagtaattcagtcccgtttatgatgagtttaattaattagacaagaaaaagcaatatattgtaagagctataaaaaaaattagttgtttgatggttaaggagataaatgtagaaataagggaaaagtgagtaaaaaaaatgaattgaattgtttgatgttatgtacttaataaatgcaatataacttttaatatatttaataaccacaatgtaatttatgattgagaatataaagctttcttaacacgtctacaacttctcggtacagtatattaagttatatataagttatattattggtgccgctagctaatcgattaattacaacaaccatatatgtaatgtttcagttcgtggtgttggtagcatttctcataaaaaattgtatgaagatatataacaatacatatttggtatatatatggatgtttgagtgagctgttgtataggcatggagtgagacaagtccgaacaggttgggctgatgggccagcatatgtgacgcaatgcccaatacagccaggcaaaaactacgtgtacaatttcaccctaacaggtcaaagggggactctactttggcacgcccatatctcctggctaagagccacagtccacggcgccattgtcattttaccaaagaaatcctttccttacccttttccaaaacctcacgccgaaaagatcatcatattaggtatactcactcattaattatactaattaaattatcatttttcaaagacattttctaacttacaccgagctatatatatagtatctattaattggttcattttgtatgtacaaataatatacataggtgagtggtggaaagcagatgttgaaaatgtggtgaacgaagccacacaggctggtctgccacccaatgtctccgatgctcacaccattaatggctttccaggaccttttcctaattgttcttctcagggtatactaattaccacatgggggtatacttaaaccttgtgcttgtttgttttttgttcaaatcttattgaaaaatgctagggcaccttgtcaaccaacaaaaaaaaaaaatgtcaaattattattagtacaatttaatattaagtcttacattttttgatttaataaataatttaagaaaccgctaatcattcacaataaactatattagtatggtgttggatacaatgcatataattcttaattttacgctattctatttttaatattaacttatatgttcatgaatttccctaagattattttgtgatcaataattgcgaactatgttaaaagcttttgtgctaattatcattaacaaccctttcctggcttgactaaagatctctataaatctaatggttaatgtcaaaatcctataatgggatatgagtgtatagtgaattaatatacaacattaataacttataaattaaattattgtacagcttatttttgaatttgagcaacaatatatcaagtcaaaagttttgttcattttattaatacatgaaatgaaccgttaatatatgtacatatacatatattcttgtaatgagacgattttgcccttgtaactaatattgcaggttacactctacatgtggaaagtgggaagacatatttactacgaatcataaacgcagccctaaacgacgagctcttcttcaagatcgccggccacaagctgaccgtggtggaagccgatgctgtctacaccaaacccttcgaaacagacaccatatttgtcagcccaggtcaaaccacaaacgccattctcaaagcagacaaacccattggcaactacttaatagtaatttcacccttcatggacgccccaataggctttgacaactccacctcattctcaaaattacaatacaaactcaataatagtagtactactccatcaactctccaaattgctccaacattattcttaaccaacattccaccccacaacgcaaccccaataacaaaaaaattcattgactccctcaaaagcctgaactccatccagtacccaacaaaagtcccgttgaccgttgaccactctctcctcttcactataggagttgggctcaacccgtgtgacacgtgtgccagtggatccaaacttgtgggaaatataaacaacgttacctttgacatgccgtctgttgctcttcttgaagcacattatcacaacatcaagggcgttttcaccgatgactttccggccaaaccgccggttgttttcaattacaccgggccttctccggcgaatatccagaccatgaatgggacgaggctttacaggttgagttacaattcgagtgtacagatcgttttgcagggtacgggtgtgatagctcctgagagccacccgacccatttgcatggattcaatttctacgtgattggaagtggattggggaattttgacccggtaaaggatccgaaactgtttaatcttgttgacccggttgagaggaacactattggagtaccaactgctggatggactgctatcaggttcagggcagataatccaggtgaacatcataagttgcaactctatttattttacgttgggtgtttcttttgatatttatacacaattacaagtacaatgattttaatatcctgaatttttaaaacaacaacattatacacacataccaaaaatactaaattgaggaaatatcttatcccaattctcaaataatctcatcacttttaaaccaaacttatagttataatggctgccattttcttcgttttaatttgttccaaaatgcatgtaccatattgtacaaaccaatcccaaaatagaattgggcatcactaatagtacgttatatcaggtccgcatggaaaaattaaaaaaagaaaatgtgcatttttatttgagaaataaaataaaattcaacaggtttttaaacaatttttctaacaattttttttagcattatataatgtaaaaaaaaaaaacaaagaaaaagaaactgggagacctcttgagctaaaagaccttgggcagacttattgggtctcaacaaaattattgaatcat

SEQ ID NO: 26895 - DNA, 2529 bp, Cannabis sativa
ttttttttttttttttttctgtgacatggtttgttttattttgttgttggttcttctttgttcttcgatgactcaccatcaaatcgttgttagtggttgggaataataagttctctgagactgaagaggttgttagtagtgcagttacgtaccttgcacaatagtttagtgttcaagttatgaggttgaatgaatctgctgcaacagtttctactgttatgtcttttgagggctagatgaaattgaatataagtgttcttaagattaaatgctacaatctttttaatataattaatttaatgtttagttttcctgtcaaacacgatctaagaattattttggttatttttctaattttaattctagttgtctttgggggagatgtgtcgattgcatgttattactttattaattgctattgataaattaattgaatgatttattaaaaaaaatatacctttataaaataaagaaaaaagaaaaagatatatatgcctttagaaaaattaaaatatataaaattaaataaatgttatggagcaacaaattgaggcaaataaatgatgtaataactgagaaatgttaaaaaagtactgctcgacgtcgtacccaccaataataatacatgacattttcaggtaaataatgaagctgtaaggtgaaagcatgattacttattaatatgaatcatgcatccccttcccgtagctccaaaccttgtctattagattattataaaactttaattaaaccgcccaatcatgtgaagatcccaagaacgttgagcagctatttttccaaaccgttgcttcggcaacaatcaatatcccatagtttttttttagttttttaagtttattgggatcgtaaatcacattaaatattgttggaggattatcttactaaaccaaaatgtaaaacatagtcaaatgcgatcatgatattcaagcgtgtggaccagaattttattaacaagtatcattcactattaaaaaataatgtcaaacttttgttagtagcgcagcagtctcttaattgcagtgtatatggtaggagtttttttttcctctaaggataggagttatatttcataattaatgccaatttattttaaattgttattaggtgcattattatgagataacaccttgtaactattaaacgattttttataatataattattatataaaaatatttagtatggatacttcatgcacccgtaaaggacctagaataacaattgaagatgagcaggttttgaaattataacgagcataattaatttaagataagataattttgtaagagaaaatagttttgtaagaaattataagaaggaaagtggataattaatttttgagggtgggcatgtaccctcctaaatatgtacctattagatcccttatagattacactaataacgagaaatgagaaatagcacgttaaaacatttttaatggagatacaaataattggcagctaaaataaatatagtctactttggaaaaaatttactctaatgttataccaaaatgtgatgtaaaatttgcatcactataaatatgcacaattttaatattacttttattattttattaatatatttagctatagcattattaatgataaagtactatttatacttttttttgttgttttatttcataaaaaaatatattaataattaagttattctttttatatacttttaataataatattaaaatttgcatcaagtacttttgtaattgtatacaatactaaaaattaatataaatatattgcaaaatatttcatcatcttaaattaatataatacaatttttaccataaaatatgatatattattatttagtataaatcaatatatatcacaccttacctcatatactttgatttaataaataatataaaatatcacataggctatccctaatagcaatgctgatatatgatattgaatcgagggtaccacggccgctagcaatacctaccataccccataagcattttaggatatgctgtatatccaatctagcttaaaatgatttgtatatttaataaagcataaaacttagacaagcgatggcgtatgtaaggtacgcttatatatatatatatatatatatcatctataaaccatgcatcccaataactactgtgacagcaacactacgatcgaagaggtaagcagcgtcaaaagagttgtcatgcacgtacgctccgaccaggaagtcaaataacaagaaataagagactagactgccaatataatgattaatagcttaattagatcatgtacatagagttactagtcgatcaaaaagaaaaagaaagctcaaaaattgtcctataattttgattacaaattatgttttcttagttttgggataaaactaaattgaaaagcaaataaagttgagatttcattgttaaattatttattaatttaattgtccattatttgatggcttatagtttagtttatttatatatagtaaaatgattatttgagagtcaatatattt

SEQ ID NO: 26896 - DNA, 2140 bp, Cannabis sativa
aacatccagcacccaagttgacattgtgtcattaatcaggatgctgagtaagtggaaaaatgttagagacttgtactttttgatgcttaagtgctatgttgacatcacttaatcattttcttcactttggtgaagttgtttaccagttctcagagacattttggtgaaattggttagacttaatgctccctaattttgtcgatattctaccttaataagggtgaaatataaaagtgtgaatttgacctatcacaagtattagctctcatttaattcaaaaaaaaatagtcagatggtcaagaaaaattcagattcttatatgcagaacccaacgcacaagctatctattagcatgttttggatgtagactaacaaaatgctcgaaatacttctttgatattgtgattggaagcgccctaggttaacaatatgttaacctgggcgctgggtgaactaggttgccgaggcgcctgatgcgtcaggtgctaaaaaaaaaaaaagtgctccaattctaattctgatgccttaaatatgttcttcataggtcttattcatgtgaaagtataaagtttgagccatttgcactaaaatggatccaaaaactaaaaccctagttgggatgtcaaacttgggtgctaggtgaaaccctaggcgcctggattgactttcgaggtgttttctcatctcgtttttgtttcctgaccttggacatgattgttcttatcttctttatttagaatacttaaggattgtgagtttgaaacaacttagcgagttctaaacacccattttggagttcccaaactaaacctaggtgcagggctagggacccctcctaggtcaactactatgactcaggactactcaaatcttggatgttttctttcttttcacctgtcaaacattgatgtccacgtcaccagggtcagtttttgggtaaatagtatgaaatcatagtggctatcccaagggattattgcagttcttacataaaaaccctggttatttagcaagtgaccaaaaggcaaaccttcttagtcagttagggggaaccacactcatacatagactaataaggataacattgtgcactcacttaaatggattttaaaaatgttgacttttaacgtgcttgtgcattgctcaatgtcttgagcgacatgtatccaatacatcatcaagtatataaataaataaataaataaatatttacgcatagtgtggtacatgccacataagttaacacatggcagaatataggaatagaatcgcatagctccctagaaaagaaaaagaatgtcatagcatgaaaggtgtcccaaaaaagatcaggtcccaggattaaaagctgcttggatagccataagtctttacacccatgaaaatagtgctatatgttccacaggaaaagtaatctaccaagggaaaaaaacaaggtgtacccaattcaacacctcgcatccaatgttaaaatcctagtcaggtgtaagtccatcctactgctctaatggaattattcatgataggtctctgtaatgatcaacaatcatggaagtaggatcatggtcatccatatctttttcagaacatggccccttgttaaattcttccgactttggtaaattagaagctcgccaagctgcttgcggatcatgaacattgtttacttatgccgtcttctaagtacgagcttattaaacttaaaaattaacaagtttaattttttgagattagtaaacgattagtcttgagaaatgaaagaaactgactttaagaattagctaaggaatgaccaggtcaacgcatgtatcctggggccactcagccaaaccctagcttgagagccactcggtcgagtagggttgatgataactgaaccaagcatggcttgaagtcactcaaccatgaccgttcaagaggacattcgaccgagcatggcttgaagtcactcatccatgtaagcatcaaggtcactcgaccatgttaagaccaaggtcactcagccatgaattagagaagtaactcgatcatgcttctcataatgtcactcttcgccatgcttcatacaatttcactaaaccatgcattagagaagtcatttagccatgtttctcacgatgtcactcgaccatgcattaga

SEQ ID NO: 26897 - DNA, 2112 bp, Cannabis sativa
  modified_base (39)..(50): a, c, t, g, unknown or other
ccgctcttccgatctttgttaaatcaacatacttgtgannnnnnnnnnnntcctggtaaaataattccaatactgagctgtgacgatgttaagcttcaaaaaaaattattatatgggaaaaatatcttgtccaggttttggactaaaagagagaagtactatttaatgagacaattccactaattaagaaagtgttgcagagaaacagcaagatagaaatagcagcttcagagttaaaatcatgaatacaggggtaatatcccaaattgtttaaataatttttgaggacgaaatttctataaggaggggatggttgtaatatcccggaaaccaaattatgaataattaggatttattatgtactatggattaattaggtagtaatgagtaggattatgatcctgctaacctaatttagtacaaattataaattttgccataagtggataaataagcgtaatttgataattacggagatttatttgaaatatgtggatataatgtaagttatttgtgagataaaaatattttcagatttgacgaccttgaagacctgattagaggctaaaattatcacaacggtattagttagaaaatattgatggaattattgaggtaagttgattttagaaataccaagatattttggagtacttggaattaaccaaataccctagaagtagagattttttagtagttaagaaatgataagctaaaaattaataataaagttttattattattattattattataaaacttatctctgataagtttatatatatgtatattaagtttaagtttataaattaaacagtacgaatgaaaccctccatcctccatcgaacaaaaccctcattttcctctattaattttctttcattttcaacctgaaacctagcgatctaagctccagtagtagcgggatagtaaattcttgaagagcaaaagcttaaggtatggtttaattatgctttaagctaaaaacgattagttttatatagtggttttgtggattagaatagttatgaaggttctgaccttatagaattgttcttgggtagctatggaactagttttgatgtttagttgttgaatttgaagtgattttgagttagaaatcaagtttgaaactttttaaagcttaagtctgaacattaatgacatttttcatttaatggctctaatttaatttttattacgtagggatggtagtatatatgatatatatgtgccctatgaagtttgatttggataggtttcgatgagtgaaaaatttagaaatcacgactttttctccctacccaaccagtccactggttgtgaaccggttaaccagttttggtggaagcggttaaccatttcccaaccggttaaccgtttttgggcagtctcgagaaaattaggaataatacttttgtcgtaactttttatttgggtgtccgttttggacgttctatatactgtttcaaagcttgcgatgagctctaccatatgttgtatgtcttagagctaaaatataagttttattttagtgtatttttactacaaggtttggtaggaaaacctaagttatcctttgcaactgttaagcagtgttttaggataaacacttattggtttaccgttgttgtgacataaggttgagatcatcagggatatttctctatttgggttggccgacatgcatgaatttagattaaagctaagaaaagtatattgtactacatagcatgttatatcgtaatacaattaatattatttggaatcgattgatattgagattaaggtatgattattattgttatataatgaaatgattgattgattaatttatgataatgtgatgataccatgaatgtgatatacaggctcacctaattagatgatgcgatatacttggcggcgtaccttattaggtacaggagacaatgaaactagttatgtaaattaaccaaattaaaaactaaatcttaaaatcagttacctataataacaaaaataataatttaatacaaaactaatttcatattacaatcaactaaaaagtgaacaaacatatgacacctaaagtaatgaaaagatatattaattacaaaaaccaattactta

SEQ ID NO: 26898 - DNA, 1438 bp, Cannabis sativa
cattcaagagggcactgctaatttcatcagaactcactgaatcttgcaaatcgttcgccagggcactatcattttcgccaaaagactctggagactcctctgcatctggagaaacaggaacatcgccattggaggattgagaaagctgggagaagaatctagggttttggggtttagtgggtctaggaagagagggtggaggagattgaagtagggttttagaggtgtgggtattagtgaaagataacttacgagctgagcatctagaaagagaggctcttgcagccacaactgacctccacatcgctctgagtgtaactcagtatcagggaatgaggacgatgcagagaaggtggtggcgagagggagagtgaaagactgaaagtgtggccgtgaaatgaagacctagctgcatattgggcttcgtttgtttggactatgaacataggttcttttttgtttcataaatacacaactttttggagggttttttatttttatgaattttaaagcacaattttacaagaaagtctttttttcgaaacagctcttttatagatttttcttttaagaaaaaaagaaaaatacgataaaaacagtataagataactagttatcctggttaggatagcaattatacatactggtacggataattgtggttacccgcccctgatggggcaggggcggaggtcgaattttgggggtgggggcaggtatggatttaaatgttcatactcaagtcgggttcaagacgggatgggagaatagatactcgtcccgaacctaccccgatatgatatatgtatatatttaaattttaaaattttaactattacaattaaaataaattcatatttttcattcaaaaaagaaattcatgctttaggttttttattgattacattaatgagacatttcagttttcatgaaaatgtttgcagtgatgcatattaataatcatactaaactgctttaaaaaaaattacacttcactacttattttcgattatcaattttatatttactaacttcatttattatacacactattctacttatatttatttttttaattagtaactttgatattttttaaggaaaaaaatctatttgagacattatttttaaaaaatatatatatataaatataatgagtactcgatgagaatcattctcccgctaggtaataattgtcctgcttctgctttaattaaatgggtattggagtgggtatgaaggtgaatttaggaaatgagtatgggggtgggagagcaatccccgccccctccccatcctgtttatatccctaaccttagattgttccctctatacatttattgtacgctattatgtttattatattataatgtataataaataatattccgttgataaaaaaaataagttgtccacttgaatcttcaaatatttttat

SEQ ID NO: 26899 - DNA, 1525 bp, Cannabis sativa
tcactaaaagtaactgttttttgtagtgatgtgcaggctggtttgaaatggttaaaaaccgcaccacccgcaccacgaacacccatacttgttaggatgaatatttctctcataggccaatttgtcatgagcgacattgtacttattatgtgttcacttgcagatgtcacaggcatagactaagcagtcataccattctcttatctctttattaaatgaaactagcaagatatacctggcacgatttttatcatcatatatgccatcggttaaaagctctcctaactgcgtatctaaaatgtttacacaatttaatctaggaagtttcaacatatatagactagttgcaatagatggatctctttttacgagagaagttctatattgattctctattcagattggaagttatgatcaaatatagttactttataataggaatattgtcattcacatttgattgttgttctattttatatgttattagactgaaataaaaaataattaaggcaggaaataagtaattagatataaatacaatataagtaatatatatattgggacacaattttgtttcgtgatgtacttttacagaatgtattccgtagtacattatacgggtcttagggtacattaccattttttataaccagatcaaagctcagatcaaataacttccccatctaccggctgtacatcacggagtacattctgtgaaaatacattacgggacaaaatcgtgtccctatatattatagtgtgttgttcaaccttactcttatttaccttttaagatatatatacatctgccaatatatatgtaaatgaaaaagttatgcaggagtcattatttataatactccataaatttaaagggttttatatgttgtgttggaaatatatgttgaaacacgtactatatagtgtcagatatatgtaatctaatgcatgtttttaagtacgtaactatatttgaaaatctttgaataaagacttgaaacgcgtaatgaatatataaatatatattttatatattatatgtattcatacacaagtacacaacatctgttcaaaaaaaaaagtacacaacacaactactatgcgtgtcacaagtgtatccatatgtgttaaattgcttatttggatgtgcaaccctttatacatagattatgataattaataacactctttgtcaacacttatttgacctcataagtgaaaaaacctcgaaaattattgatggtagttaggggtagttatggttcaattgtgtgcattatattactaatttttgcattgagaattccaatgtatcataggcatatatatctatatatatattataagaaaacaatgaacctttatgttactgattattggtcattatatgtcttttttaatctccagagatttgtttatttgagattcctttgctagatatttaaagaaaaatattggatcccaaagaaactaaacttgttgaacaagaatttcatcattaaacaaagcactaattttctcttat

SEQ ID NO: 26900 - DNA, 1638 bp, Cannabis sativa
ttttttttaattttttttattcaagtaagtaaacttatttcttatcgtttagtaagttggttcttattaatttttattggagagttttacattgaaaatgtatgaaaattaaaataccaaaaataaaatacatgaaatatactattttcattgtcaattaattttgagataaaatcatgtgtactttaccatatactcacctaatcttattttctaaaccacacacttttatattcatattcttacatgatatgagaatcaagctaaagtctaacgaataaatcatttaaaattaacataaaaataaattaaatagtgtaaaatattaaagtttacaaaactaccattatttaagagtgaagacttcatattttcaagaaattaaatatttggggaccaatttatccaaaaaaaaaaaaaaaaaattattgggacactaacttgccaaaccatatttatttaaggagatacgatacaaataaacctaatataatataaaaatataagtttctatcatcttttaatttttttttaacttattacattatttaaaaaaaataaagtacacctccctcgatgtattttgttcttctcataaactagtaggttagattagagatgcacatttttttttatggaaatggggccatgtagggacccgcccgtaatgaggcaacaatttccttactaaataggaaacatggtaggaacacggatcatcttttgtccacgaatgttaaataggatggggacagtggacggagataatactccccaccccgaagtgcgagaacttgtttaataatttattttatattttttatattattttataatttataatttatattgtattttttagtatattagtatcatatgtataaattttaagttatattttagataaaaattagaatatattaattattgcaatacataatgaaaaatggtatgcattttttctttttcctttttaaaaaaagaaaaacattgacaatattcaaaacctatatttaaattataatggaccgtgcatttcaaatgtatttctatatataatggaccgtgacagcaattataggaaaaattatggactgatgttaattttacagtcttatttattttgttttgagttgagataaatatataatgtcaccacaactgcatgattgaatataatttttttttttttctgttttagaaaaagaaatagagtttttttggttcttttcatgcttgttgaatttatcttcaatatttttttcttttccattcagtaaactaaaaaagagtagtgccagtttctatttaggaacatgacccacatcctaactttgttttatcacaatcactaatgtattagactttagaaaagttggatttgcgtttttcttctaattttatattcacattctaattattaagaagaaaaaaaacctactagtctactacaactttattgtataattttttcttaaactttttaaggaaaactttgttgtatgattgctaactacatcttcaaaaataaacggaaaaaagagaataagagcgtgacggttgactctacgacttccacatgtaccacaatgcttttcagttgtggttgtatgtatctctcaattttatcacttcaat

SEQ ID NO: 26901 - DNA, 3870 bp, Cannabis sativa
ataacaatgattaatagtgtcaagataatgagtaatgctatacaaattattgttgtgtactttatcattacgggccgccatatagtatccactacaattgaggcatagagaaacacctcctccacattagtacccttagtttttagacctcacaaaaaaattaatccaattccaaacactaccaccagattcactcattggctagatctcccacagtgaggatctccatagatggtaggaaaaattacaatgaagaaataagtgttccatagattcctcccccatcccatagataggacaagaggaatcttcgatatacattctcttcgccaaaagagtacgaataagaagcgcatcagagagaatgctccaccacaaaaccttgtgacattccagcacctagatattccataatctattccaagaggatggggccaccaccacaggcggtgcacgctccagggcttggatcaggtaaacaaactttcttgtgaactttttaaaattctctttggtctagatccactgatcattcccctggccactcggtctacaccccttcaataagttacgaaccgtttcagcatcgaagagggatttaagcttgtcaatgtcccactcaccattaattagcaacatatctaaaacccatcataaatcgttcagctgattggcagctggtcttgggataaactatttttcatgtgtaacccacagatcttcccatatcctagtatcatttccatcacagataattttgcaggcacctctcttttgaacatcctgggttttgataacatatttccagaaccatgagttagagtttctgtatgagcaatccaaaaagtgcctacccttcatgtatttatctctcaggacttggtagcaaagcgagtggttctcgttgatcagaagctagcccacttagccagaaaagcttgattcatctctactcctttcctaaagtctaaaccacctctagattttggaaggcacaatttttcccaagccttgagatacaagcctcggttccctctctcacagcccatcagaaatctctggtcaacccatcaatctttgaagccattcttttagagagtttttttcggttgcattgtgtagactgggaaagtgaggccaaccaatttgatcatagtggcacgacccgcttcagagagggttttcattttccatccatagagcttagaaatcagattatccaaaataaactagaaatcagcatccttttgacaagatctaaagagtgagagacccaaatagttaatgtttccaataacaccctcaatctccaaagctctttgcatcactttctcatatcgacactggtattgttgctaaagaaaatggaagttttttagtatattaatacattgtccggaccactcacagaatttctcaaggcattcccaataacctttcacttcgttataattagcccttcccacaataataaggtcatcaacaaagaaaagataggagcagcttgatgcccttaataataccttaatctagagcatcttccgaaatgcgagagaagatatcagccacccagataaagatataagaagaaagtggatccccttgtctcataccactcgtagggctaactttccccaccatacctccattaaggcagatgttgagggaagaggtagagaggccatgataaacccacttgcagaacaaatcaggcgccttgaagcttcgaaggacatgattaataaattaccagctcaatttatcataggccttatcaagattaatttttatggaaaggaagccttcctttcctttcttccgtttaaaggaatggatgatctcctgaactaacacattgttatcctgaatgtttctacctaggacaaacgctgcttgtgtgaggcagatcaatctaacgagaacaagcctaatcctattagcaatgattttttaaatgactttataaatcacattgcaaagggagataggtctaaaatgggcggctttctttggattgggaactttcagaatgagcaacacattagtagcattgaaccctttgtgcatcgtaccagtttgaaagaagtcacccaccacatcacagaagtcgcaacccatagactgctagtagtgcttaaaaaatagtaccgacataccatcaggcacaggagccttcatactccccatagaaaaaagagtttgcttgatttccttaggctctggggctcttatcatttctgcttattcaagggggtaatgtgatcatgaataagatagtccaagctctctagagggcccaaataagaactcgagaaaatgccacccaaaaagctagtgagttcttcaccaatttcacctcgagacgtgacccagcaaccaatcctattcaaaatgctctcaatagcattcctcctatttctgatggtggccgacacaaagaagaattttgaacatttttttccattcacacgggatctttgatgccaaaataaagcccttcttttaagctcctcattaagatcggcccgtaccctctactcaaggaacaaacaatgagatcctatcttcaaatgttgaatattcctgagctccgattccagtcttttaatgttagagtcaaatttatcaaatcgctccctattccacttggtagagcaatcctagtagtacccaccttcttgaactcccttgcgggggctaataatgattaatagacttccatgcatgctctacgaccatattgctccaggagtctctcgtccaccatgcttcaaagcaaaaaggccatttaaaagaggacctaagacccccaaaatgcacacataacagtctgtgatcaaagttacacgtatggagggattggataaccgcctttagaaataagtgaagccaagcctcattcccaatagctttgtccaacacagatttaatatgagcattaccctccctatgattgtcccaggttaaattatcgccttttatgtgcatgtcaattaaaccataatagttaatcatctccgagataaagggtaagaattggtcctttccctttgaggtattataaatttagatctcttaacatcaattgttcctttaaattgggtttgaaaaatttgccaagcatctttaacatattcataagaagatataagcttaataaaacattcacctactccattaaatatagcatgtaagatttactttgtaagtagataacgtatcatcttcaatagaccattcaagttcaggttttgatttaaaattaccttcagaatctaccacaacaagatgagaccattctgaaagaattattctccatactttctcatcttgagacttgataaattctcttactctaaccttctaataaggttagttaggttcattgaggagtggtggatgaacaattgaacttccttctgtaaaggggaacatattgcaaaaatacaagaaaacgttaaaggaccacactaagattttagtgtccagctttgataccaattaaaaattgtatttttgcaaatgacaatatatttactaaatttcaataattaaaagacaacattaacgatttgcagcaacagattggaatcttgtcatagcagaacacaaatttgcagaatgaaaatagaaccagaataaatagtgcagaaattaaaacttgatacaagagaattatacatggtattagtgttctttcaaacactcctagtccacggggccacacccagagaatgaaatcaattagtgaagtatcaataacaattgacttaaacaaatttaaactctctctaatggtttgtcgtaaccctttataatccaccttgctaatttgaaatcttaaacacaccaagtagtgaactcctttca

SEQ ID NO: 26902 - DNA, 1258 bp, Cannabis sativa
tgtcctataatacacgtggcatataacagtttactgttaaatatctgttgttatgaccttcagggctgaacatttaaattagcaaacccaaaaaacttgatcacccggcttgacttgctgccaaaaaaaccaaaatcttgaaaatccgtatggtttgatcgggttcaacctgaaaatatcccacacgcgttttgggttcaggtattaaaattagttttttttggttgggttctaatccatagcccaaaaaaacattagttttttttttttttttttttactttgttaaagcagatttttgttaaacaataataaaccttaagccttttcgtaatgaatttaacataaaaattataagaaattaataaagtataataagtataataataacaccagatatttttacatgcttttgtagttaaatctacatactccgcgactctatcttatccaatatatttctgagtatctaatataatatacaattgattgtatttctcccaaagatttttccgtcccttttttatgtgggatctgcccctatttataggaatataggttgacagttttttacatttaaattcaaaatacataactgtttcatgaaacatgagaattgatcacgtttcatttaaacacgtatggataacaattgataaccgcataactgcttatcattcttatctgcaaagatggtagatgctaatttggacaatatcatctcgcttaacttatagaaggtcaatgctaatttggacaatcatatgccttccagcaatggcatgagcactagtgtactgagcaaacttaagaactaggggtgagcaacggttggtttggtcggttttttacacaaaaaaaaaatccaaaattcgatttttctgttttcatggctataatctaaaaaccgaccgaccattatataaatgtaaaaaaattgacctttttaatccacggtttggtcagtttaaaccgaacaaactgagctttattttttttaaaaaaaaaataagtttaaattttctataattatttgaaaactaaaaaaattagagtactgtatcaaatatcatataatttaagaataaaactttcttagttaaataaataatgtaaaataattttttttttaaatttgctcaaattatttgtgctactaatatggtagtattttatattaaaaaacttgtattattttatgaatgtgtgtatataatacgtaaatacattaaattataataaaataaagcaatgaataa

SEQ ID NO: 26903 - DNA, 4547 bp, Cannabis sativa
caacacttatttatgtattatttatgtaagtctttatgtaagtccatataaaatatatttttttttttttttgaaatgccatataaaatattctaacacactatacatagacatataaatttaaagaaaatgatgatcacaacaaaaaatatggaataaaaatataatagattcaatgacaagttctttacggtacaatttctttattttcttctctattttagcatcttttaaatagttttttggttgttgttgtctttcaaatagttatatgtttatattttcttttttcttttttgatgtcttttaattttttttgtcctgtgtatgtataaatatatatctatacaatttctttattttttttcttttttattatcttttaaatagttgtgtgtatatataggtatgtaatgtgtgtatctatataagtgataatttaaaaaatttgtatatgtattcaaacgttgtatttttatattaatatatctctctcttacaacttacaaactttatatttttattttttttttgataattagaacttttttattgaaaaacaaacacaactagtgaccacaacagggggccacttcccttagcaaacccgacacagcgcaattagattctctagcccatctagcaagggaatccgcatgcacattagaagtcctaggcacataagtgacaatcacagactcaaaacgctcacaaaggttcatacacttagaaaacaaggggaagactctccacccataaggaatcctggcatttttaaaagctagagcagcaaccttcgaatcggtttcaacccagattttcaccacctggtgcttcaaaccagactctaaggccagctcaatggcccttagttcaccttcaaggacaccctcgacattcccaactcccactgccaaccaggacttctccaactcctgttgtctatggaagacagcaaaccctgccctgccaccagccacagaagcatccacggagcaacgccagtggtcgtccgggggttcctcagggatatccaaggaactctcccttgcctcaggatcctcacagttgttccatattctcaaaaatctgttgcacctatccaagcaatctcttataagtaagttaacattcaaaggtttttccttgaataccatctcatttctccacttccacacagtatcacaggtgcagggaatgaaggtttggatctcagaatcctttgaattgctccaccatatcccgaactccaccaagttagtccacccgaaacaatcaaggcttatccctcttaaaaaccagattcccctagtaacagggcactggcagaacaaatgcaggccattttcagcagcagacaagcagaaggggcagagataagggtcataactccaaaagctaaattttcccccgttgaaagcatgttggagaaaagtctccaacagaatagtctcagccttggatgaatcttgcttttccagaatctaccccagaagtcagaaggcaccttgaacctgtgcacctggccagcccaataagcacttttaacactgaaatttcccgacttagcagccttccagaatacaatgtccctcccttcttgaatagggtgaattttcagaatttcagaggcaatgtggtcatcaaaacatttcctaatcagattcacattccagcagcaagaattctcagtgaacaagtctctaaacttccatagagcttggttgttaacatagtgaaaactgtcctttatagcctgcaaatccacttccggaatccacggcctgtcccaaatttcgctatctccatccgcaattagaataccagcattgtcaagacacacctttctcgtatctagaatactcttccaggaccaagagtccctactctgtttctccactatccaagggttggaattgtggcagtatttctccaacataaccttcacccacggtttatccatttcctgtaaaaccatccaaaataatttttccaataaagcagaattcatgtccttgaaccttctcacccccaaccctccacatctcttaggttgacagatatcgttccaccttttagtagcaaaataattctttttttccatgttgccaacacaccaaaaccttgctaggagactatcaagttcctcacaaagcgaagaggggattcaaatggtggccatgaaatagttagggatactctgaagcaccgaattcaccagaacagttctgcccgcctgagacaaatgcctagctttccagccctccaaatgcccaagaatcttctccttcaaaaagtgataatccttcctcttgttagccgaaaagaagaatgggtttcccaagtacttctccgattgtttaagccaccccattcccagcaggttcgtaatgtcctccttacatcgggcactagtgtttggggaaaaaaacacaccactttttgctttacttacactttggccagaccacttctcatacttttggaggcagttcaggagagtcctcgcattacgttcattagcttggcagaagaacatggagtcgtcagcataaaagatgtgagaaaccgatgtactccttcgagcaactttaacccccaccagattcccattaccctccgccttggaaattagcttagaaagaaccttgctgcagagaataaataggaacggagataagggatccccttgccggagaccacgtttaggattgaagggagccaacggtgcaccattaagcaggatggaatagctaactgtcgaaacacacttcataataagcccgcaaactctagaattaaatccatttgctcgcaacacccgaagtaaaaaattccattccaacctgttgtaagccttgttcatatccgttttcaccgccataatttcgcctttacctttcttcagtttgagagagtgcataatctcatgagccaaaatagagcactccgcaatccatcggcccgggataaaggcagattgattaggggaaatcaatctgtctaaaatccctttgagcctatcggttaacaaacgagatatgattttgtatacaaaattacataaacttatgggacggaactggccaaaacaattagcatttggagacttgggtatcaaacaaatgaatgtatggtttaggtacctgtcaagagtcccggatgcaaagaaatcctggatcatgttgcatacgtctacccccactatctgccaatactttctaaaagaaaataccagaataaccgtcgggaccaggggactttagcgggtgcagcttaaagacaacctctttgatttccgattcctccggaattctagtaattgaatcattttcctccaccgtaaccttatcaacaaacagcgaatccaattcaggatcaatctccggattttccgacccatacaaatctctgaaatgctccaaaaagtaatctctgatttcctttctctgtttcagccactcccctgagtcgtcaagcactcccccaatgtgatttcgtctgctacgaataatggttgaggcatggaaaaactttgagttgctatccccaaatctgagccagttttcacgcgacttttgtctccaaattctgtccatcttctcttcaagatcaagtatctccaattgaacttccgcttcacgctccacagattctttcgaaatggtctctttttggatatgactcaactgcgtacgtaaaattctcagtttcttgtcacagaacccgaaaacctcagcattccatctcttaaggtcattctttgtcacggtaaacttcctctgtaaattgccctcactctgatcactgaccggagaacgccaagccttggtaatcaccttttcacagtccgaattggaagtccaaacttcaaggaaacgaaaagggaatttcaactttgggggagccccccaagaattaagaaataagggggcatggtccgaaccaagaatagggtaagattgcacaaacgccctggggtacagagtgcaccagatagcatttgcaatcactctgtccaatctttttcgaactctattttccgcccgcctcgagttctgccaagtacagacatctcctccacaaccaagatcgattccacccgtgttaaacaggaaggaggcaagaaaacgaccctccctcgcgtcaaacggccttccaccaatcttctcggaagggtcaaggataacattcaaatctcccagcaacgcccagggctgattacagtcttccaccttctccgtgagtccctgccaaatatccctcttcttagaatggtatggcgtgccatagatgcagaataaactccagttaccgttacccaaaccctccttaagcaccaaatggaatccagattcgaacacttgcgagacattgcactccactccatttcgccaagctacacagaatccaccagcaatcccgtcagctagtatgcacacaacattagcaaagcccaatctccttgttatatttatcattaattccgatccaaccttagtttctgagagaaaaattaagtccgcatcacaatcaaggattatccc

SEQ ID NO: 26904 - DNA, 2576 bp, Cannabis sativa
aaaatcacataaaatgtataaatgttgtccacaccttatggaggtatttttgtaaataaagtgtcaatttttattttctatgtaataattccattaatttttctattttttcttcttttaatatatatttttaaatactaagacaacataatatctttttcgagtaatttgcggcataaatacctaagttttatgctgagtaataaatacttgagctatattttttgcggcaaaaatacatgccgtcactagtatgaaacttccgtaggtatttgatcattatgtgtcaggtcagtgttcacgtgccactcgttcattggtctatttcattaaatttgttatttatgatttaaataattatttaaatgttattaaaaatgattttaaaattataaaaaataaatataatcacttatttttttttatttcttatttaaaaatcaatttaaacattttacactcattttaagaaaaaaaaaattattaatagtcaattagttatataaaaaataaaattaaacataattattaataatcattttaacttcatcatctgccttcaaccataatttcgaacccccaactctaataatttcatcgtcaatcatcttccacaaccccttcctaaattattcttttcccaaatttctccttgccttttgaacctgtaccaacaacatcaaatacagtctaatactttatcactcatcaacttctataacaacaaaatcaaaatgacaagaccaacaccatatactcgaaatccagaaaaaaaatacaaaaaaggcaaaaaaaaaaaaaaaacacttgagcttcaaagggttgtgaatgttgcccagatctctgccaagaccaggcgtcccatcaaagcctctccgagatctccatcgagatgctttgtctggcatcaagcaaagagaaacagagagagggacactgcgaggagggggacagagtgaagcagatccagatctaggggttttcaagggttgcaaacctcgtggtgaagtttgtttaggtcacagacagttggagcgtctctatttggctccgagaagatagaagtcgagaaagagatggagagagagtgaagaacgtgagggtctttgattgttctttgtgtctttttgcccttttttcttttgctgcaactgaataatgaggaaggtgatgatgatgaaatagtgttactttgataaatgtatttgaataagggtttcatgaatggtgttcaacaagaaaaagaagagcaggaagaagataagggtttcatgaatggttttagcaagaaaaagagtagcaggaagaagaagatgatgacgaagagatggcattccaattttctttttagcgtttatttgttagttttagtttttgggttttaattaataattcatttattttaatttaatgaaaatataaatattaaatttttattattttattttaattttaaattatttttttttatttttttttatttttaatattttaaattgatttataaataaaaaataaaaaataaaaattaaatgatctggactaatcacatagtgacaagtggacactaacttggcacataacagccaagtacctacgaaagtttcacactagtgacggaagtatttttaccgctaaaaatacgactttggtatctacctactactcggcataaacattaaatacttatatcgcaaattactctatccttttataatatattaaaataaaaattatttatttggaataatgtttaaatcaaaataatttataaaattcgtgaaataataatttctcctttttctctaatttcttaatttggttcttatatactcaacaatataaaagaaaaaacataatttcttttcattgtatatttttcttttttctttttccgtttttagaatgacagaatattttttggggtttttacactatatatttaaactttcaatttttttttatactgtattttttttttttgaaaaactcagtgtaagttttattctgtatactgtgttaagtttttactattgtttcacggttgttatttagttgttccactattgttttaattttctgttttgttattttaagattgttttataaaaaagacagtatttttgtaaaaaatttcgtgtgatagtaaaattgtaaatttttatccgaaatccagtatttttataaaaactctatattttttagaaaacttacacaaatactggaattttggttaacttttataaaaatactattacatgaattttttttaaaaaaatactgtgcttttataaaacaacagtagaacacaaaacagaacaactaaaaaataaccgtagaacaacagtgaaaattaaacacagtacacactataaaatttacacacagtatttttgaaaaaaaatacagtatttttgaaaaaagttttgtcccacaataaaaaagtaaaaaaagttagaaatttgtaaatagttgtatcttttttagcaatgggccaaaatttaaaagtgaaaattacatgaaatatgggatttcataacaaagttagaaaaatatggcatttttaggtttgccac

SEQ ID NO: 26905 - DNA, 1817 bp, Cannabis sativa
tgggaactcttcctcattaaaaataacattccttgctatgtaaaccttgccatcttggttttcacataagtaacccttgtgattcatagaataaccaacaaaaatgcacttttcagatcttaaagcaagtttgtgagtattgtaaggcctgatatgaggatagcaagcacatccaaaaggctttagaaaagagtaatcagggctgctatgaaataaacattcatatggagatacatctccaatgaccttagtaggcaatctattgattaagtacacaacattttgaaaggcaagccaccaatatgacatgggtaaaccggcttgagcaagtaatgtgagccctgtttctgtgatgtggcgatgctttctttcagcacgaccattttgctcatggtcatggggacatggatgctggaaatggacaccatgttgagtaagaaaagatgctaaggatctatactcccctccccaatcggactggacagatttgataggtaaggcaaattgtttttcagcaaaagctttgaattggaggaaggtactataggcttgggattttagggataagggaaagatccatgtgtacctgctataatcatcaatgaagtgtatgtaatatctatgaccttctttagatggtgtatgagagggtccccacaaatcagtgtggaccaattcaaggggttgggaagctcttgaggtagagatagagtatgggagtttatggctctttcctcttttgcatgcctcacaaaattttatatctttgagattgacagaaagatttaatgcagcaagtatcttggctagtatttggggggcaggatgtcctaacttagaatgccaaagatttatattcaatttttcagcaacataaagaactgaattatgaacaacttcagtaggaaaagtatcatttttaataatgtggaaatcattacatgaaggagctgttgtaacagcagtgttattacattgatctatagtggaagaaatagattctatgggattgacatctacagaagttgaaggcagagatgaagtttctgtcttggcttgagttgtggcaaggtggcattctaactggactcttgatgaagggaaggaactgtgagatagtgtgtataagccatttttaagcctccctttgagcaagactctccaggttactttgtccttgacaaaacaacattttgagtgaaattcaagaaaaacattattgtcctcagtaagtttagacacgctaattaggttctttgttatttgagggactttaatgacattattaagatgtaaagggttattagaggaagggagagaggaattaccaacatgacttatgggtaggcgtttaccatttccaacaacaagagtgtccgaacctgagtaaggtatttcggattcaaggtgttccattccttgagcaatatggtttgcggctcccgtgtcagcataccagtcgaaatcatccattaattcagggaggacagagctagagtacacttgagggtcatcatcttcatctatctcagcaagataggctcttggctcactgattttgggtgtaacaaagcctttatcgaaccggtaatggccgatggcagcagtatgtccagctttgtggcatacttgacaaagcaagcgtggaatggaggggtgaccacggccaaaggatcgaccctgagatctgttgttggaagcagtgccacggccttgaggagcataagaacgataaccaggagtgtatcgagagagatttgctgtcatcttggatgaagaatcactcaaggtatagtgtctttcaagcctgctctcat

SEQ ID NO: 26906 - DNA, 1692 bp, Cannabis sativa
gttgagcttgtgcctgcctataattagcaagatatgttttagcaaagttcagcaaattggtgaccgacttgggctttttaccatgagctttagcgtttctttcagtctaaatacaccaaagaattgttaagaaaagttccagcaaattagtagggagcactgaggaaacatgtaacaggaaatctgagaagcttgagttcctatacaaagcaatatcaattgccaaacctgattgtctctagacatgcttagcacgggtacaccagaaaaagcgtgattgatagttttagagtatattttgtatagaggacatatacaatctactgcaatatgacgataaacaagggtagctgtcgtaggagagcttcgtggaaggcacgccaagcaaagattctgattttagacagaaatttaagacttcaaaaggtttgccaccaatgattcgaagaatcggaactgctaggagcagtttgatcaggggtctctaaagtaaacttataacccgatttaacagtgtagcatcccattgatgagtgatgccaagtaagaacatcaattaatgaaaaaagattcaaggggataaagagtatttggtcaacatcagctggacagaatagttcatgaagcaagttccaattccactgtcgagaatcatcaattagatcagccaccttgagagttggattttgacccatgtagagtgcttaggaatagatactacttaaatagaaaccttcttgatgctggtgttggcaactcaccttctttaacttggagatcaattgtttggggaaaggaattactaaaaagagtgtgttacatgttcaaatgttctttgtagagatgactcttggatccctggtcatactcttttcaagccttttttatttggctaagagaacctggttaaaatgaatcaggttgcgaaatcccattcctccatgcacctttgctttacagagaaagttctaatttttccaatgaatagactgtcatgaagctgatgagccccacaaaaacctagccatgagttgttcattttgtctgcataacttaactggtagttggaaacaactcaaagaatacgttggaatttcttgaataacgacatttaataaaacctccttaccaccaatagagaaaagttgttctctccatgagtttaaaagtttccaaatgtagtctgtattaccactaaaaagctaatttttatctcgtccatcaaatgatggtaagcctaagtattgctcatgataaggttggcttgtcatacaaaagagctgttgaaagaatcttctgtcagtagctctattgtttggagaaaaagagagagcacatttctctatattaatgacttgtcgtgaggcacgattgtataagtaaagaaattgctgaatggctcttgctgaagatcgattagcatcacaaaacggcacagtattatcagtaaatagtagatgtgtgacaggcagagttgatctagaaacttttaaaccttccaatgaaccattcctttcttcgtattgcaacaatcaagaaaaatcttcagaacaaataagaaagtggaaaggggataatagatcccattgcctaatgcctctttatggcaaaacatcaccatggataactgttaggttatttttagtatcaattttagattaagtttagtatatttttaattgagttttaatc

SEQ ID NO: 26907 - DNA, 3001 bp, Cannabis sativa
ttccattccattcctattctcatttccattctcattttcattcctatattttcattccttccaaccaaacgccaccttagtgaattaagttttgtacttaacgactagtcaagattgaccaattatcactgtttttttattcttgtttttatggtcaagttcgtgtttgttatgtaggtcaaggcggtgattcagctagaccatactttcagggtcagaggaatgatatgaagatggcctcagagaaacaaagcaacagtgatacaaggtctcaaccacacaacgaagacatggaagtgggatatgaagaccctccttcctcacaaacgttccaaggtcttgaacaaatattccttgatgatattatgaaactagccaaggaacaaaacgatgcagaggatgcagaaaacaatagacacagagaggtttgcttttatatctatacctataaatataatatcattttcctttgtttgtattagatattgatgttgaaaattctgtcttttagaggataagataaatcatattcatttggaaatagaagtttcggtttttgttcagtttttatttaaggtaaattattttactttcattaattggcacaaagatttattaatcaactgttatttgactattttgctgttctttctaaataaagtgaaagtgtgatgtttccttctctttcttattttttgtgatcagaaaattaatgcaattaatggtcagtatgaagagcaattagcagcacttcgagctaggcatgccaaccgtagagatgagttccttcggaaggaatcatgcatacgacaacagcaataccagcaaggtgtggtagattgttacccaaatagcagcattggacccaatgatcctcgggcttacaatgaattcccagcctcagctgctgctgctgctgcagcagatggacacagaggctttgataataatgagcgatacgattcctacagagagagggctcgatttcttggaggcagcggtagagaccatggttttgagtctagaggtccttatcccggtggccgtgtttatgatactggctcgcactattactgactgattttccatctgtcaggtcttcatcatcttttggaacaatctagtgttagtggtttttttttcatacagttccctagcatttttggtaactgaaaggtactagtacatgccttgagaaggctctaatgtaccatataacaccaaagtcctcttctccagtgcaatattattattgtaccaaatcttggtatgatgttgatgattaattactaatcaaataaataattagggtttttctttagaagttcttagtcgtcgtttgagttttttgcctaaccagggctcgccagctgtttcttggtcttacgacgtggttctggttgggtcttcttaattttcacactatatttgatttcattaaggttgctatttttgtgtttgagtgtttttttcttctctatctttttttctttagattgtgtttcggaaattttagttgctcattagctctggattggatcttcactggtgataatctttttagtgtgttatttttatttgctatattttgtttttaatgtttatttttattttcaataatagtgtagctgaataagcttgctatttttagggtagtagggctttagttattcatgataggatattctattcttgtttctttttaggatattgggagaatcttaattgagcatgtttatgttagtagtatgactatctttattcatgttcagatttgaaggattcttgttgggagtacatgcttaactagattaatttatttttcatgcaaattaacatttatcataaacatcaatttcttatgacatctatatcacaaattgagtacagaatacacttatagagtgttgcacaacaagatatgacttctcccgttcaataatttaacctgtgttcctttctgtcaaagcatatgatcaattactaaatatggatcttcacagtcttccatagagatttagatattgtaacagaatagagtaggtcatatcacaactgctatgtggttcaaaattctagagaggctattattggtagctatgttagagaatagggagagtaatcttttttgaatttctgaattctaaagatgagtgtgtaaaatgtgctcctattgtctttatttttaagagtgtgcataaatcgatcaaatccaatgataatcgattagtttaattacaactgaccgccaaacattaaatatcacattgtgatttgataagattgaatgctatttttgaatatccaattagatcgaatcgaatagtggatgggatgtccaaaaattaaatacattcaacattcaatcgaactaattaatattttatttagtttaaataagtaattagattttatgttgttataagtaaaaaaaaaatatatgcaaattaatattaaaatttaactttttttttattggatggatccaattcaatctaatagatactggatctaaaatattggatggatccgatccaattcaataaatactaggtctaaaatattggataaagttgaattaaactaatagaaatacatgaaatattaggggttcgtcaaatgatatcaatatcaatatgcgtataccatacacatattcttattatagataatcagtatgctacttcaatatcaatatgcgtataccgtacacatattcttgttatagataatcagtatgctacttcttcccagcatacactttaattatctaagcagctaaggcaatagcaaatagcatacacacttactataccatgagtcgacttatcttcacaacaaatgtacatattcgaccaatcttcaagacttccaaaaccatagttgctctgataccaagttgtaatgccctattctataggaacgccacacgtgatttataaaactagtttaatactaaagaattagctaattattaaaaaccgtgataatactaaaaact

SEQ ID NO: 26908 - DNA, 1409 bp, Cannabis sativa
tcaacaaaatttatctaagtatattaaatatttgttatattataatagtaattattatattaaatattggttggaagaaatttctcccttatttaataagcaatgtattatttgattttttaagtaataaaattggttatttattaaataaataaaaataaaaatattgtacaatatttatttattgtgtagttaccaattgttttggtaaatataacaataacaattcagatttaattaccacttacatccaaataatcttttattttaaaattatgcagtgtaattatttcagttactttcaatagcaccctaaatatttaaattcactcaatttagtcttaaccaattcaacaaagacaataattttcaaaattttatagttttcctttcctttcatttaatgtcattgacgaagggtgaacactaaacaatgggaagtcagtatctgttgtataataatacgagtacattcacttcatcaggaggccaaataacccaccaggaaaataatattgtcttacagaactgatgaagataaaaattataagataggaaatgaaaaagagaaaatcaaaacaaaggaatgatttacaagttaaaactttcaagctgtcttgaactaatacaaaccacatgtaaaaaggttaaacaaaaatgtcaggcttctctcaccttttgaatctaatcgagccagcgagtgactccatcgtcatcaccgactgctgccagaatctcgatgctgacatccaaaacagcctacagtttgcattgattatggaaatcagaaggtaatcatagtacggtaaggatagtaaagagggtaagaagattcttcgattcactatgatccaacaaagttcataatcattgtaacgtctcttgttgtaaagcatcagtttgaaagtgaaaagggtcaataaatgtaattctgtctattagtgagctttttagaattgaaaatggaatcaaaaacaagacaaattttaaacagttcaatgtatccagatgaggaaaataatgcatcaagaaagcccataagctgtggtgtagttctaaatttaaattataattacttgagaagatttcaagaggaactgttcaatttcaggcatccgaaactgagtcccccatttggaagttggaactgctcacttaactatcagaacaagcactttaagagtaccaggactcaaacagttttcaaggcagaacaaacagatcagacaattgaatgcatcacatgaacacgaatgtaaaacctcaagaccttagctccatggttaaagagggaattaaactatgggccgatgacactcccacaaataaaggttcaaaaattttgggagaaggcaacatacttaaaagttcataaactatcatagtgcaacttaccagtggatttctac

SEQ ID NO: 26909 - DNA, 2288 bp, Cannabis sativa
  modified_base (84)..(85): a, c, t, g, unknown or other
acgaacggtcttgagttgaaacaggtcgtaagtaaatatttttttacctttattataaaaataaatgatatttttaaaaattannaaaatatttttaaaaagtattttttttttatttaagtccctaaaataggtagactctagacgcaaatctaattcactcatacttaggcccaacctgaataataatacaatataactatgaatatgataactaactttttttttgcttaacttaatatataaaaatagaaaataaaaactaaaaaggatgacttgttaacaattaatttcctctgaatatgggtttggtaattggtatgaggtttaaataaatcaagtgaataattaataaatatctactttaattaataactagggtaacgtataattgaaacatctcatcaaggctctactctccaaagctaagttatataacttacaagcaatgagtcaatatctccatctattaatatatttctattatccatacttaatttaataataataaaaaatatacataggataataataaggttatacttttcacccataattttatttttatttacattcatttatttattcatatttttattttattagtggttactttatatccttgataaaagagtatttccaaaatccaatagtattctccatatatttctattatttttattgttgttgtttcgaccatctctttattatagttaatatttaattattcaaataattttttataatttaaaattttcaaatataaattaattttagattttaaatcactttttttgtttgtattttacgaaatttcgcatagagactcttatagcaactaacgaagtaacctaaatcgtaactaaaatccttatagcaatccacatagaaaccaccgaagtaactcaaatcataaatttaaaaaaaaaaagttaaaaaatagtatatagggtaaagtagaacattacaatatctttaatgaaatggtgaaaagggatcgctaccccagagtgaattatgggaatcgagatgatagcgacattagttttgatgatctcgaggttagtaaaaggaagacatatatggtagctgcctggccattggttttgtacaaccggtttgaattatatttagtttctaaaaagaaactagatctgtcagccttacccttaattcaagatccacacagaaaaagggtcattgaggggtgtgtcctcatcagagaccccaacctcctctttatcactcgcttcttcttctcagcgagtgggaaagtcgaagtgttgttcaactccctaaccatgcgcgctatttcatccaaggatgtatgcggtactgctgtctctagagccgcgtcttctgacagtgacgtgggtataaagttgtcactcctttagggctcatttgcaaaagctccccttcaaatttgaatatctgacattctgagagatcgctcatctaaaaaataaaagatcttttcagcgtattgtgcatgtaatttagaaaagagaggagtgtcctcacatgtgtatgtatttataattttaaacaaaaagtattcttataaaatcatgagatcttcatatagatcttcatatagtttttcatgttctaagtggaaacttatatgcatgtgcaaatatttaaagtgttctaaccaaaaacatgtgattattcaaagttcatgcgaagatgatgcaagtatttaagaaacaggtaaaaaaaattttccaaagaaagtacctttttcgatcttttttgcctggaattctattacccaaaaactatcctatcatttttatatattttttaccctaaaaatgcagaaagtatgtgattatttagaaaaatacaaatgataatagccgagaggagtaaaaagaaccaaccttgaatccaaatgcagtcgatcttggaagatttttcgaataaaacacctcaagcccatgagctcgtgtgtttggaatatggaaagtcaatctgcgacttgacaggtcgcacacgtttatgcaattaatcaataatggacaaaattgttcttacatttattctttaaacgtttgtattaattaaattatgtaattaatgtaataaacggtcatgtctgaacaactatgtaagatcaaatgacacttgctttctatataaataagtgatccaaattaaatgaactaagctgaaactatttgcaaaagtggaataagcagatttagttttgattgaaccactatacatccttgtcttatttacagtttactaccttcgttttgtctatttcacaggcccag

SEQ ID NO: 26910 - DNA, 3929 bp, Cannabis sativa
ttttgttcgagttttctataaaatattcggcttcagtattggtaatattctgcgataaacaagatatacaatcaccgaacaaaaggagccatttctgttgcgatacactctataaatgttcttaatctcaatactttaatctgcttggtataggaaattattatttatattaaatttattcacatccaaaatttactaagcataaactgtttagaccacaagattaaatggaagaaagatcctaaaacacacttgaaaggtgtgttaaaaggaattaaaaaaaggcttgccacacacgataaaacggggcaagtctaatcgagagaactcagtgaggtttagttgtaaggggcaagtctccattaagtataggatcttagatccatttttagtaaactctgtcttggcaattcaaatcaatatacaatagccattaaattaaaggttgttttctcttatatggattaagctcaaaaccaaactgatttttgttgcccaaccacgtaactcactatgttcatatatacttgttcattgcattattacttaatatgtttcactgttctttgtttatatttgtttcttgttcgaaagtttgtgatccacaagttaaaaacgatattaatgcaagatttacccctttcgtcattctgccaaaattaatatatgtcagtcttattttttttctcatgtttcgtagtctaaaaatatacatgatagttatgaggctcctctgcttgtgctacttgacttccctagctaatttacaatcagggaattgtaaggttgaatggtgccaaagttcatgccatgcaatcatttaaggaaaaaataataaaagaaaaatatttattaatcaagcattaatgagatttttgtataaacataaatacacacaagggagcagggacacgtgggggcacatgccattgttggaccaccttcgacttggtttacttttcaatgacacatcattttccttttaacttttttttatcagaatttcattctgtcgttcttctaagtataccctgctagtaactttacaatgacaagttagagactttaattttttcgttttttgtaaaatctattccttacactatacaattttatttttaattacaatagaatttgtaattaaaaataaaaaattataattaattataattactattctttttttaaaaaaatttagtaattactatttttatatatattgttcgtgattaaaagtattaatcacaaaattacaatttagtgtaattaaatttggttttaatcagaatgcttgttatgatttaaattaaattagtcatatgtttaaataatatgttttagtcataaataatttttggagaattatcccatatactattttttttttaaaaaaaatttacggtttggatttctaaagtgattgccatgcgctaattgcaataagtgtttttatacgattttttgttgcaatttaagttggagcgctagtaacaataggaatttctatgtagaattctgtaaaaatataaaaaaaaaactgtttaaagtgtaaaaataaaaaaatctcataatttttttttgattaaaaattacatttaattacaacaaaatttatattgtagctagatttttttttttttttggtaatcatgcgaagataaatgttatgaagcgcttgtggtgggctccatagacatataataaagagagaaatataggcaccaacgagagagaagtttgtatgcaaattatatatatgcattgacgagaacaattgataactgtgacagttaatgtcaattgtgtaggtctaacattgaagctgcaactacatgaaaattgacaatacatgcataggatacataggaagagcctcatgccgttagggaattagctatagtcatcatcagaccataaatcatcataatcttttcatttcaacttgtacagctaccaaaaagaaaagcttaaggacagctcatcatgctcttatatgttatgttccggctggtgatagttgttgttgtccttttggttactattttacaacaaaatgtggcccaattctttacacttcttcactagtggagatagaatttgattgagatatgctaaaaagtactcctaatgtccgaaaaagaatttgttgtacccaaattagcatgctattcttattttactaataattttagtacatattatttatacttatttaacatataataaattccttaacatactttaaactaaattaatacatgtaaaatatgtataaatgatatattctgacatgattagtggggacataaaaagtcacaccaatttaaggacaccagattttttttagtggtgtctagcatgctcttacgtattaatattgttattgatcaactaggtactgaatctcatataatttaatataataatttttaaggagtatagctatccaattgtaaaacaacaaatttagaagttattaaacagtactagtgtccaatagtaatatttgttgagttttcattttcatacataccaatataacatttttttttttttctttttgttctttttccgtattttaaatagaaaaccttgactactacgtacatcagttgtttccatgataatactactgtaaccttaaatctaaggaatgatgagtatgtaatgacaatatatatatcttactattataaaagtgagggaattgtgtgacattaccataccacttttgcccctcacattaatttataattacattagtgtgatattaccataccatttttacccttcacaaaaatttataatcacattaatattaataaagtgtaaagtataaaataatgtaaaatatagacaaatctatatccttacatgattgtatatttcttttgaagtgggtttttgtcttttgcccctcacattaatttataattacattagtgtgatattaccatactatttttacctctcacaaaaatttataattattaatattaataaagtgtaaagtataaaataatataaaatatagtcaaatctcatattcttacatgattgtatatttcttttgaagtgggtttttgtctattctacaaactgcaacatgttaaaataataggtgcatattcaatttgtacactaaaacttagagttaaaattataaatcatttagatcaaatacataaacatttttttttttttgataaacctgatgctttcattacacaacgaagaagaacaaagtcaacaggtataactggaaggcaaacaaccattccagacgcactcgctaagaagcctgagaccaattttagcatgatcatgagctaacacattatgactcctatgaacatgcttaactacgagtccagggctttgagttagcaaggctttggtacaattaattacatcacttaaaatagaattattacaaaaactattattaattttgtccactactactttacaatccgaaagaaggatagaaactgacagcttagtagcttgtaaccattgaaccgcagtcaaaatggctttagcctcagcaacatccagaggtagtactccttgcaatgggagcataaaccctgctttaatgatcccacactcatccgtgacaattgaagctaaactagtcttttgggaagccacatcgatagctgcatcagtgttgacctgccaggttcctataaccgggataggaattggatcttgaccctctgaagttacagtctcctacttgaaattctggacacgagctaactgaaattcatccaaaaaattacaagcagattgaaaaatatcttgaggccaaggccttttgtaacgccctaaaattaggcacgctacccaatatgattaagaaaccctaatcccctaaacggaattggttttaaaataagcgcggaaattaaactttaaacgaa

SEQ ID NO: 26911 - DNA, 1430 bp, Cannabis sativa
tatggtggaacatatagaacattaaataaataaaaattaattaatgtttttaaacaaattattattatttaaaaatttatattatctattaaaatttaaactaattttttatttaattattaaaataaaaagttgatcattataaaactaaattatattaaattatacttttttaattatttattattctcaattgtttatgataataaaattataccaacataaaattatattaacaaattatttcttaaaaatttaaataaaaattttattcatttaattacaatttatatttaaattaggaaaataaataaattcctcttatttaactttataattttaaatatttaagctatttagtaatttaattataaaattaaaaattactaaacttaatttctaaaattatataaatataaattaataattttttaaaacatattattacaatttaaaattttatattatttattaaaatacaaactaattttttaataattcctaaacttaaaaacttatctttataaaaaaaattatgttagattaaacttttttaatattttcattgttctcacttttttatgatattaaatcaaacccaaaataaaaacattaataaaaacataaaaaaatagatacacatttattaaatcaaataaaaataaaaataatagaaaaaaatacacattaataaaacacatacatttcacaaaagaaattttgtgtccaccttcttgaagctgctaaagatctttttattgaatttgaaaaaataaccaaaaaaaaaaaatacttttaattgtagaaataaatttaaaaaataaaaaaaaaacatataacaaaatatatataaataaactgtataaaatatatttatttagaatataaatacacataaataaaaaatatatatatatatattttatatatacatttcaattatctatatatataatgcataaaaaatatattacacttccaaaatatatatacaaatataatatgtatatatacacagaacagagcatctcatcaaccaaaaaaaatccaaaaattaagaacccaaaccagaagaaatgttaaaaactatggagattggatatgacttacagtgagttgtttgggatttcgggaccgtttattttgaaattttacacgaaattagtcctcctccacctcttgccggtgctaggttcgaaaataaagaaaatacaaaaatatcaattgaagcaacaaagagaaaaacgaaaacccatttcaaaaacacatcaatcttaaacaaaaatcacaaaaatcaaataaaacaagaagaagaatgggcggaccccgccgctaataccgcagcgctaataatatttgaactgaatgggcaggatcacgcccatttattagcggcggaccccaccgctaatactattagcggcaggcaa

SEQ ID NO: 26912 - DNA, 1118 bp, Cannabis sativa
cctttgttgataggcaataaattgattgtgaaactaacaattatgtacttgagtctaaaggtaaataagaatattagattttttagaagactattcgtaattatcatgatttccagaattttgaatagttgacaaagaatttttcgtgagaaagtaaaaaaaaaaataatgcttaaacaaccatgaaacaccagatctgccgaaaaaaatatctccttacacacttcgacgttcagcgaccagcgaccatcagtggctccatcggcttgacagaaggagaaacaatggagggatgcaacaggaagaagtaaaaaaaaaaaattaataaatgactattttaaattaaaataaaagaatacaactctcaactctttttttttctcaaaaaccatatctaaaaggttagagtttcatatgaaaagaaatagagaatcaaaatgaataaattaaaattaaatcctaaagtcttataaaaacctagatctaaaagcattttcctctagttatcttgttttatcaccgctatcattgtcgttttgtcctcgacaacaatagcgaagtctgaacaaagaagatcaacgtcgttgaaggagacaaaacgaacgtcaaaggaactcagatcctgccgtttgtgggtgcctatatcctgaaacttcttaaaggagttgctgggcggttctagatgacgaagatgcaggagacggtgatgggtttgattatgacagggtgttgttttgaaacaataggaaagtttgagatctaaggttgttgctggttacggataagctctcgttgttattttttggattggttcatactcattgttctcagtttttgttgcttgctatatatctccccatctttatcttgtatatgcacttcaaacctcaatcggatgaattttatgggttcataaaatagtttcgcaattagttcactcctttcgcattcaattgcaggaatagaagtgaaaagtaataatataatcgcattttactataattttttgagaaattagttagaataaattttgtgagtatttataaggtgaaattaatgagatataattaatggttttctaatcaggaatattatgttaaataatagaatattctgtt

SEQ ID NO: 26913 - DNA, 3244 bp, Cannabis sativa
attttttgttctcatttccaaatgttctcatttccaaaaacaatttaaaaacaaaaaactttaaaaacaaaaaacagaaaacaataccaaacatgctctttgtttttcctatatttttcttacttttctttttcgttcctcgtcaaaatccaactttcaaacatagggttagggttaaagtaacttaaagatggtgataacttgttatcctttgagcttaattgattatggaaaaggaaaaaaagtagttgagagattcatgcatgcactttacctcccaactttttcctttttactttcttttttctcttttcaaaatggggacactttagtttagacaaacacaagaaagaaattgttttggtaagttgagattcgatggacctaccatgcactaatcaccggctcacattgaagaaaaagggtcttcattcacaatgtgaaagtgaaataaaatccaaatatttatcactacacacactaaacacgcccatctctctttacttgcatgtgaaacttttgcaattttaagaactattccaagttgcacttgtacatatattcacccccttatcactatcacctcagccactcactactattaactcccgaacttattaaaaattctcccgaactattaatgtaacgactgtccttgtactaatcatgctcactaaactttcatccacatcatactttcgttaataaaattggacgaaagtcgttgaatccaaagatctcattagttcgaaggaaatttacaaaagaagggcaaagatgtaaaataaaaaaaaaaacccttttgttttttgcttattcataatggtagtagtattcatatttgaccaagaaaatttcactagcaaaagtcacatttatatcaaatctaagccaaacttccattaaatgaaatcaaatcattaccactcagtgagaaaaacaattaaatcttgaccaaaataacttgacccctaataagcacacttaagttcatctaagagtcaaaccaataagaattaagaaaagtttttaagagttaggaaatgaaagcactaatagaataagtggagtagttggacccaaagaaaaaaaagctaagctacatttccgagtcccaaattcacatggtgaaatataacaacaatctatacaaacagacaagatcaaatctgtgttggggtttttcctaaatatattttaattattcaaaatgaaagatgttgcagacaatgcaaatcacagatagattctcacttgtgaaaaagctgtataaatatatatatatatatataatcattattgaaatggaataaaataaaaaaatatgaaatatgtattagttgtagttggctgatgagcaagatagacttacattttacaaggatatggaccactcatcatcaccggtagtagagaccattgcaaaacctgtcaactttcatgtaatagaaaatttagaccaattgtgctttctttctaaacccccaaagtattaaaactaaggggataaaaatgtgggttttctagcaatgaggaaaaagatctagtaaagaaatgtacaatttcataaccaaaacttgcaatgcagaaacaagattaagcggtaaactttccattcctctttagtatttcctgtaagaagtcagacacccaaaaagaaaaaatgtcacttttagcaaactgtgtggtgtaataatggaaacttgctagttttctgttttcgattcaagtgtaactgtaccaatttggtttctgtaattgttcgacgatgcctttctttcttctgacgttggcactctccacaccagcttgaacaagcgtccttttgatatttcttcagctctctgtagcccgaactgtaaaaaaaataaaaatagaagatatatgatttgtaaaacttagtaagacatttaaaatacataaaaactgactttgcattggagtagtatttcctttcatttcaaagtgtaatagtcattccaccaaaatggtggaaaagtattctaatattttaaaatgcaaccaaacaaagaaatagaagaaaaattgattaatttccattttattgcctccaaccaaacacaaccttagttttactcacagcctagaacatggttactttctgtgaaatttggttatttcattgtaaaatttcttttcacaaagctttattatgcagtggataatttttcttgtgtcacttccattccatgcatctatttcatccacatttaatattatttctatcctagtaaatcatttcaagaacctttcagtatcttaaataaaatctaaacagtagggaaaatgtcagaattcacttctcagaatatctagataacaaggtttaagtaaggttgttggatgttggggattcctgaatgatctgatattataggttcttccagatatcaagtgagtttcgtaagaataatttcattatgtaaattatgcaataactacatctcattcctaaagatgccagatatggaaattatgacaatactaatgagaggctatccacattttagatatcctgaaaagtctattaaatggaaattatgataatatttacgagagcctatccacattttatatatcctgaaaactctattctccagtcagtcaccccaagcagtaaacattttacactgatagtcagagcatggataaccgagtaacttgtacggccagcttcttattaacatagatgaagtgtaaaatgaagccttagaaggtaagagatcataactaatatcttatatgttttggggataggattgttgaagagatgtcctagtggttcatgaaacaatgccatatttcatgaagcaatatggtgattcatgaatatggtggttcatgaaacattgccatattccatgaagcaatatggtgattcatgaataggatcacgaaataatgtgattgttcatgaatatatgtcaaaacatctataaatacttaaaaaaattatcgatttcatatcttgttttggtggtttaatgttttttctagatattagccacatgtttttgtatctcgagggtaatttgtgagctttgagaagtgagggaaaataaaaccttaaaggtaagtgtcaatacacgcctcaaacccaaattctttgtcttcattctttcttgtctcctactccacatacttttcttacaatcttttaggttttatttcaccatattcataggaaagatgacttcatttctaaaaaattgatcacttcaat

SEQ ID NO: 26914 - DNA, 3234 bp, Cannabis sativa
actctgaagttggatatgagtaaggtatacaatcgtattgaatggtgcttcttggaagttgttcttcttaaccttggattttctctggattgggttcatttgaatttgaatacacaatcatcaatggggtaagagaaatgagtcctattattccgactagagggattaaacaaagagattcactgtcgccttacttgttcattttttatgcggaaggtttgttaggtattctttgtaagtatgaagcaaggggtggattcatagctataaaatcaataatggatctccaagagtgtcttacatgctctttgcggatgatagttacctatattgcaagacaattgttgaagaggctagaaaaattcagctactctttttcaagtttgagtgtgctccgagccaaaatgttaattttgcaaaattctcaattttttctagctccaataccgatgaggggattcaaaactacatttgtcaaatgcttaatatgaggcctacagatgagaaagctttttacttggaacttcttagtacaatgggaaaaaacaagtcagctttgtggggttaccttaaggatcaggtgtggaaaagacttcaaggatgggaaggaaaaattattttgagagtcgacaaagaaatactcaataaatcagtcgaccactcattaccaagctattccatgagagtgtttcttcttcctttggaaatctctcgcgatattgaaaaaatgatgactagtttttggtggtaatcttctagtagttcgagtaaaggaattcactggatgtcatgggatatattaagtcggcacaaagataatagaggaatgggtttttgaaacctcaaagattttagtctaacttttttgggtaaacaaggatggaggcttttgactcatagccactcttagtagattgtgtcttccaagccaggtactatccaaataaatctttcctaaatgctaaccttggtagtaatcatagctttgtttggtagagtatatgagagtctcaacaacttgtgaaatctgggatttaatggtgtatgggggatggaagttctatttaaccaaatagtactcgtcgtccttatgtattatcagatcaccgtagtttaattaatgctagagtaagtaatttactgagaatggatggaaagggattagatgtgaaagttattgaagatctatttgaagagagagataagaagctgattgtcagtgtcccacttcatgtgactcaaacccgtgaccatttaacttggaccaaagaagcttcgagtatttatacaatcaaaagtctctataatctcctccagcagcttcatggtcatctggttgattcagaagcctcagcgttttggaaaaatctttggagattaagagttcctccaaaactttaaaacttgctttagcatgctactatgggctctcttccaacaatgaattaacttcgtacaaaaacatgaagaggtagcttctctatgttctctttgcaatgtggaagatgtgtctaccattcatcgtctagttacttgtataaaagtgcaattggctttcaatagagttggaattggcaccttggtttcactaggtacgaacttctacgaacggtgtatggactcttaagaatgtggataatgagttgaattatttaattgctactatttgttgggctatttgggggacaaaatgatctagtttagaatagatagagttttatggctgagaatgttattacatatgctagagattatcttgatcaatggagaaatactcaaaactctaataaagagtcgtcttggtctagcttacaggcaggggacaatgctgagcaatgaactttaccacatgctaatagcatcaaggtcaatgtagatgtaatgatatttgaagtgggtcgaagctatgggattggaatattagctcaggattatataggtcttctcattgagggatgtaccttgttgagtccttggaagttaaggaagtcgtgagttggatcaagaaaaaaagatggacaaacatgtatgtggagacatattgtcttaaggttgtacacactttacggagtcccattattatgatttctttatttggttgtgttattcaagatcatacatctttactttaagatttgagaaatgtttcagttttttcataaagcgatcaactaatagggtgacttatagttacgctagatcttttattttataccttagtcgttgtttcaatttagagtctgttccaactaattttttacctagtttgataacagagtttaattattaataaagatgatttttttatttaaaaaagaaaaagataaatacgtgaaaaatacataaagttttttttttttttttgcttagaaaaatatccaataaagatctaaatagtgtcaactttgattatatatttatatattatatttttttactgtaattatactccaatacataatagtattttaaaataaaaattagtataaaaagtaaaatattattgtgattattaataaaaatatttaagaaataattagtaaaatcttgtaattaaaaaatttgtattaaaacctatcattattaatcttatgttaaatttaatacacaatttttttttttgaaatgataatacacaacaattctttttttttttttttgaacagaataattcaaaatacctaataccaactattattttttctggcgttatttagttcataaaaatataatgtgtagagatagaggacatggtcatccgagttggagaaacacatccatttggataaaccatgtggagccacttatgtgatacattatttggaaatggaattattcaatgaaatccattaattaatgtggttaagtcgcgccattcactatcaacgctcgctaggagttgtagttttcaatcatcactaaaaaaaaagggcccttaaattgcatgatggccataactatttcccacaagaagcctattaacctttaagagcatcttcatcctaaaaatttgttgagttgtttggcaaaataaatggacccatatggatccccatttaattttgtagccgaagaaaacataatttgtgaatttgctattgggcactactagtgcttagcatcttctagacatgtgactttgcgattgactagcggtactctttaaacattattaaattaaattatatgagatccgatacttagtttaatcaataacaatattgacacgtagga

SEQ ID NO: 26915 - DNA, 2216 bp, Cannabis sativa
gtgtatatatttgtaactttctatgttattaacaagttcatgttatcaaatggaatttagactataatacttcattattattatttataattttgttattttgagtatatcgtaccggaagaaatatcttaattcttattctaacgtgtaacatgaacgcatttcttctgattggggaaccaattccaaagaagaacaatatgtaagtaaaattgcatttttcataaaaattcaagttataaaagtctttgcaataacaccgaatataaaaaagaacttatatggaaaaattacataagaaacaataggaagaaacatattactaaattgagttcttaatcttcatcacaaaagtaaataattaaaaaaagatattacagggacttgcaaaaacaacctatctcgctgattccatctgttccagaagaagatggaggtgttgtttccccttgtgtgtcagtcttctttttatgaaataaaatggtgtttgtgaatcggtttaaagccttattgatttgtactttgaaatcagccacttcgtatactactttgtaagacgcaacaactctttcatcttcgtgattgagataccattgtttgcctttgaaaggaggcaaggatctcccgagtggatcatcatcttttgccttcacttctttgcttttgataatttcttgtgttggttgaacattcacttccgaatctgtttcaacaaatataattgaagccaacacatacataaatagaaaatatatttttaaatattgaatgaccttatttgcattgtaatacagtaatatatcatcatcaataaaaagttactaattcatcatcttcatatcttttagtttcgttgcacggaaaggagaagatgggtcctcaatggaggttggacaatatgcattccaaacactaaatactacaatagaatctgatgtcgaccttttgtgacgtcccatattcttcattacttcatttaacattggatctcttaaaataactatggtaaacaatattgtttttttatgtttacagtaacattgaagatatatatataggaataaaattggtaatatgagagttttattaattgatttaaaaaaatattataactatatttgtgtaccttcccaatatattgtttagcaagtagtgtattaataatacacattttattctcttgtatataatattttatttagcatcaatttcgacgatatgctaatataatatacatttatttttttaagtttccaactccccataactaattgccttcccaagataatatttaaactctttcaaataaaaaaaataatattttaactacataaatatttgtctatctaccatctcattatagtttttaataatatttttaatttacagtacacatttatttaggagaaaattttaattagcaccaattttcgggattttgtaatatataatgtatattttttcattatttatcttcccaatatagtcattttaataattttaggggaattacgtaccccgtatactattttttttttttcaaatttttaatttgggtttgtttaaagtggtttctgcagtggtttttatgtgcgttgctatacgatttttggttgtgatttaggctgctccccgagttgcaatagggcttattcacaattacactttttaaaatttccactcctaatattgataatgaaaataagtcttcgtattcccaatattaaattaaaaatattaaacatcttaaaaatttatttaaaattgagaactatcctttcaactattgtggattgtgaatagatgcgaacacacattctacttcattagattgataaagaaataaaaatcatttcacatcttcatgttcattatgaaatttaaaaaatacatatcaagatgacaccaactattgtgttttgtgaatagatccaaacacacattctacttcattagaatgataaagaaataaaaatgattccacatcttcatgttcattatgaaatttaaaaaatacctatgaagataacaccaataataaaaggaacaaacacattaaaacatcatcacatattctttcctgaaaacattatccatttgcttttgttctgttttgaggagcttcttctcattgtccttcagcttcttctcattctctttaatcttactatcattctcatcgacccttttttccaactctttgatcttatttccaa

SEQ ID NO: 26916 - DNA, 2362 bp, Cannabis sativa
acaaaatcgtctccctactattacattatatatttgataagttttctttaattcaatatttagaaaatttgaattatcataacatcaataaaagaatgcaaaaactaactttttgttttttcatttttgtcttcttctgctttttctttttatttgtattttcttttctttaattaatatttttttttatttttttttaaataaatcttttgttgtaatactaatttattgctgaatagtgaattttgtagtagtgttactttattttttattattgctgagttatgtttttggcactctattttcataattctcacttcttcttcttctcttatgagttctttgtagagtttcttatttgctttttctctcttgctgttgggtatcaaagactttgattggaacctattttcttcttttctcttgatgttgggtgcccaagcctttattggaagattagcttggagagacttaagagaatcctcgagttccttgattttctactggtcagcttgatgctactttcttgcttcctcttttgggcgagagacctcagcttcaaaatcgctccacttcttcgccacgacatccctatgttccctaactttacgaagcttagtctcgagcattttaacctgctaagacgaccggtgatgtgcggcatggacgagaaaccaagcatgcgaggaaagggaaaactaaagttagtaaagagggaaaaatacggaagagtaggaacgagaaggttagaaaattgacctgatgcagtttctcataacttcttttggctaggtcctcagtactacgtggaatagtgagatcccagtcgctggatccaagtgtcaagaggttgcaccaactattggtggtatgttgcgagctcaaatatgacccttcagtcccaacctcaaggagtagaggataggaaggctcgaggagaatcacgtccagacgagaaccagagaacttcacttggagcatcgacccagtaggttattccttgacattccctgcagtagagacctcaatccctgcagcagagacctcattccttgcatcaagagacttagcatccttgggacgtagtaagctggctcaaggattttttttcttattggccttggtcttagttcttttgggttctttgatggaattcgaggcctcatcagcttgggctaccctcttcttggatctcttgtcggcttggggaggacttttgaacatattctccaagtctacgtccatatctgcgaggcaagaagaattcattaacacttagctaaaatgaataagaatgtggaagaactcccacttaggagggttaccatattctttagtggatggcgatgaaggattataaaattcactaaactccctagatcttgtgatcttaaatatgtcataagagtttagtgggtctaagtcctagcttgaatctatgagccctgctctatccaacatggttccatactgttttgcaatcccatagaatgagctatgacagctaatttgaacgtgaaactgtgggtaccaactatcaaacctatggggaatgcgatctatgagaagaaggttccaaatgaaaaaattataccgactatctcgaaaagagactaatgtattacgtttggcccttagcattgtgggtgaccagccacattaatcacctcgggatcttccatctacccgaggagggactctctcgagatagtatgcacgagccacaaagtcatcactttcctcttcctctgggacggggaccttttgccatgaggtatacttgggtattttataatcaaaagtatattcgtcagaggcaaggaggccaacattcttcaggttctgctcgtttagcaagaaatctaaagctcgcaacccaaaaggcaggctcagcaaggtcttgtgatgctcagctatctctggggtagggattggtcttcgaggaactgttgcaaaaagataaaagtttagtaagaaactttgaaaactacaagttaatataattgatttcacgaggaaagaaacttatgtatgattcgaaaggcagtagcgtttattagagataaacatgtcgtcgagaataagtcttctttaaaatctatcttgttgggcagtctaactatgagcttgcggtcgctagtataagccctatgataatagaagcctctcgcaatgttctttctcgtgggaacgactttgacagagtaaaagcaggcaatctttagaggattagggcactcccagcctaaaatgtggtatagaaccttaaggcccgcgcggatccagtatgagatggggttcagctggaatggaacaaccccgaggtagttgcagtattcctcgaaggtaacattggggtcct

SEQ ID NO: 26917 - DNA, 7240 bp, Cannabis sativa
tcatatatgaataagaaattttccgatatttaatataacttattcaagaataatattaataacttaacactcatacatatatcaaatgttcaactctttatttaaataatcaaaaatgtctttataggctttttagggtataaaccctaacaatcacaactaactaaagataactctatctatgttgacttttattctaactattgtgtgataaaggatctggctacaggaaggaactatctcgggtaatgcttaggaatggcccatatcagctaaaactttctaagtcatgttccaaccacatctcaaatcaatctcagtgtttttaagcttgtttgaattccaagaagagtctaacctcactatctagttataagagtcaatcaaatgagcatgttactgcttagtctttgttcattcagtcagttagtaatagtagtcccactctttggcatatgaggcttggtcatccaagcttaagtgtgatgaaaatatgttaattgatgagaaagtttgtttcaaagttcaaccacaattttgtggtgcttgccatattggaaaatccaaacataaacactatcactcatcaacaaaaacagtcaacaaacctttagaaatcatccactcagatgtttggggtccctcacaattattatcaaaagatggatatagatactatgtccattttgttgatgagttcagtgttttcacatgaatttatcttttaaaaatcaactctaatgttaaagaaacctttattaattttcaaaaatttgctgaaagaaaacttgatcataaaatcaaaactcttcactccaattagggtcgtgagtatagaagcttagtgccattttaaaattctttgcgaattcactttcgtcatccttgtccacatacacatccacaaaacacaaaatctaaaagaaaacatgtcacattgtaaaaatgggcctcacattattactacaagcctgtataccacttcattattggtgggaagcctttagcacttaagcctttctaataaaccatctctccaacactatctcataaatctcccatagaagtcttatttaaagttaaacccaaacttagcttcattgttgtaggatcttttgaagtaaaattttttaaattattttttttaatttggtttgttgtttaaaagtgatttttagattatcatttttcattttttttaacgtgatatatctttagaaacatggtattttgagtttttttttctttttctaattagctattgattaactaatatttaatatggttaaaaatatatagaaaaaaaaaaaaagagaaaaatgtggtatttgagttgagtttttttattattattaattattagattaattaatatttaatgtgatttttttttttaaaagctctattattattattgaatagaatccataacaataacagagtggattggagatggtatttcctccaaccaagaacaattattatccaatcgaagagaaaatctagctaaaccgtgagccgctttattggcatcacgctttacatgaaaaactagaactctaggaaaagaggacaataaaagagatatgtcagcaataagatcatagaaattagaaacataacccctctgaagatgtttattaagagcatttgcaacaatgagggaatcggtttcaatataatcgatctgcatcccaagttgatgtgcccattgcagactatggagaagagcagtagcctccatctcacggacagaataacagccaaacaagggtttgactaaggcacctacaacatcgccaaaatagtcacgcacaacagcctcaataccaatgaccgaaccttcatcattaaacgcagcatcaacattaagtttatatgctccagctggaggcagcacccatacaccagtagaaacaccagaagcttgaggatgactactccgagtggttgaaccagatgcattatcactattattgcagctagaaaccatggaaacctgctttgcattggccaataaaaattgctggacatacatatcagcaaaagagcagattaccccaactggtttgggcttagagccatgaatttccttattgcgttctgtccaaatgcaccacatgaggcaaagaattttagccaaaacatcattctgttgcactggagcaatggaggagaagatctcaaagccattcattctagagatcaaaggagtcgggctaaaaacatgggcacgggaccacacttgctgtgctctggtgcagaaaaaaagggcatgaccagaagattcacgcgggcaatgacaaagggagcaagaggccacagtagagattttacgatgcataagattgacctgtgtaggaagagcatcattaataacccgccaggcgaacattttgactttcttaggcaatttgagagcccacaaccgattccaccagccatgattaagatcagaggcagaggactcattaattttatccaattgcacagccaaatggtagcctgacttcataaagtaagaaccaaaatcagtatggtgccaaatcaaccgatcctctcttgagttaggactgatcgaaagagagttaattcggtcaatatctatttggccaaaatgttgtcccaataacagttgatcccactgccgatctggagagatttaatgtgcaactgtaaaatcgacatcaccacagaaagtataaggacggaaagaagtatttccaggcaaccaaggatctgtagcacatttgacagaatttccattccctattttccaccttaaacctttaatcaagagatcgcgaccatcacagatgctttgccaagtgagagaaggcaatgaacccttagaggcagtgagaaaattcccatttttaaaatagcgagccttcagaactctagctaaaagagagtgaggatcttccaaaattctccaagcttgcttggctaagagagcttgattaaaatggattaaagaacgaaaacccatacctccttcggctttggcttggcataataaattccattttttccagtggattttggatttattagtactagagccccaccaaaaatttgccatcatgaattccaattggcgacagaacttctttggaagactaaaacaactcatagcatacgttggaatcgattgaaccaccgctttgagtaacacctcacggccaccaatagagaaaagtttagcatgccaagagttcataagtttccatatacggtctttaatgttgctaaacagctcagatttgtctcttccccagattaaaatggcagccccagaggtatttttcatgaagatcacaaatgggcattcctagtacagtatggaatctatgcttgagtgcatcatcagtattttgagagaaagacataaccgtcttatccgtattaagcagttggcccgaagcacgatggtatacatccagcacacgactgatggcttgacaagaagattcattagcatggcagaaaagcaagctatcatcggcgaataataagtgagaaaccgagggagcaccacgagaaatagataaccccttaaaagtaccattctgctcttctaatcttaataaagctgagagaccttccgagcatatgagaaagagataaggatagaggggatccccctgcctcaaacctctttgtggagtgaccatgccttttatcgcaccattaatattaaaagagagagttgaagaagaaacacatctcataacaagctcaacccaattctcatggaaacccattttaagcataattgccttcaagaaatgccattcaactcggtcaaaggccttgctcatatctatttttaaagcagcataactttgtcttcctctctttttattctttaggcaatgaaccaactcaaaggcaaggagaacattatcagtaataagtcgtcccagtagaaaagcactctgattcagagaaatagccaccgacaaaacttttttgaagcgacccacaatggctttggaaaccagtttataaagaacagagcataagctaattggtcgataatcacgtaagtgctgaggttggtctactttcggaataagggtgatgagagcagcattaatatctttcatatctgccccttcattcaaaatcttcaaaacactagtagttaccatagggccaaccacatcccaatgttgttgaaaaaacatagcagacataccatccataccaggtgatttatcaggagccatcgatttcaaagcctcatccacatccaaactggtaaattccttaagtaaaagatcattcatatcctcagtaatagaaatattaatggcttccaagataatgttcaaggcatcactgtcaggagtattcgaagcaaacagttgtgaaaaaaagagagaagcttcatcagcaaactcttgatccgaatagagaagtcttccatcactagtacataaagatttaatcttgttattattaaatcttgcctttgctcttgaatggaaaaattttgtatttgcatcaccgctttttaaccaatccacccgagccctttgttgccaataaagttcttccttctcaagcaaatcatctaagactttctcagcttctaacatttgatcgtactgagcaggagagaaaacctgactgttctgcaaagcagcggcttttttctgtgcattgttaatatcatgtttcatctgcccaaacttgttgtggtgccatgactgaagggctgtagtacataaggaaatattctcaaggagattaggcataggctccacggacaaatcattcttccagttgttaataataatctgtctgcaatcggcatccttcagccagaactgttcaaagcggaacctgctacaattcctagcagcaacccgatctcggataggaagggagacattaaattcaatagctctatgatccgagctataataatcaagatggttgatatgattctctaggaagatgtccttccactcaccattgataaaaccacgatcgagtctctccttaaccaagaaaccattgtaatttttattggtccaagtaaatttatctcccataaaattcagtggagtcacattacagtcgtcaatagttttcctaaattcttccatcaattgttctcttcttaaaggaccaccttctttgtcatcattagataaaagttcattgaaatcacccattatcaaccaaggatccacaagagatggtggagccatagaaagcagtgaagtggaaccgaggccaacaatcatacgaaacaaaaacatcgaaatgattcattgagaaggaattaagtgatacatcaacatgatctttccataacaataataaacccccacttaaaccttgcctaggaacttccaaaccattgttaaaattaagaacattgcgaacccgattaatagaattacaagctaacttcgattccataataaagagaacatgcgggcactgatgtttaacgagcagtttaagatgtctgaatgctgaaggattgcccaatcccctcgcattccaactaatgatcttcatgtctccttgcgaggctgcttatccgcaacctccgctgaaaaaaatgaattgttttcatgagaatccgaccgggcatcagaaacttgctgatcacaaagttcatttgaattgttgtcgccagtgttgttattgcggcaacgtttcagaatacttctgtaatttccagggtctacatgtctcttgaaagtcttagttgatgaagtgtcatcaacaataatatcatcagtcataatggctttacctttatccttaaaagaagtgattgtagaatcactaaatagagaagttaatccaggaccattaacaacatcagagggaggataagtggcaaaaacattgacgtgggaggcagaattaggatgactttgggagtgattgttggtgggagtaggagtatttgcaagggatgtggggaaagctaaggataagctttggaaaaaagaaggaaatggttgagggagctcaggaatagcctcaggagtttggtgggattggttagatgtatggttgttttccgccacagtgagaggggaagggtgagggtcagtagtaatggctcgaatttggtgggtattattaggaggaatggttgctgtaatagctctccttgccacacgggtaagaaaaggataaactttagcagttgagaaatcggtgcgataacggtcataacccgaaacagggagtttgtcaccaatcattgaagggtcgtatggaagatcaggatcaataccagcatccaccaattccataaaaccagcgcacttctcaaacagatgcccaattcgaccacagtgaaaacaaaaaatagggagactttcataacgaaactcaatccaatgttcatccctaaccttaggaaggttcacaaatttgcctctcataagaggttgagagatatcaagcttcacccttatgcgaataaaagacccccaaccttcatagagagaatcctcaaaaacatcgatatattccccaatccattcacccaccttccgagccaaaattctagatttactgagaaaaggcaaacgatgaatctgcacccagaattgcacctttgacagatcttctggtacaacggattgaagttgtgtcggagagtgaatcaaaataagataattgaaatagtgccaaggttccccattgatgatcctgagtttgtctcctgcacaaccaatggttagtaaaaataaattggaatgcatttcagaaacaactaccggaaaacgacatttgttgctccaaaattcccccatcttcttagtgaaggtttttgggttgaaaactgtggattaacatctcgccacaaggaagaaacgaggctcagcaatctccccagcaagatcagcatccgagaaagagtggactgttctttccttttcagacagcaccaggcttgactccatattgtgtagaatagaatccataaaattagcaagaacagagaaagtatacaaaaaacgcaggaataaagaaaagaggttgcgttgttgttcatttatagacccattaatcagagagtggagaagagagttcgtgtaatcatggcacacgacgccgttgaagatgggctgaagaagtgaattgggaaacatggaaaactgccgaggaagacgaaggcaaacaggtaactgctacagagaaaaaactgaaccccactcgggcaaaatatatatttaatgtgattaaacaatat

SEQ ID NO: 26918 - DNA, 4052 bp, Cannabis sativa
  modified_base (2090)..(2090): a, c, t, g, unknown or other
ttagtggagaaaacgttgaatctaaacgtccattaaggtataaatatgatttctaattttagtaatgtacattgttttactttttgtttttgtaaattttttaagattataccatattattatcattatgttgttatgtatgtttatggtggctggacttttgtcaaaattagtcgtcggattgcgcttataaggtaaaaatttaaatcttaatatatagtatatgtgtatgtattttgtattttattgatatgtgtgtatatatattatgtattttatttatgaaaatattataattgtattgtatatatatgtattgtgaatgagaatgaggtaggagagatttaattattttagaaatgatatttttaaaattttattagtttgagatataattattatatatgtatgtatatataatttttttaaaaatttatatataatttactaactagtaactagtttctttttttatagctagtaagagttaaataattaaaattttaatttcattgtattttattatattctttgttgtgagctaattttaaaggtttcgaataatttggagttgatcggattttagcttgctataacaagtttatcttttcactaatattttgttatttactatttatcaatacttagtggagtttgaatatcttaaatattcatctgtactaaagtatgttttgcaatatattgtattgcggtcagatgggtggaataatatgcatgttagttgagtttgaatatcttaaatattcaaccatagtgaagtaggttctgcgaatacatgtactgcgatcagatagatggataatttttgtattgttaatgttattttgtttcttttgtattattttatttattttgtttgttattttaggcatgtttaaaatctttgggaacatccaattacagtcgttatgctgccaaaatttcaaaagaattaagataaagtttactaaaaataaataaatattaaaaaaaaaaagtgttacgcataactcaagtaattatttaattacaaggtagttgtaagaaactagttggttaattacaacttatataactagtaactatttacaattagttactaggtatcatgtcaatatttaaaataagtaatttaataacatgaactaaactaaaacatgaattagagtaatacataaatattaaataattgtgagaattctagttagttacattattaagtaataattagttactaaatattgagattttttgttaggagtttcgttatggataaatatttgatgcgtgaggagagagacccattacgatttcaagtaagatttgaagcatttatagaatttaccttaatgaattctagaaatcctgaacatattcattgtccatgtgtagattgttgtaatagatcaaaaggaaatattgcgatgattatggatcatgtacgtatttaagaggtttcaattaaagttatactacttggtattggctagctgatgatttatatccattaggaaagtggggaaagatgatattgagggtaatgcttttgatgatcatccattggacttgcttgacaaagcataagaggaatttcttaatgatccttaaaaaattcgataattttctaagtgatgcagataaatccctattcgatggttgtaaaaaactacgattacaaccaattgtaaatttttacaacatcaaagcaaaaaatagagtaagtgacaaatattttactcaactttaagctgcttttaatgatcttttttctatttgacaattactttatggaatctgcatatgaagtgaagaagactttaaattctataggattgaagtatgaaaagatccatgcatgtccgaacgattacattttatatcgtaaggaatatgcagacatggataatttcccaacttgtggtttatcctgccataaaatatataagattaaggagaataggaaacttatttcccaaaaagtgatgtggtacatgcctttgattccgcgagttaaacgattatatcgtagtgaaaaatattttgaaaatttaattttgtatgagaccaagagagtgaaagatgcaaaactnagacatcctgcagattcctaagcttggaaaaagtaaactacataaattctgaattcaaatctaaactaagacatatttgtctcgatctatctacgaatgcagtttatccacatagatttctaagtagtcctcgtagttcatggcttgtcttccttgttatgtaaaatcttcctccacgattagtgatggaaaggaaatttagtatgctttctctaatgatatgggtcaattgtgattcaggtaaagataaaacaataaaaagaaaacgtatctaattggtaacttacttgtgataatgtttgtttatgtagttactatttgttacagcttaattgattatgtttccttatgtagttgctttgttatagctatttttttattatatttgtcaataatgtagatatggtaaacttaagttcaagctcagattcaaatttggacccaacagtagagtgtcctagggggatacttaaatgaggtagaactgaggtgaacaaaattattaagttgatggaccaaggaaaaatgtttcctctccttgtcagtgataaaggacagtattatggcaaaaactacgccaagctagtttcgactttaggagttagatgccatatgacaattaggctatgaaaattggaagcaggtcaaccctaaacataaaaataaaatttggaaagatatacgggtaatcgatcatttgttagaattttgatttgtatttgattaattcagttgttaactctaatcatgtttgtttaccttaaaagtagacgggttttatagattaggataattcaaacatgattgcatggtcatggctggggagttatagaaagatttcaagaacagaatgatcaaagacatcattatacatgcattagaagaaaatgatttgcaatggttggtagacgtccctaaaaagcatcctgaaattgaaaaaaaatgactagttgaaatttgtcaaaagtcgcataactcttaaattttatgtaccaattatatttgtactaagataaacttttaaatacaggtactagtagctaaaatattttttttgtatgctatcaaattagtaaagtacaaaaggaaccatcaaagttgtcggagcagaatgctaaacgtaagaaaagatgtggtaagtaattaatatataaatttctagcaacgtgcttcaaaatttagtactactgatttatgttttgtaaaaaatgatgaaaaaggaccttgagggccatgtcccccatgccactgtttttggatcaaatctcaaaccaaaaaaacaaaacttttcactgttaagatagtaagtatatattaattattgaaaaagtaataatgagttaatatgtataaatcatatgctaattgcttgaatatgtgcactaggcttaactggaggagaaacttagtcagggacaagttcaggttcatggtcaaaatgacatttgacgcaggcgctcaggacactagagcatcctaaacgtgtcaggactgttgggcatgctagtacttaaaaaaaatattatttcattagttagacttgaaaaatattcattaactttatttattaatttataggttcctctaaactatttgcgaggaagaaaaggaaagtttctgatgttgtggctcaaaaactgagggagattcaaaaattaaaagcagaaatcaaatcctgtatatagaagaaaaatgttgccgaacaagagcaaaatgagaatgatgatgaggaagaaggatagttggcccaggagtatgtgccacaggaacatgctcaggaggatgagggtccataaaattattctcagcagtttgttccctatattagccacatgtcatgtacaatttcactaaacagtgggcagctaatataatgaccgctttagtaattggattagaaaaggcaattagcactaatttttgtcattttataattatttatgaatttatttaattgtgaac

SEQ ID NO: 26919 - DNA, 7601 bp, Cannabis sativa
  modified_base (1002)..(1005): a, c, t, g, unknown or other
  modified_base (1116)..(1118): a, c, t, g, unknown or other
acgatagaacaaatggcgatcaaattgtgtaaagtgtaaaagtttgttctttcttctttcacatccatcacttattctttttcatatacttgttatgttttctatttatatgtattgttgttctttaatttgaattgtaacgtttctttacatctttcctctattcaccttcaccttctatttgtaatttttatatatagttgccagaagtgtaaggattctcaatttcctttccactcatagaatattatacttatttattaaacgacaaaaatacgttgaaattatttttatttcagtttagcaatatatatggcaattattaaaagataatatgaatattgagaagaaaaaaaaatctacatatacttcaccatataaattgagtaataatttttgcacatactttctatactaaaataatatgtaaatgctctctcaaaaaataatatgtagatgcacatttattactctacatatttagttaatgtagctttgacaatagaaataataatgataatattatactgctaaaaaaaaggataccttgtaaactaatatatagaataaaccaataattataaattcattacagctagtagttattgcttaaactctacaacttaattcttttatttacttttataaatagagacatcaacaatttattagtaattaaaggagttaaaccaaccaataaaaaaaaaaattacataaactattatttttataaatttccctgacttcttaaactatacaatttaattcttttatttacttttataaatagaccatcaatttataagtagttaggggtgaaatagtcaattaaaaaaaagaaaaaaatacataaagggagattttatttacatcctaaaattttttaaagagtactaattttaaaaaaaaattatatatttaattatactaaatttttttcaacttttttcttttaattggtattctcaaaaatagtaactatcaaataaaaataaattatannnnaaatattatgacaaaaaaaattatataaaattttcttaaaaaaaaataaaaatatatatacatgagttagaaaaaattatgaaaacaaaattaaaataagtattgaaattnnnataaaataatgtgaggaaaaaattaaaaaaaaaatcttaagagtaatttttaaaaattatatatttaagtttacatttttttaataataggtaatatttatcattttctggagtgcaaatataactagtgttacataaattactatttttagtaaaataagatatttttttatatatatatttttacactatttataaaaacaatgataaaaccacttaaaaatataatagaaaaataacatttaaacaacataaaaaattaatacacaaataacaaaaaactaacaacaaaataataaaaatattaaaaaatattaaaaattttaaaaattttaaaaatattaaaaattccgtacaaccgtattttataaatttttttggttgttttcgtataattttaaaataatcccattaaaaaaggtaagatcatggacaagtattatttctgaataattagattaaggtttacaaattaccttcttttgttttttaaataataagagagtaagaagaaaagagtgtgaaagacagaagggattgcttgtgcacccactcatcatcctattccaaaagaatacagcagttatttgagagatgcatatcaaatgcacatataaatatatatatatatatatattatgcacatgcatgacgttattgtctttctaatatgatgaccatagcacccataaatatataaccccctaccctatactcttccttcctttacattacattaccaatattttatttatattattcctttcatttctattttttttttattattattcatataactaatatttgacattttataatttactctctcaaccgtcaatacatagagaatttctcattatatatgtattttattctcaagtatctctcaacaacagaattaattattatattagatttcaaaactacaaatgagactttttattacatatcaagttgggtgggggagaagaaaaaaaggattaattggctggatttcggaccaccttatctaccatgttaattgtataaattattactttgcgtaataataacgcttacatatcaaatcaattttttaaacaaaaaattattaatgctaactaactaagttgtagtactgcattctctcttgcaattgaacaaaattcaaattgaaatcttgtatttaaattatgacaatcaattaatcagagtagagtatgtatacatacatgtatatagttatatgtactttagaaagaaacttgatgatggaggaaagatataataccacattgattttagcacgtgcccaccaaataaggccccttgttctaatgtgatgctcatcacactaaagttttcaagatccacacattactgtgaaaggtattgggtatccactttcttatgttgttgtcacattattgtttctaagtcatcacaataaggcaaatttatatatttatatattcccctatatatatatttatgcttctattacaatattactattatccatcaacatcatcacccttgaccttctattaaataaatatatatacatatgtgtgagtgtgaatgaatcaaccatagccactgttttttactcagattccaagtggattataaccccactaccaagaagttttaacccttgatttgatgttaattagttcattaatttggtatataactatatatatatgacccaaatgataaaatggatcatgtttatgctgtattagattcatgcatgtgcatgattaattggatagagagatatattaattaatatagaaagaagattatatctatcataatatatgtatctttggttctgataaaacttttctattaaaagctgtaatggggcaataccaaagaccaatttattaatattgttgtaagattgatgtttagttggataggccaagaattggggattaattaatttggctatagtggagaaatcaataatgaagccaagcgagataagaagatgagaaagccaactaatgtgacagacagggggcatgaccctatatatttacacctatgtgtatcttatcacttgcaaaagaaaaatataaaatcatattttaattcaactcttgctctcatttttttcttttacagctccaacaacatagaattttattgaggtaagcaaataaaccaaaatcatacatttttagtaacaaagatccctgttttaaccccattaaaaggaaaaaaaaaatatttagttttttgctgacatatatatgcagaaactctaatgagagagtgggaatggtttaatcattagtaaatggaattaaaaataaagaacaaattcatgtcaactaacacattagattaatataataataattattattatcaaattatgcaactagacaaacaaaatgcatgttctgtgtcatcaaaattctaagatttatgaaataatatataattctttaagtttgtgaaattaattggatatttctcttgtgtatcattgttcaactaagagacataatttttaaaacagttgtactaagttgttattactcataaacaagcatgtgtattttgactatttgtgtttgttgaatatctgtaaaagtaaaatgttcgtaaaaaatttaaataattaaatgaaaagattataataattgatccaatctgccataaattagcctccttcctctccaatatacaagatttttaaacaagtacttttgtctaatggtacttagtatctgtcatgtttttcataagaacaaaaagaaaattatgttcatgagctaagcttgaatcatgatcactttgaagttataattttcagacttttttaatatataaagtaatgataaagaatctggtatgaaattaatttggggaagaccaacctgagaattttacaaagtattaataatttgggtcctttttcatgagaagtaaatagttgcgcctactttttctctaaacaatttgtaattttaatttgagattatcaaatcaaagtgctttctactcactcactcacataaacagattactgttctattctatgcaatgcatagtgtttttcatggcttatatgaatctgagtctgacagtgacaaatcaaaggatttacttcacagttcattttatacatctctgttttgtaaatgcatgtcgttggtcaaatatttatgtcgttttacagttatgctgtcgtttgagagtgtccccacacaccccttccgttccgttggagaaagacaaaagtcaaaagcagctgctcaactcaaggctctcttcactcttgtctctttcactatcgagctacccaactgtaaaacccttaaacccttgaagccctatctatccctctgttatagccccctttttctctctctctcctaaatacatgaaagctatttcaaggatgaagtcccttgtatctcagacgccattcccgtgttctcaactttcacagaaaacgcatttggcgttattttctcttgccactaaatccaatcagcataacccaacaacaacctttctgcaaaaatccaatcttcttcacctgaaacccatctcctgtttccccaaaacaccatgctctttggttcaaattcaaaaccgcggcctgcaaatggagcgagagtctcggacgctcaggtctggcgaagttcacgtgattgttggtcctatgttcgccggaaagaccaccacgcttcttcgtcggattcaatcagagaaaagcaacggcaggtttgacctttatctgatttttataatactgaccacaatttttcttgtaaggatttttagacttgaatattttttgagctttgtttgtctaattgcttgagaattctctttctgagcgtaagataggatttgcgctaactattgttttgggttttctgaattctgattattccaattgttgaaacgaaatgcatctagtacttgagcttatatgttaggaagaatggacctttacgtttagccaatccttaaattttctcttgcatagctttaagcggaagcggaaatatagaataatgactttttcaaaaactaatttgcattcttcctccttagtttttgtggctgcactacacaagacctaattttctttgtgtaatttgattgcataataattaccagtgagaaattcccagctttcaggtcaagcctctaacaaacaacctccaattggataaaacattaaagtgtctttgtttttcggggagcttgaaggaagctgtctctctattgtgccattcagggatacaagtgaaaacaaagacgtatgctcttctcttgcaagaatgcgtatatataaaagaatataatagtgggagaagaatccatgcacaaatgattgttttgggatttgtccctaacgaatatttaacgaccaaattggtgatattgtatgcaaagtctgggggattaagaacagcccacattttgtttgataaacttctggaaaaaaacttagtttcatggaatgcaataattgcagggtattttcaaaagggactaacagagatggggttaaatctttattacaagatgagacagagtggctttataccggatcagtatacctttgcatctgtatttagagcctttgcctctttagcagcattggaacatggcaagcaagcccatggtctcttgatcaagtgcaatagtatggacaatgttatagtcaacagtgccctcttagatatgtacgttaagggcagtagcctatctgatgcacatttggtatttgatacctctattaataagaatgtcattacatggacttctttgatatctgggtatggtctgcatggaagagttaataaggtgttggagcttttccataggatgaaggctgaaggtgtcagaccaaattatgttacttttttatcagttctttgtgcttgtagccatggaggtttgattgatgagggttgggaacacttttcttcaatgaaacattatggtattcaaccaagagaacaacactattctgctatggtcgatcttttaggccgtgctgggaggctaaaagaagcttatgagttcattctgagctcacctttcaaagagcactcagtgatatggggagctttgcttggggcttgtagagttcatggagacatgaacctgttaaagcttgcagagaagaagtactttgaattggaaccagaaaatgctggtaaatatgaagtcttggctaatgcttatgccacttttggattatgggaaaatgtggcaaaggttagggctgcaatgaaggaatcggggatgataaaagaacctgcttttagcaagattgaggttcaaagggaggtccacttctttcataagggtgacaaaactcatttacaatctgaggagatttatgagatgattgaagcaatcacttgcattttgaaggatgtagggtatattcctgagtataatgacgggtaaaataggtaatggaaaaagagctttttaaagctggggacgtattccctttgaaagtcagggtgttaagtaactaaaaagatccttgagctcatcacccctataaggaaaagttgcataattaatctatttaggtcatacagtggtcttgttatgtcacatcctataaaggttactctagtggaaacaaatgaggttgccccagtttatatttatggattatatgtgagccattgatgtaggtttctgctagttatataattcacttcatttagaggtgagaaaagtgttatttttgatagtttgcaaaagaattgcagccagtcttttgattaagtatataataatataaatggctgtttgatgaaaaacctggattctatcttttcaattatatagtagtaatagctaatggttcaattatacacatctagctgcaacatattatggctagattgttcaattatacagtagcatagctgtaacgtaggtcttgtgatgactttacatacgtataattgtgatgtggaaatggtttgaacaattatacacgtgttttggaattcatttttatctactaatttcttcttttttttatctgttttatagaagtgtagcaataataaaatcaaacaaagacacaaggtatggattggattcaattgtaacacatgatggagtgaaattgccttgttgggctctggcagatttgctatcattcaggcaaaattttggtgcagaagcatatgaagaggtagttttagtccctcgaaaactaatcagtccctaactgatgattttgcaatgttaattttgagttgttagggcatattctgattgtgaggttagatagttttccttgtctacagacttgtgatttgaagtttatgttaagtggacatgtctatggtttgggtttcgattactcatgcctagcactttactcagatttttaggagattgttgggtttgacaagaattaaaatgacataaacaagattttaaatttagcttcatgtggacgtttggtgacagctagatgtg

SEQ ID NO: 26920 - DNA, 2923 bp, Cannabis sativa
  modified_base (2329)..(2330): a, c, t, g, unknown or other
acccagactcggacctagatagggatccggatacgaaccttgactcgaacccagacctctagccagaccaggatcgaacctcaagacctagatgtggtttgagacactgacccagacccagaccttcacccgcacccaggatcctaactcagacgacaacccagacccagaccgggatccaaacttggacccagacccggaccaagactcggactaagactcagaccctgacccaaacccaaacccaaacctgaacctagatagtgaatcgaaatcaaaactgggcctaggacctaaacccaaaaattgacccagaccgagacctagatgggggacctggacctgggcctcggaacccagacctgaattagaactcgggactcagaccagaacttggatctagactcgaacccaaatcttgacccaagctgagatcgaaacccgaacctggactcggaccaagacttgaaccccaattcggtcctggactcgaactgggacctaggactcagacttggaccaggcacacaagcattagaactaagaccgagacccacgaccagacctcagacctggaccctaacctaggacccatacaaggacctgggactcaaagtggaactagacaaggacccaagaccgtgatccatactcagacccatacccggactcaaacataaactctgactcggacccagacccagacccaaacccataccctagaccccggtctgagtctgagtttgggtttgaattcaggaacttgaatctgattaggacccagatacagacccaggcccgaactaggactcagagccgaatcaaaactccgatggggactcgagagatgaacttgaacccacacacggacttagacctacaaccggaccctggacgcaaatcgagattggagactcaaacctggacccaagacccaaacttagattggggacccaaactcaaaattagaaccaaaattgggacccaggactaggactgggacccaatactcgatcccagtctcagtcctagactcggacccagacatggacatggatcaggactaggatccgaattgaaatgagaccgggacccaagattgggatccgaatcttgaccaatgaccaagggctttgacccaacctgtagtaggtgtctagatcttggaatcgtaccaagacccgatcctggaacaatttccagactaggactcaaacccagactccgactcgagaccaaaaatcgaaacaagattcagaattaggaccctagaatagagattgaacctggacccgaaacgaatctagacgtggaactgaagacggacctcgacccatactaggatcgatacctggaccagacacgaacaaaaacccagacttgcgctaggatctacgacccagaacctagaaaccaggactcgtgacccaggacctggaccagattcgagacccataccataatccggaccaagacccaaacccaaacctagacccagacccaaagtcagacctagacacggactaaaacccgaaccgaaacccagacccagacccagacctggaccaagacccaaaattgtattagacttcgaactcgaactcggtactcagacccagaccgagatcaggactaggccccagacttgaactaggaccgagaccagaaccttgactgggacaaaatttttgactgggaccaggacccgggaccaggaccgtgacccaggacccaatactcgaacttgggacctgagaactgagcggtgacccagacctaggccaggccaagaccagtaacgaacacggaccgggacctacactctgactgcgaccctaaccaaaactaggacctaggaccctgacctgaatcggggacccggacccatgactaaaaacttaagatccaaacctagacccaaacctatacttgagacccgaacaaggaccaaagaaatgagttagaacttcatcaggatctggatttggacacgggacccaggacccaagacctgaggcttggacccaatgcatagtcggtatctaaatctgggaattagactttgccccagacccagacccagaccaaaacccgaacctgtaccaaaactcaaactagactcgacatgtggttggtgtatggatttgagaccaagacttggacctgaacccaaacgtggacctagacccacatctaaacgtttaatcataccctgtgacccaaaattcgaaccggaactagaagcggacccttaaaccctaaaccctaaatcttaaaccctaaatccttaactctttacaattacccctaaaccctaagccctaaaccnnaaaccctaaatccctaaacactaaacccaaaaccctaacctagatactggcctagacccatacccataccgagatcgaaacccaggacccagacccagactcggatgcagacccaaacctcgacccagactcaggacctgaactcggacccaaactcagaccaaaacttggtctgggacctagaccttgactgggacccaaatcgagaccttgactcagaccgaacagggacctggactcagaacgggacccagaaaaagactcaaacctgaaccaatactgggacttagactcgaacccaaactcgggatccaaggccgaacctgaacttggacctagagcgagacctaggatccagacctagaagggggacctaggctccaaacccgaacctcgacccagacctggactaaggatccagacctagatcggggacatggacacgaaattaggccacagaaccgggaccgaaacccaaaactcgaccccagactcgagacacaagacccgaccatagacctgaaacccaggacctgactactgggatacaacccaaaacacggacccaaactcaaacttaggacccgacccaa

SEQ ID NO: 26921 - DNA, 4442 bp, Cannabis sativa
aaaacgcatgtcgagaaggtgctaagtaccactagtgcttaatagcaatgctcataatatagatatgagaatgactaatatggatatgtagccattccttcaatcttatattattattggtacagttacatatttgatcttatataattttaaaaaaatgttgttaaccaatcatagaatacgaaggtttatatctatagttagcttagtttccttttgcaaggtgtgaacaagaacaactattcattttctttttcttctgtcactttttgggacccccacatgtgacttaattttgtttggtttttgtcatgagtcacgataaaaaagacatgggatcatgactagtagtatgattacaggtagtgaaatttatagttagtatttaaaataatttattttcatacccaaattaattagtttgataattgcctacatgcagtatttttcaaatatatatatgatacaagcccatgcccagcaagtgtttattttactataaaaattgcacttttattttactcaaatatttatctttctcttttaaaaaggagaccaaatatttatattgaaatatggtttgatatattgaaacaaaactagtcttttctataatagctgatagctaatattagtatatgcatatttgtttatgtaataggaaagatacaacgacaatcacatgaagtataaaggtttaaaattaacttttaattttttataaataaataattgttaatacataaagtaataaaagggcaacttcttagataatgagagttgctaaaaaatgagtggactaaattaatttgcacttgcatggacatgcccctatttttcaccaaaattttatcaatatctcttttgaatatttcacatcaatcaatcaagcatttctcatttttcttatgtcatttttcttttcttttttttattactgttattagtgttatacacagcgcaacacacaactaaactccaacttcagcaattattgtacatcttttccagcttacctcaactcatttttattttaaaaaaaatagattaaaaaatgaaagacagatggtggtcaaaagactagctttcttaaaatagacaagaaaaaaaatttatatatataaaaaatatattaattaactaaaatccccccaactaattaactaaaaataaagtaaacaaacaatatacatgtgagtgtgagtaatgtagaagtgggaagagaaattgtattgatgtatggtgcactgaatggaaagtaaataattaactctttgattaattaatgttttcttttttaattaagtatcagaaaaaatagggaaattatttaatttttttaattttttttttaaatttacggtttggtttttaaagttattgactagatgtaatagggatttctataccatagaggttgcaatttatgttgcaacactagttgcagtagaagttttcatgtagaattttataaaaataataataaaaaaaaattattttgaagtataaaaatgaaaaaattctaaaaaaattttattatttgaaaatgaagagaaatggaaaaaagaaagaaaaacgtacggatatcatcgtcgctaaagggcttagaatcggctatatcatcaggaggcatagtgaagccggtgaaggaaaaagacaagcctaagctggcgctggaggctcggctgagagcggcgccgctgctgacctcatccaggtcgaacttgagctgggcgctcctagactttctgatgtgagtgttactattatttttgctatttccactcctccccggggaagctcccatcaccattctccctcggctcgattttcgtgacagagttcctccgctctccgccgccgcgtcgtttgaggacgacgtcgtcggcggtaatggcggagatttgaacgccgccgtcaccttctccaccaattgatccgactttgtcctcgccaatgatgtcatactattactgttcatttaattatattatgtaattaaaatatgtattgatcggtacctatatatatatatacaaattaaaacagattagtaaaagattaatttggctaattataaatttggtcttaaattactatgctgtcatgcattttaagagaaacagtgataatcatgtaagtgcaaaattaaaacacattgcaatcttaacattaaatataattattaattatattttcacatgatgaacgagagtgctcatatatttaaacatataagtatgcttattagttcattaatatatattttcgttaagccatttctgaaaatgacatcaatttcgatagaagacagaaaaagagagatgaaaaaaaaagggtaatgtattattttttaaggtagaactctagccatgattatcaaacctatatatgtatatttagctatatatactactgtaaatcaaatcattattattatatgtacacatacaatatatacaaaagctatatgatgttggtatctatatgttttccagtttattaagacgaggatattatatatagaagaagagagaaaggggtagtgttgacacctcaccacatcatacaacactagaaatagtttcaagaaaggcaaaaaaatgcttcaatccattgaactaatgtacataattgaaaaatgtacactacataattgaacacaccactactaaatagtacttggtcaacactacatatacatatatatatatatatatactttgatattcaaagatgataagctagcactaacataatggatgagtgaatagtgtaatagtatagtccatgatatcatgattatatggattatgatatatccatacctcaatcaagagaggaactgtattgttatgcccagactagtactatatgcagctgaaaataaagaagagaagtagctaggataagaaagaagggacatagagagggtttttttttttttttttttttggaaacggttttaaaaatttattgtactcaactttgacacctctatctatgctacatccatttcttttataaggagagcaataaagaggaggggtcagcagcactactaaattgccaaaaaaacactcatacttgctccaaatttacgtgccgtgccataataattcaaaaccccactaataatattgttctgatcgattacaacaaatatagacaactttaaattattattatattatatattgaagtgatttgtcaccccaatcaaagggatcaaagtctgacttcaattcatcctggtcgtccacgtgttaggacagtctttcggtattaaagaatttgtttaattatatagtgagtcttgatcgtgtaatactattagtactagaagctaatggacgagataataacttttaatacttaatggcgtttaacctcattagggctactcgtgccatgttttaaaatgacttatttcgatatgtgccgcctaataattatgtggaattgtccacatatgtatttatataaatatatatacatgatgatcatgatatacgaatttgaattttattttttttgtttgctatatcaaatcagggatctggccccctgtttattaatattgtatgaggtgttggtttaatcttagattacctatttcaaagggaattcgccaaaattcttggaattttgctctatatgatgaatgagcgtgtatgcatgtgtttgccttgtatttccttttcttttattttaacttatgcgccttccttgttttaatggtgtaatataattaatattcatgctatgatgtcaaagaatgaacaattctgtgaaatttatacgttatgtgatcgtcattattaatgaatatatttatgtatgaatatttataaatatatgctaataaataatcagaagaaaccaagagctatatatatatatgtgtgtgtgcaagtttaatagacccatatatatattatatacaatatatccaacgttattagagccatatgatgatgtgcgacgttacgacgaatatgtaagctatcatgattttactctcctttcgttaattaagcaagcatgcatgccctaaattacagattgattgaataactagaactcctcattgagattagatatgttgttagagaaagtatatatatggttaattcatgtttagtttcaatcgaaattaacaatttaaaagggataattcatgcatatatcaagaaacaaatttttagaatttttttttattatttttatacttcaatatatatatatatatattttattttatttttatgaaattccacacagaaattcttatagcaattactaacgagcaacttatacaacccacgtaaaaattaccagagcaacccaaaatataatattttttttttaaaaaaaatagtatataaattaatttctttttgatacattatatattatatttatagggatacgattttgtc

SEQ ID NO: 26922 - DNA, 1693 bp, Cannabis sativa
accttgtagtcaacgagctgcaagtacactctactatttacgtaattaatgagttattctattaaaagtgatcacgtagatccttattccatttatcttgacacgtgtcctccactgaaatggtagctgaattttgggtataacaattgtcccttaaaaagttctttttttttttattttatttataaaaagtgctttttaataattatagagggtatttttgtcataatctctttttgaaaaaatgcgtcctttggttttgacggttgtatggttttgagggtcattatgaaccttcttttcatcttttgcgtcacttctaaccgttagatttcccaacctttggccttcttgttactggatcttgagtataaaatggtggcttaagcatgccatattccacatatttttggtttctttggtgaatatcatcttgagattggattgtcattctttcgctaagatgtcccatctaagtttagaaacttatccctccaaattcataacaacagaatacatcaaccgcctttcttctctgtacgttttcaagaacttctaacctcaatttggattggaaacgaaggatttcaacactgaggagcttccgatcaatccaaatcgagtaaatgttgttgatcgttacgggcaatttttaaaagagatttttgagggtaagtatcatccttagtgaatggtggtttgagccggatcatgcatattattattattattatttgttgctccattgatccttcacctctgtctccacaagaatggacacaaattttgagagcgatcttacaagtcctccttaggcgggcaaggaatccaggaagaaggtagtcctggttgccgtggtttcggattctactaaagaacccaactagcccaagaaccaagcttgcacaagaagacctttgtgccaacctctctttggtattgagaaatttcccgaggttgggaatgaggtctcgactgcaggaaatgggatcctctgatgtgaagaatgaggtctatgcaggggtcgagaccttctacgtatagacggtctttctcgagctatgtgtagacggtctttctctgagatatatgtagacggtctttctggagtttatcaacacccccttgcattctttgtttaggaagatggcttaatggtttgcccctagtggtagtaaagacaagtttgtaaaccaacttgggttttctcttatcttaaatgccttgtactttttcgttcaaacttaatataattgtgtttgcttgcatttttattcacaatataagcaactatattttgatcaaatgtaaagtacttttgggtttttccattgctcgtaatcttcctgtttaagtagttagttatctaccaaacttttgattttcgagcagttgtcaaatctgccacgctatggcagttgtaatctgtcttaagcaaacttgaatatacttttaatgattttatcacttggtatatttttgattgctcgtatgaatagttaaattatctatctattttctaggctcaagtacttttatcaagaagtcttgatgtcttgtttagtactttcttagctcgcgcgaaccgtttatattcagctttatacgccaattatgagttatatctcatttataacttttaattttcctttcccgtcaaattggtttttaatcaaaaattatagttgtttga

SEQ ID NO: 26923 - DNA, 2063 bp, Cannabis sativa
cgaagcagccttgagctttcggggaagctgcgcatcaccaaaataatcttccaactgatctaaagcccatttaacccaaccgtgagtctcttgaactttattctgaaaaataaatttgttcctacgctgccaaatgagccaagacatccctattaaatgaagaagtttatccttagggaagttttcccataagaaaaacaaaaagtcaggagcatttgggattcttacaaacattttagtatcaaacccagcaattttccaaatcttttgaacactagaacaaaaccataaggcatgacaaatatcctccttttccttcttacaccaaacacaagtagtatcaaaagacatacctctcattgagagctcaactttcgtgggaatccattggttaaacacactccaaatgaaatttttcatctttgggattagtttagaactccaaatgaacttccaccaagcttttaagggagcattgtttgagctggcagcaatattagaatgagtgaatctcagcttataaccgctggctactgaataatgcccatgtttattcaagctccaagcaagccaatcggttcttgagggtatgggaattatgccaagaacccacgggatgtcatctctatgaaaatggttatgaacttcctctactttccaattaccttcttcattgatcaacttatccaaagtagtactttccgggagtaaaactttagaccgaagagagaaaggaaagccccttggaatccaagcatcttcatttatgcgaatcgaacacccatttccaacacaccaccgcgagcctttaagtaagatctctctaccccataaagcttgctgtcataaatgtaccatgaggataatataaagctttcatcactctagtcattaagcaattgggttcggtcattaacttccatccttgtttcgccaatatggcttggttgaaatcctcaagatctcgaaatcccatacctccttgctccttaagtttacacaatttcttccaatttccccaatgaagcttgtgtttgttggatgtagaaccccaccaaaaccgagcaatcattccttcaatttctttgagaatgccttttgaaattcgaaagcaactcattatgtagcaagggatcgcttgaatcaccgctttaatcaatatctccttccccgcttgagaaaaaagacccatcttccaaccttgtagtttagcttccaccttgtctttaattttagcaaagacttgctttttattcttacccacaaaagaaggcatacctaaatatttagtgtgattcttaaccaaagaaacacccaaacaggcagcaaggttctccgctaagtttgtattaatcttgcttcccacacacatttcagatttctcaaaattaatacattggccagataagagctcataccttttcaacacttctttaatcaccttgcactcatccatgttagcttcgaggaagataagactgtcgtctgcgaaaaataaatgagagagtctttgattaagatttccaaaccgtaaacctttaatttgcccagctctttccgcttcatgaatgagacaagtaagaccttcagaacatataagaaaaaggaacggagatagtggatctccttggcgtaatcccctacttggttgaaaaagaccttttgaagtaccatttaataatactgaaaaggaaaccgaacgaacacaattcataattttcattatccactccttctcatagcccaaacattccatcatagcttctaaaaagtcccattctacccgatcatacgccttagacatatccagttttaaagccatcttacttccatttccacaacgacctttcctcatgcaatgaaggctttcgaacccaataatggcgttatcttgtattattctaccaccaataaaagcactttgattttccgagatggctgaattcatacttaatttcattcggttggcgagacatttggacaccaccttataaaccacattacaaaggctaataggtcggaattccgacatctttgtaggttgtttcacctttggaatgagg

SEQ ID NO: 26924 - DNA, 3998 bp, Cannabis sativa
tgtgaaccatgcaacatagaataattttttatctttattaattagtaaatcagattatattgaaataagttttatttaggacacaaaactcaacaataatttacttggactatctactaactttaccatgaaaatctttttccaattgacaccatcctaatatctcaagatttttagattgtatttgttataagttttggtttgttggcagaatataaacaaagaaatcatgtatatggcatatgaaactaagtatgtaaatattcatattaccttgtgtttatggccatattcatcacatttttaattaaaaaaatcatttttacacttaaaagcaattttttttatatatatttttacaaaaattcatgtaaaaactcacataacaaccaacggagtaacctaaatcgcaattaaattttacataacaacccacagaaactactagagcaatacaaactgtaaattttacaaaaaataaaaaataaaaatagtatataaaataattcctctaaaaatattacaccaaacaaaagattcacttcaaatgctcttacatcctaatacttctccaataacaaacacataatagttccatagttcctactttgattcggggtcaatcattcatgtcattgtagattttgccatccacagcacacaagatgattgcaaaattgttttgagatttaaaaagggaaatttgattaaatatgcataaaatactttaatatttttttcctaaatctatatgtattaaaattggtcatatatgaccacattactattttccccataatacccctcacatttgaaatcccaatcagcctcctctctctccctctcgctcaaaccacgctcaaacccacggcgacggcgcagcaccccattcgacccacggcgaacccaatcgacaaccgaaccaacgaccctatcgacgaggcaatcgatgaccggatccacaacccatacggtgcacgccatccataacaatgtcgaaggtgtgtttttattttcttttttttttggtccaaaagtgttaaccatttatgtcggatatgtgaaattggaaaattttgaggaagaagaagaaggcccgatgggacgtccgatgctagtccgatatgggtccgatgggcccttcaattggtttaaatatgtgtaggtccgatgggtccgatgccagttcgatgggtctgatgcccagttcgatgggtctgatgcctagtccgatgggtccgattcccagtctgatgcccagtccgatggggtccgatttaaatcgggtgggaagaagaagaaagaatgggaagagagagggagttgatgtaaatggggagggtattttgggaataatactaaagttgtcatatgctaaaaatattagtaagtataagtttaggagaaaaattttaaagtaatgtaagcatatttaatcaaatttccccaacacatatatggatggagtacgtccaaggacattccaagtatgaaataatgaaatgtgtagctatttatgaaatataattttttttatataaataattagttgatatattatatatgcattaattaaatctctttatatatgaaaaagattaagtggtgctttaaagtgctaattactacaaaatataataaatatattggtataatttaatattaaattttacatcttttaattttataagtaatataaaaaattactaatcaatcacaagctaaattgatgtgttattcataattttccaataataatgctcttcatttgcttttttttttctttgttttgtctttctcttttgatataagaaacacatgcaagtgggtcacactgtccaaccatcattatatatttatatatagtactgtatataattttcaaaaaaattcaataacttgtagtttatttaatttgttaacttcataattaaaatattaataatttgattaattattattaattcattttttttgcattagattaacataaatattttataaatttgatttttaattttaattttgtatttttattttcatatatttgtattcaattaattgatttatataaagtataaaaagtgatcaactttcttatatttgtaaagttcgtcatatataataaattttatgaataaatcaatttctatcttttcagttgtattaatcaaattctatatacgagttttcgaattgatttgattagatttttgtgaagaaaactgaattaagattttattttctacaaaagtaaagttacatgaagtattgctcacagttttgtaggtacagaagcagaaatttatataggctgattgaagatgtttttcagagaagtttcttatgagatgtggtcttatttagaccgtgtatgagctgtcaataaagtgtatattgattataaatataccttatatcagctaggtttaatatctcttttacatatttgtattttattcacatcttgcaagaaatagtgtctttattttgtaaagaatagtgtgttcgtctctttctctgtgtttatgtattttgtattgtcttgagtctgtaatcaagtctacaaaagaagaagaacaacaatgtggtacctttgacaaaatatgttctacaagctttcaggagataatttttcaagtcttgcctcaggaggaagcaaacactcttcaaggagatcgaagggagttaaagcacttgaagtaattttaacaagattcgattagaaggtggaatacatcaagtttacggcataaaataagagggagcctatttatgcatataagtcaattactttgtatatcttatctctgggcgtgaccctgtagactaataataatttgaaagaattgttgatgccacgtacaaaaactttgtgtatttttatttttctgcactgtttattttctggtttaattctgtagttatagagttagattctgtagctacagaataactgttttagtatcatatttattattcaacatttaattaattgattaattaaataataaattgataatattaaaatataaaatttcaattggtatcagagcggatcactaattctttatctttatgtatatattatatatatttgatatatttaattatatatgcaatgtatataagtagcatctataatatttttattgtgaaaataaattattttagaatattaataatactgttgatcaagtagaatttaaattaattatactttatgtatggttatatataaattatcatataaaatactttaatataattaaacttgaaccatacatattaatttttaatagatattattcgatatgaacttttaaaaaataattataattaaatgttaattttaaaaatacgattttaattcaatgatcaataataaaagaaaaattaaagtttatataattacttttactatttaattaaaaaaaattatctctttttacactatattatatatatatatatatagcattacttttatctctatttctttaactcaaacttcttattttttttatttctcttatagagtaacctcaattatataatacaaaaatgattttttttttaattaataaaataataaaattaagtatagaaagttaaatttttctaataattagataactcatttattattttataataaacttatatattatatttatatatggatatatagcaatattattgaatcattgacattcatatcaaaaattgacattcatatcaagtgtgttttaattatcttacattaattaattaatctcacacctatataaacatgttggaagcaggttcggcaaaacgagttgaacagcagacatgcacatattataattttatatataattaattttttaatatactaaaatgtataatagttataccaattacccatatatagtttggtggtttagggctttgagttcacaaatcacaaacttaattagggttattaggaatatgttacatcgtaaatatattta

SEQ ID NO: 26925 - DNA, 2281 bp, Cannabis sativa
tcctggccagtagtggcggtcaaggtttgggcagcggaggaggaagattgcttgagattaaggggcggaggaggaggaggagccattggagaaagaagaagaagagaatgagaggagttggagttgaaattgagaagagaaaatgtgaagagaggttgttattgttgttcagctttggaagtaacgaaagaagcattggggaaatatatgagagaaatggcggtgtgagtgtgaggctgaggcaggtggcctaccatgtttcctttaatgccatcggcgtcggagctcctgagattccaataaaaagagctttccaattccaaactcaacatctcatctctctaatctccaccgtccattcttttggccgtttcctattcttctcctcatttttcactatgcaattctacatctctccattttttttatttttttatttatttgtaatcgactctcttttcctatcatctcataagaaaaattcactacatctgtcaatctattttttttaacgaacaaacattttattgaaaatccataaatgaatatgaaagaaacaaaattggaaaaatcatctaaattaatttactttccattctgggtccacgcacgactaattcataaataccaacttgaattaaaaatacttaaaaaatattattaagtaaattagtaaaataaatctaaaaaaaatcttaattaattcaatacaaataaaaaatctcgtaaagagtacaaaaaaactaaatcaaactgttaatcttttttgacataaaccgtcaattttgaaaagagtaaaaaaaaaaaaaccatgcttcaaagaccaatccaacactattattatagcaagtttgagcaactgggatattgttcaatattttcgttcacaaatttaaacaacccttcccttattaaccttaatcatccaatgctactatatttatatctataatatataacaagttatcatttatcatttttaataaattgtatttataaaatatatatcattcaaattatttatattttttaaatgtaaatcatatagttattttaatttattaaataaagaagaaagtgataaataactttaaaattattgcaaataatgcacattttttagaccaaataattatgatgttgatagaatacttagttacttttgataaaatgatcaactttaaaataaaaatatctcatataaaataacttttaatttttaaattaattacttttaaaattttatgttcatttattatttatattatgttgcttttcttctcttttcagtaataaaatttatgttttcttcaatccgatttaagaaattaatattttacaattaaattaaattaatcacataatttattagcaaaaattttaaacataagttaattattttaaatttatattatgatatcttaatattatttaagatatatttttggtaatcttaattttgtgtaaaaattaattaaatatcatataataacttttaaatatgaataccaaataatgttttagtaactcttagacattcttagttattagtttgccttgttagttataattagttaggttcataactaattctgcttgttagttggttgctgatgtattccactcttcttgtataaataccatatattcattaataaagattaatcaaatctactttcactaatatggtatcagatgcttaaaaatcttctttctctcttcttcttcatcttcatcgtctatactctgttctgccattgatattcgccatggttcgaactcgacctactggttttaggagttcttgccaaaattctctgccaaatacttcttcgacaatcctagatgctccaacaaacgacgatcggatcattcctccagcttctgcaatcactggagaaaacaacaataaccagaatcttcttcattgccctgctcgtgaagatagttcgagtccatactacctcaattcaggagatcaccctagcctaatcttggttactccaccactttctgatcataatttttaggcttgaagacgtgacttcaaactttctactggagcaagaaacaagactgtgtttctgaaaggcacattacctcaacctccgatcgaagatcctcttcatcatcattggcttcgttgcaatcaaatggtgatgtcatactgaactcaaggtaatggccctagaatctttaaacttagagaaactcttatcacacttcgacaaggcgatgattctgttagttcatattttacaaaacttaagtgtatgtggga

SEQ ID NO: 26926 - DNA, 1315 bp, Cannabis sativa
tagtttaaggggcatttttaacgatcttaaaagtttagaagacatgatttgatacatgttaaagtttagggggtaaaaatcataattagttttttatatatatttcaaaaatacttggttgaaagagaaaaaggtaaaaaaaaattaagagggacatggcgctacctgaggcaccgcctaaggaaatgaggactttgattccttggccttggcaagcattgatatcggagcttaggccagtgcagccgttgttggcggggtcacaatgaccggctaggttgagcgtaggagtttggccattgccaaaagtgttgagaaaagctatgtttacaaattgatagtttcctgaggcacatgtatcagctaaggttccttcccctccattttggccccagtaaatggctattccagctgcctttgatgtcttgaatgtggaaatggctataaggaaaattagtaggaatgaaaaggattggttttggtttgccataatgagtttagtacaaattttcttttggttaacttgatgaagaataaggatgatatttatagcaaaattagggtatcaacaaagaaaattgaggtaggaggcgtgtggaagaagttgtgagtacatgcgcagtaagttttggcattaataataataagaaaattaacacttccacaggctgctccgctcagtcaaagcttaatttgtttgtaatccaatggatatatattagcatccctatttagcatcaatcactacttcaaaaatatcttttagaagcgatttttaagccctttcaacgtcgtttatggtaaaatttgctctcgatgctgattcagatgacgctatagggtcgaaaataactgacatcatatgtattatatagcatcagttattttatagtaaccgacgccatatgtgccttatggcgtcggttcataacaaataaccgacgccatatacactcaataccgacgccatttacccccggacaactgacgccaaatctgtaatgattatattttttttttcagctaatttaatttaatttaattgatttaaattatatatttattaatttatatattatattatttaatttaaatatttatttttttaaaaaggtaaattaaatgttatttaaattaattttatgattggccaatatacctaattttatttcatagaagtaattaaataaattacaattaaatattacacaaatgttggaaaattaatctaagtattaacaagttaacctaaaaaataagttagggaagaaaaattcttaagcctttcaatcgtccaagtcttcgtgaatcaccg

SEQ ID NO: 26927 - DNA, 3898 bp, Cannabis sativa
ggacagagccttggtcaaacaatcagcaatttgatcagtagaagatatgtacctaacttctaattctttctttagaattttatcacggacaaaatgaatgtctatttcaatgtgtttcgtgcgtgcgtgatagacgggattggatgccaaggcactggcacttacattgtcgcaccaagtgactgaagttgagggcagagggaagtcgagttctttgagcaatgattccacccaagtaatttcagcagtaacatgggcaaaggccctgtattctgactccgtactggacctcgacaccactgcctgtttccttgaagaccatgatatcagtgtatcgccgagatagacacagtatccaccaacggattttctgtcatcagtgcagcatccccaatcagcatcagagtaccctgtgatgttgagtctgtgactgtagcagatgtgaaggccgtgattaagtgtcccttttaggtatctcaaaattcgctttgctgctccccaatgaacggttgtaggagcctttagaaactgactgagtttgttgacagcgaagcttatgtctggccttgtgtgacatagatattggagtgccccaataagactcctgtatgtggttgggttgtgcatagcttcaccatccactaaggagattgttctgcctgtgaccatgggagtggggcacggtttgaggttactcatgtcatgtttgctcaagagttcttcaacatattttcgttgagttaggtacattcccgtgtcgtctcgagtcacttcaattcccaagaagtagtgaagtgatcctagatctttgagagagaagagtgtgtttagtttgttgatgaactctttaaccttagtttcattatttccagtcacaatgatgtcgtcgacgtaaatgaggactaatatgatcaccttgctgtctttgtagaagaatagagaggtgtctgcccttgaattcttgaaattctagtcgagtagtgtacctttgagcttgtcgaaccaagctcttggagcttgttttagtccgtataagcttgtgcaatttgcacacatggttgggtttggtaggatcttcaaatccttctggctggaccatgtaaacatcttcttctagagtgccgttcaagaaggcgttatttatatcaagttgttggactctccagtttcggttgacaacaatggtaagaacaattcgaaccgtggaagctttaatgaccgggctaaacgtttcaccaaaatcaagaccgggtctttgatgaaaaccttttgcgacaagtcttgctttgtatctttgatgggagccatcagcattcaatttttccttaaaaatccacttgcagcccacaagattatactcatccgaatagggtaccaaggtccaagtattgttggctttgagggctaatatttcagtgtccatagctttgttccaccccttaatcttgagggcttcagcaactgttgtggggagagtaagtgagaggttggtgctgagatgatttaggagggctttgggcttgaaaatacccgccttggctcgggtaatcatgggatgagtgactggtttaggtggttgggaaggggcagcagctgagactgttggtgagggagattcggaggctggtggtagagcttgaggctgagatacaacatcaaaatgatcagtggtagcagaatttagatgtggagaggcatacctgtgttggttgttgttgtgcgaagacaaagtgtaactcggagatgctgcagcaggggatgcatcaagtgttgaattcgcaccagtagctacaccagcagccacaccagcagtcccattgatagaagcagtaggtgaatttggagatggaaactgaggctgatgagaagtgaagtggctatgaagattgggaagttgtgaccatccttcatgatgaatgagaagggactgttcaggtgcatgtgtgttgagaaaacctgatttgaaagggaattctttctcattaaaaactacatgtctcgagatatagaccctaccggttgtactaaggcatttgtatcctttgaaagattcactatagcctagattcacacactttagtgagtgaaaattggaacttatgagattggtaaggtctaatgcaagggaaacatgaggctccaaaagttctcaagagcttgtaatctggttttttatgatagataacctcaaatggagatttgaatttcagaatggctgttggtaatctatttattagatacactgatgtttgaaaggcatctacccaatattttagaggcatgctagcttgagcgagaagggttaagcccatctcgataatatgtctatgtttcctttcggctctcccattttgagcggaggtatggggacatgagtgatggaattgaattccatttgtgacaaggaagttgtcaaaactttgaaactctccaccccaatcggttctaaggaattttatcttagtgtcaaattggttttcggccatggacttgaattggatgaaggcatctaacgcatcagatttttgtttcagaggatacagccaagtaaatcggctgaagtcgtcgacaaaatgaatataaaatctgaagttagtgttcgaatttattggggcaggtccccacaagtccgagtgcactaattctaacatcttagcagccctattgtgtgaaagtttgaatggaagagcgtgggatttaccatattggcatgcatcacagaaactttctttttcattgatagggacagttacattacttgtttttaagacatgtttaaggattctactagatggatgacccaaacgttggtgccatacatcattcttggaaataaaactagacctatgagcaacattagcagataaaactaaacttgggttgatggcagaatcgggtggacagaatactggtttgacattgctggtgtcgaattggtacaacccattcctaagcatcccttgaagcagtaccttccttgtgaccttgtccttcacaaaacaagcattagagtcaaattcgattaatatgttattgtctgaaacaagtctagagatgcttataagatttttagcaatggcaggtacaagcaagacatcttttaaaaacaaagatttgaagggttcatttgtaggtaacaaaccagatccagtgtgtgtaatggtcaatgagtgaccatcacctatggtcaaggtgtccttaccaccatattcacgtttttgattcatgttgctaccatcggatgtgacgtggttgcttgctccactgtcagcataccacacctcgctgtcgacaacttcaggagtggcgatgtacgcagagggacctggtttattctgagtttgattgttgtgtggatcggttcccatgtaagcttcatcgtatctattgtaacacacagcagccgaatgtccaaatttaccacaaacttggcatgttggtctggagttgctgttgttgttgaaccttccacggcctcttcctcggttgtttccaccacgagaattgttggagtgactgccacggccactggtgttgttcggataactggtttgtcctcttcctcggcctccatgaggtgttctgtcagccagatttgctgttggtgatgttgtggttttgggaacgccattgagattttggaggcgttcaatcttactgtcgaaacttagtaggagttcttgcagttgctgccatgtagtgctagtgcgagcttcaatttgcaagacaataggcagatagttagcatctaacccatataaaacattagctataagatgattttcagggtgagggtcccctgcaagagctaaactgtcagcccaagctttcttctgacgaaggtattcaaccatggtggtgctgccttttctcactgtctgaattgcagttcgagtat

SEQ ID NO: 26928 - DNA, 1679 bp, Cannabis sativa
aatgaaataaatttctaattcacacaaaaaaaaaaatatattttaataatttaattagaaaaattaattactaaaagatttttatttaataataaattaaaaaaataatgaatacttataactaatttaattttaaaataaaattaatcttaaataaaattttctaagaaaataaactatcaaattacacgttatttattatttatttttagtttatttttaaattaattataactattcaattgtcatctaatatctaaaaataaatgtaattatcatagttacacatttgatgtatctattaagacattagtgcactcctaatgggtattatctatgaatgagtattgttagaaaaaattgtatttcatgcttaatttttctatccaaataaaaaaaaaaatcttttacttttgcattatatgattgatgttattctatccaaccaaaagagtgataaaaaattgttgagtttgagcaataaagacagataaaagtaatgctaaaaataaatatatttttagataatataagaaaatagagattttttttaattaaatattaaaattaagctaaaaccttagttttttttacgattggttattaaattaaaatcttattttttaaattaatatttaattataattattttttaaaattttcaataatcaataactaatactcattaaaaaataattcatatgtataaaaactagttaacataacccgcacgactgtcttaattttcttagtattataataaaaaaataactatttattaatataataacataaaatataaaccttcaaaaaaaataattttaatatataatagtaaaaaaaatttaatcacatatttttgttaataaatttatttagaagaaatattctaaatgtattcattatattattagttattattattagaattattaaaaatttaattagtgtgttttattatttattttttaagaagtttaaaatttatactattaacgtataatagagtttttgattgcatttttcaaaataaataaatagagtggtgtgagaaaaaattaaagtattatcattattaaaataaacattccttcttataatgtatttgttttttatgtatatatttcgatcatttaaagttgttgtcatcattgtatctgccgttgttatcacctcatctatgcctgaccctaggcatagatgggctaagcctatgcctaaggctcacctagtcttggggccaaaatgtttttgtcctcttttaaaagtacatattttttttattaattttgaaaaatacaatattttactttaaataagggcccaaaaatattttttttttctatggcccactaaatttcagagctggtcttgactttatctcacccattgtcatcaccatatctcacccattgtcatcaccgtatctcttagtcaccaatattgtccttcacaaatcttcatattaatctcagattccatctcgaatttcaaatatttttattaacacatttttcagatctgaaaacagttataattaattgactttacagtcattaagtcatacatcatcaaaaatataaactcaaacttatcactaaaaaatatttatataaaaaacaaagaaatacatattaataaatttaatatatcaaatacatattttttttaatttaata

SEQ ID NO: 26929 - DNA, 1793 bp, Cannabis sativa
gtttattccaaagagcaggcgcaacatcacagtggggcgctctctccaaagcttgggaaagataagctgatttgcaagagaaacgcccattactttccaatgtccacacccagctatccttgccactgcctaggggggttccatccttgaggatagccgaaatggtctcccggtcaaaaaggctatgaagtttccccatatcccacccacccgtgggagttatgagctcagcaacacactggtcatcctttaccacaccttcctttggtttcggtacgaaaccttttaagtgggggatccaaggatcccaccagattctagtatccctcccattggccacccttttacaagcccctttccgaaggattgagcttgctttaactacatttttccaaaaccaggagtccgagcctttataattgcagttgagaaactctttccctctaaggtacttagactccagaatctttgagcataacgactgtttgcccgttaaaaggttccaaccccacttagccaaaaaagctaggttcatttcctttgtttttcgaaaccccaggcctcccaatgatttgggaaggcaaagcttttcccaggctctaaggtgcaggccatggtttcctttctcgaatccccaccagaaatcacgagctagaccatcaatccgattcacaaggcgattagacaatttggtagtctgcatagcataaataggcatagacaagcctaccgacttaataagagtagcccggccagcttttgataaagttttggccttccagccttgcaacttggatgtgaggttgtcaagaatgaagtggaagtcagcatctttctgtctggatcggaacaggggtaaccccaggtacttagtaaccccttcaggggaggcaatacccagagcttctttgattgctctcctcataccatctggggtattcttgctgaaaaatatagaagtcttagttttattgatctgctgccctgaccactcacaaaagttttccagacagctccaaaagcccttagcctcaattaagttggcacgaccaaccaaaattaggtcatcagcaaagaaaacatgggatatcaccggaccccctctacttaatttaataccatgaatagatccttttcgtatctcttcctccaaaagtctggaaagtacttccgcggcacagatgaaaaggtagggagataacgggtctccctgacgcaggccacaagaaggaataattctaccaacaggaccaccgttaaggcatatattgagagaggaggtggaaacacactgggaaacccacctgcaaaattgagggggaaatccgaaattcccaagaacatgatcgatgaacctccaactcagcctatcataagctttaacaaggtcaatcttgatcgcaaagaaaccctccttccctttcttcctgttgaaggaatgaataatttcttgcaccactacattgttatcttggatgttccttccagggacaaacgcagcttgggtagggcagataagagaaggaagaataggttttaatctatttgcaatgatcttcgaaataaccttatacatcacattgcagagagagattggtctgaaatggttcggctttttcgggttctgcatttttgggatgagaacaacattcgtcgaatttacccccttatgcattcttccatttacaaagaaatcttcaactgcgtcacaaaaatcatctcccacagactcccagtaatgcttgaagaacagaacagacattccatcagggccaggggccttatggttattc

SEQ ID NO: 26930 - DNA, 1994 bp, Cannabis sativa
gagttggagagagaggctttcggtgctgtagaaacccaattaaatttgattggaattggacctttgattccgacgtcttttcttgatggaaaagatgtcacttctaataaagatgactcatcgaaagagaagtatattgagtggcttaactcgaagcctaaaacaacagttgtttatgtgtcgtttgggagtatggcgattttatctgagcaacaaatggaggaaatggctaaagggttgttagaatttggtcgtcctttcttgtgggtcataagggaaaatgtgaaggacaacaataataatagcaagttgagttgtagagaagagttggataagcttggaatgatagttccgtggtgttctcagatggaggttttgagtaataatgagtcgtcagttggggggtggtgtttttttgtgactcattgtggttggaactcgacgttggaaggtttgacttcgggggttcccatgatagggtttccccaatggtcagatcaaggaacgaatgctaagttgattgaagatgcatggggaactggggttagagtaaaactcaataaagatggaattgcaggaaatgaagagattaagaggtgtttggaattagtcatgggaggaaaagaaactgtagcgggggatagtgggaaggaaagttgggtggaaaagagaagaaatgcaaagaaatggaaggatttagctcgagaagctgttaaagaaggcggatcttctgataagaatctgaaagcttttgtaagtgagatggttgaacaaagtggtaataagtaatatcttgaatcttctaattaaaatgttatttgcatatcttaaaagatatgtttacacaactatcattaaatgaagatgttaattttaaatttcttgatatttttcaaattttgtgtgattttgtccttgaatctttcattacatacatgcattgtttggttaaaaggatcaaaaagtaaaaaaaaataaaaaattatagaagacagaagttaaccagttccataaattaatgaaattagtttttacacatataataacatatttattttttattgaggaaacttgtttctatgtatccttatgtaacttctattgatttataaaactgaattttggttgttattatatgaatgaaaataactaacaaatacaatgaaagtcatatataattaattatctattactactagcattgatgacctatgcagcaaggaagtgcaccagcattgaaagtaatggtcccaatcatagaagatttggcttgcaagcttgaggctctagcatgcttgatgagactccacatggggtgaagtaggcaacattcaatagaagatcactttttgatccccaattccaatttttcccaacaacaacagatttctctaccctctaaagttgcctacctagaatatataactaattcatgtttaaataaataaaaaaagaaaaaactttaattattagagtaatgcatggcatcttaaagtgtttttactatcataaaacgtgacataatgttattgatgtattttaatattagattgatgtatagagaactgctaataaattataaaatatcattatcagtgtatttaatgtgcttaatatcaatgcttgaaaaaacaaaattttgagattttgtatttgttatttattattttgtacctcttttgcaaaacggttggttggatagctattaatggtgggattagcactaccaccaatggcatacatctctcaatacgtgtagtcattgtttaccacatggaaatatctgtctacatctctgttattatttcaaaactcagttgatttacattaaaaaaaacattaattatttcagttttaaaactatctttactgtaacagtcagtagtcctatgatccgtaaagaaaaaaactgggtaagctgttcaatctcacatcgcctggggaaagtcaagtgtgatgattttaagacaatgtaggtatgagactacacagtt

SEQ ID NO: 26931 - DNA, 1877 bp, Cannabis sativa
  modified_base (1312)..(1313): a, c, t, g, unknown or other
tcaattagttgagtcggttttgtgcttcttagattgggttattatattaagtagcagagggcacatataccatctaatagttcatttaatgaacatggaaaattagattgggttattatattaagggtgcctttaaaaaatattagtgtaactaaaatagtgtaattgtgagggtattaattatatattattttaaaatacaaaatatgttttaatgtaaatcattgcatataaattttattttcatgacaaatgagttagtaattaataattatagagaaatattacattaattagtttaaaatgacaacattttattattacacaatttcaaagtatgagaattatatatattgcaattgagataagtcaattacctctaattatatgaatactatgtaattacttaattaacaaacacttaaaatcttgtaattattttaaataagactcacttgaaattacttagcaacttcttgcaaaggcatcctaagtctaattagaatatttgaaactcaagcttaaggcttatagctcttgattaggggctttgaactaagattgttcattgaaccacacttaatatttttaatcttatcccaatctggtcaaatgatacattaaatgttgaatttttccaaccaatccgatctaattaatttcaatcacttaaactgattcaatccaatgaaacattagattgaattggttgtatctattagatacatatcatgtatatctaatagattgattcagatttatttaatagatcaaatattttttcgactagattcatctaatatttattagattgaataggatctatccaactaataataaaggtaaaattaaaacaggttaagtaatgtgggtatataattttctccttaattttatttctttcggtaatatatttagtagagggttggttacacctacaactgaaatggaaaccattttttttaatataacgacaactcctaatacgaacagatacaaaaaatataaataattttatcatagcacttttagatcgaactataattaaattttattttgacaaaaaatcaattcaggatcctatttgcaccattttagaaaatacaggatctattttatcatttaataaaatagagggtctaattggtaacttttgtaaaacatatgatccaaaatagtatttaactttttttatatgaatattgtagacgtaagttatgttgaacatccataaaaaattcaaaataattttaggggaattttcataaatatgagaattatgggtataatttacttttttatggcataaatnnataacactatagggttatgggttttttttatttttattttttacatttatatgagtttttcttatgtcatatttttgtaaaaaaaagtgcaaatctcatatttgtaaaacaacaataagtttttctggaaaagtcactggtaccggaaaagtcgccaaaaaagtcaattgtaccggaaaagtcactggaaaagtcaccagaattaaatgtctcagatataactaaaaatataactggttctattatgttacagaactggttataattaaatataaataacataaaataactcaaatcagttataattaaaataaaactggttctataatagtgttgtaatgaataaaaacaaataacacgaaatagctcaaaccgattataactaaaataaagccggttatataacataattaaaacaaacaagtaacacgcaataactcaaaccgattataattaaaaacaaagaaaagatcagttcctaaaacactgaaataaaaattaaaaataaaactaggttcacaataaaatacttcataactcataatacctcataaaaccggttat

SEQ ID NO: 26932 - DNA, 1139 bp, Cannabis sativa
gggcataaaacccaacaagatttgcgttggaaggttggtaatggaactcaaattgtctgtgcatctgatccatggttgcatggttttacctcttttaagcctctgatttttaaagattctaataaagctatgatagtctcctctttgattactggttcgagataatggaatcactgcttgcttaaacaattatttttggattctgatgtcacaaagattgaaagtattccattaactatttgtgatcaacaagaccaactcatatggcaccatgaatctactagtttatattcagtcaaatcttgttatgcattagctactcaacttgaggagcagcagcctactgctagttcaaactaggccctgcaatggtaaaaaaaaatctagtctttgtctcttccttcgaaaatttttttcttcttttggcgagctattcatgattgtctccctatttttggtatactccacactcgtcacattagcaattcagctagttgctctttatgtcactgcaataatgagtcaattattcacgctttgttctattgcaaacacactcaaaaagtttggcaattttcttcattttgtctctaagaaaacctgtcaaacaatatgtccttgaaagaatcaatgctacatgtatccacgatttggtcctcaaagcaattagagcaatttgctataattttttagagtatatagagtaagaaaaataaagaaatacacgaccaagcctaaacttcctgatatactgttgtattttgcagtagactacctggaagaatatcatgctgctcataacaaatcaacttctaaatcttctccccctgctctcgcttcaaagctgctatagcaagattctaactggttgtatccaccatcaggtatactgaagttaaacaccgatgctaatgttaactaaatgaacaataagtctggttttggtgcagtccttagtaacaacacaggtgatattgtagccaccatgcctatgccctttcaaggatatttttgaccagaagtgatggaagcaacgactcttcttcatagtttgtaatggcttaaagacattcaattactagttcactatatagacaccaattctctttaagtagttaaaggattacaattatctcgaa

SEQ ID NO: 26933 - DNA, 1922 bp, Cannabis sativa
cccacaagccaaaacactacaaaataccatcaacagtccttgaaaagctactcattttatgaatcaaattcagattcactaaagattttcacttagaacgtaatcaataacacatcacccacaaacaaaaaacacaatgatttaatccaaattatcataatgaaaccagacaaaagagtgagtaggataattgagtgagtacctgaagttcagagagctcctcaagatactcaggaggacaaaggtcaggtcttgtagacaaaccctgtccaattttgacaaaagtaggccctaatcgagtgaaaattgttctcaactcagctccacgagcccttttgttctgatccaaaacaccctttctttggtccaacaaaagctttactccaaacgaacccaaagcaaccaaaatttccacagccctccgcgcaacctgagaaaacaacaacacaaaaccaccattatcaatattcaattacaacaaaagtcctcttcttcacgaaacagagagtcaaaaaaaaaaaaacaacaaaccctgattgggcgagagccatatttgttggaaagaagctctggaccgtagacagtagcatcaacagcacgttccaatgcacgcgcctcagcctgaagatcctcagctcgattatacactcctccacgtcctcctcctcctcgataaacctgaacaactttgatggagttggattcatcaggaaacggtgaagaagacgaagaaggtctagcctcgacaatagctgctcgtactctaacaactctgggtctcctctgccatggcttggaagaggaaaagtaagagggagtggttcgaagtctccgccatgaaactaatggatgatgtagcgttgaagaagaacaagaagaagaaggtgatggtgaagatgataccgtaggaaccaccaccattaccgagctcatgggttttgttcaccaaaattcaatcaaccgcgattattttcttcgtctctgtacttgtttccccatttgtatatatctgataataatccagtaaaataaataaataaataataatttagatatttaatttgtaataaataataattgataatatttatggctatggaggtagttaagtgtcgtgagggtagtaaccacatacagacctcctcacaatatcgcttgtgtgcttctccttcttcctcttctcttctcttctctatttcatatttcttttttttcctataaaataataatatattaaaaattattatttttatttcttttaatgaatgaatacgattatttggatattttttttcttcataaaactacttatttatctagttttgatgaatgaagatatggatttgtatagataattaattataaaaactatcaattcggcacggtcataatttaataaattcttacttctcacaaagaagaggtcacaaattcgaatttctctctttaatgtcaaaaaaaaaaccataaaaactctcgttaacactcaatgctatctaattgtttaaagtgttttaagaatagagcaatattttatagaaattattaaatttaatatgtatgatgtgaatgacattttagataatgctagcattttttaaaagagaatgtatttagcaattctcttataataataagttaggagtgggagctttttaggagtgggattgaataaattgaccataaaatagtcaaatttcttgagttgagtataatttagacaatgaatcagaagataacaagcttaccctttttctcttatttgcttcaaaattaagaaattgtgaacaaagatgaataggaaaaattgccattgttcttaaagattttaaccaagaaaagtttctaattttgctagaagatgattgagcataagtggccttctaataaaaatttggatcatattgaacctgataaagtga

SEQ ID NO: 26934 - DNA, 2268 bp, Cannabis sativa
ccacgtattttgggcgaattctggagcaacaactagcagtgtctcttttattagagatccacaccccatccttattcaagatgctctccacttcattttgtctattacaaatggtggccgaaatgaagaaaaacctggagcacttatcaccatccttaatctaagagacacgagatttttattgccaatataaggctttctgtcgtaaagcctcatttagattttgtcacacctccaactcctaggcccactttctcgaccccacaggcatcttttggatattctggagttgagcttccatcatggagatgttagtatccaacttaccaaactgctctcggttccacctacttagggccaagagggtagcacccactttcttaaaaactctagatggggcccaggtatgggaagctgacgcccaagcatgactcacaattagggtactatgcgggtctctagtccaccaagcctcaaaacaaaagggccttcgtgctttagactcgggattcacagtactaacataaaggggtcagtgatctgaatcacaagtgtggagcgaccgaaccactgctttaggaaaaatccttaaccaactctcgtcaaccaaagccttattgagtgccgacttaacatgagccgaaccatctttgtggttgtcccaagtcaggttgtcaccttttatgggcatatctatcatagcatggccattaattaactcagggaaaaaactggtccttccctttggatcccacccgctcagagttactcaagacaaaattcacatctcccaagatcaaccagggcccgctaaatttgaaaccaaggttccatcatgttcaaccataatttctttttctcgtgaaagtatagaggcccataaacacaagacaacaaccagggatgatgcttaggtcagaatacacaatactcgaaatttgatttttcgatacacataagcattcgaaactaaaatccaccttccaagcaagaattaaaccccctgcattacccacaataggaacaataatattattataaaaatgtaaattctttagagtacgtaccaaaatagtagctttcacttttaattcagtgatgaaaataaagtcaggtgctcgcgaccgaatcagggctttcaattccagatctctatagttccaagcaacgccaatcatggctcttgtggaggggatggaccatccacctccacaggggtaacgatagcatgtggcacaccgacagcaaattcctcatcctcaatcagtacaaaatcgttggccggtatcgcaatgtccatcaaacgagccttggccttccaccttgtaagtctaattgactgtcccgatgaaatcggtttgccaacatggtggataatgccagtagtgaccttagcacacacatttttcttcatttcaacgcagggtttatctgaagttctatcaaaaacacaattaaccttagcatctttaaccacagacactgggctcgatccacaagaaaaatctctgattactcttttactcttttaatggacaagcacgactttatcccaagaaaacaagtttcaaaatccaaacttcatttcttgacaggagttgttcgttcattaatttttgatgaagcttgggcgccaatgtcaacacaaaattttgccctcttattttagttagaagacccaaggttttcaaattcatggatataatcttcctgtgcttgaataaattttgataatgaccttttctcatcaaggtgctctgaaacttcttggcccaagcaagagctactcggatcacaattaaaaaatccaacattaatattgttatctttatttcttctattaattatttgacatttataataaaaggctttaatttagttagaaataattattcgttttatgatttacataaattttgtatttacaattattgagggtgagtttttaattattttggatgaataaatatttttgtttattcactattgagttgagtacttgagtgttgtccctatcctatttaattgtagtgggtagtgtgagatgccgaagtcttggcgtctaccccattgatgatgtcgttttgtatattatccatatccacatgagaagagtttagaagataataatgtcgttttctatatccacaacaaaatagtttggatgataatgatgtcgttttatggaggtgtgttgtcccaagccgacagtagtaataaataattcaattgggtttagttgtgaaaaaacttgtgatacacaaggta

SEQ ID NO: 26935 - DNA, 3895 bp, Cannabis sativa
tccttgatttagttttttatatggctaatttttttatgtggttttttttttttttttttggtatgatttagatatgaaatataggttgaggtggtggttttggtggaggcttgaggtggtgatgttttctcaattttttcgaagtggtgctgggttttagggtgggggttggttggcggtgggttttttggggatggttttctgggaagtgtgaagaagaagaagcagaacgaagaaaaagaaaaaagaaaaatgagaaaaaagaaaagaaagaaaaaaaagaaaaaagagaaataatatatattttttttaattttaaaatttattttttttttctaattattaaatttttttaaatattttaatttatttttaattattaatttaatattaagtggctcaataatatttcactacatgtacacagcacttaacaaccaaaaactaacggaatgagtgctgaccaaaacgattgtagaggttggggagtttagtcataattttttcagtctaaggatttgaccgcaccaaacttcaaagttcaaggagaggagtttagccgtaaattactatttttacgatgatgttcgttagagtaaatctcaagaaagtttttaaaaattataaataatttacactgtcgaatttagattttaaaatagtttcttttactcggctaaaaataaaggagcacgagggtaataaattgtttaaactttattttttgcattctaaaatatatagaaaagataaaaaagtaaagaagtttcactataactataataaaaacgagattaaaatatttaaaatgtgccaatatttaggggtatattatttatgtatacatataaatttagtacaatgataaacataatcattcttttttatttttaaggtagcgtttagagataatgaaatagaaaagaaaatgtttattcaattcctttgtttggttatttttaaaggattggaatgtcattccaatagaatgacttttccatcattttggtgaaatgactattccatttgaaaatagaagaaaaggccattacaattctagatgagaacaaatttaataatgatcgtttatcaattttcgctatgcgttttaaatttaatttcattccatttccattctccaattgtattctcagctggctttgtagtatatatataccactattgtaccattattcaaatcaatgaaaatcattctctctttttctctccaaagttcttaacatggtatcatagccgcttgtgatatgttttgagttcaaagtgctcccgatctaaaaaagcgagcaataaaagagcattgagccaaacttaaaaacttttgttgtctctcctttaacctccatttaggacctttcggccaatgtgtgccaattttcagtgttcgagtctttgacctgtttcaaaatacacaaatttcccgacgtgtacacccaaaaatttctcgatatttggccttgtgggattgtttcaaatgttacattcgaccttatgatctcttaaatgtcgctcgttatacccacacttttcaaatccaaacgtgaggaggatgtattagagttagttccacattactaatatgtggaaataaattaccatatataaaatgaatgaactactcgtctcattgctaattggttttgagataaaatcccatatatcttatttcaaattctaacacgttcctattcttatgtatttatttttttctaaccaaatgccaccgaaaatgtcaatattttcaatattatcttcttcatatttatttaattttttttatatatattattttaattttgaagtgtcaaaaagattccaatattaattttgaggagagacattgaacattttttttattatattaaaggtttcatacattaaaaatgagttacataataattgcatttaaaattttaggtaaatctatatataatacaccccataaaaaaatatttgggtagatctcctattcaagagagttaaacttgtttagaactacctgtaaatttttttaaaaattattaatattttacaatgctaaaaataaagtttaaatattttgttgtacgtataactcatttttttttttatgtgtggtaagctgtgtgaaccttattttagacattataaattatttagaattttcaaaaaaaaaaaattataaataatcttaaataattacaacatacacgaaaaaaataaaaaataaaaaactcacttagatactgaaacactctttaaggaagtacattaaaatttttgccccaaagtttctggttacaccagtgctttaaggtgttaaaagcctacgacttgagtttagttttgcaacatttcttcttttttttatttattaaagaaaagaaaaatacccacttgtaacatcgtcaataaataagtaaaaaaagcacatgtaaacttaaataaagttgatttttcacaacacttggtgaaaaagaaaaaaaaatataagcaaatcacatttacacaagctaacatatgttgtcatgagccccagatttcccataatgatattacaactaatacattaacttgataataaaacaccagtataaaaaattatatagaaaaacaaatacatatacatgatcttctgtgaatcaagctttgattttttaaattccacactagaacagtttctttacaagcaacaaccaccactaccaccaccaccaccaccaccaccaggaggtgcttgatgatcttgtttctgctttaatatcatgtttctctttactgcattagaaccttcttccaatagactaggcacctccattatctgttaatcataaaatttatcattataagctattattatgtgtagaaagaaattcaaggcattctaggattatcaatgaagaatacctttaatgcaagctcttcgaagcattgctcgacattttctctggttttagcactacactcaagaaacatagatccaagctctttggctaaagctattccttcatctctacttacagctctatcagattcctgacatgacacaaaagtgttactcaacaactcaactccctcttgtatatatgataataatgcattattaaaaagaatgccattgtgacattactctttgtttaaccaatttttcgcttcacttcttggggacaagattattcagcataatacattataaaaacttactctatcaactttgtttccaacaagtattttgacacagtcctgattagttgagtacagttccacttctttagcccatacatctgataagtttgtgaatgtttctcgtcgagtcacatcataaactacaatcaaagccaaaaaaaatgagtctatgttatcttcaatggaggctttgagcaaaaaggtttgaataaaaaataaaagaaacccaacaatgaaacaatcacatgtattctaattgaggtgattatataaataagtagggtttaaataatcatttggtatactatattatcgaaaacaaatttagtgaactcaaatttgatcaataaaattttattagtaaaaattgctttcgattatatatagttagtaattaaatttgaaacattggtatattgatgattgatctagacactaaatatgtatgattgcaaattaaaaggtattagataagtattgttgaaaacataggatgcaaatatgtagtaatataaggtaaatagtctcttcccaatctacaagatcttgagtaagaatcattgatattcaaatattatatctctggattcagatctactagaaagaaagaaaaaaaaatgcttaattgaacatgggaatgacaactaagctaatcccagtgtcaaaatcacattatgtattctagcatacgaaagataaggcaactatgttt

SEQ ID NO: 26936 - DNA, 3059 bp, Cannabis sativa
aagaaaaaaccattccaatgcaagatgaaaagtgtaatgtggtactttttttatcaattttttttttttttatgtattttaaatttgattccattcctattcccgctcctattcttatattttcattcctcccaaccaaacgccacttaagttcgtccattttgtagtcttatctggtattcttttctacgagtgggctttcactttgcgttcataattttttcttctttaccgtgttttgtgttttaaactagaaatatttgcatggacttatttgagaaaccacaatttgatttttctcctttatagggatataaaacctgacaatttgcttcttgaccgttacggccacatgaagctttcagattttggattgtgtaagccattgcattgtagtagttttccaaatctcagtgagaatgatcaaagagttgggaggggaaaatctgtatcgaacaatgataattattctaagatgcctacaacaccaaaacgaactcagcaagaacagttattacactggcaaaaaaacaggcgtatgctggtatgtttgttttttcaacttaactagatttttgtaattcagaaatgatagactgaatattgatagaagatgataaggtattatctaagaaagacaaccatttctcccttgtaattatttcttgcaaatcagctataatagcattgtgagaacaggcaagtaagtcatctattcttagagaggttatagttactttttaataactttatgcatgaaagaatctctttgagtaaaaacgccataatcatttcatgagtaaagctttgttttgattcataatatttacgttacccctccaaactccttatggaccccatcaaacattttaggcttacaaacaacctcccattgaccattatgatcacttccttctccaaaaaggttcctcattctcttcatctccttctctacattcttaagaatccaaaaatgggaaatgaaatatgttggaagggctgactaaatcaattgtattagggttaattgctgacaataagaaacatatgccgtcttctatctttccagtttcagaatcaaggaatctaatattcgatcctagaagtgtgatcaatgtatgttactttctagtggagccaagcccaaatattttatggtccaactctccactgaaacatccaaacaaattttccagactgtaatgatactcatcaagattactacctagatgattaacactttttccccatatttatcttcatgttcgaaattttcgagtagattctcagtctattatttaaggaattgagcatacacttcttccaatttctattgtataatctcagaattgaataaagattctatgaaggagttgctaactcactgatatgctcttacttgatctgatgttgaattgtttagtaccagcacactgctcaataattttgagtttaatgctttttaaaattttaagtcttccccaggctttagtacccaactgtacaaactccatagattttggattttttgaaaaaatgtgtatttgattcagttatacatttttattgtgcatacatgatttttgactcaggttttgttagattaaaagttccacaatagatttacaataaatctattttaaagctagtatagatatttctacttgtatttaaaatggatctttctgcagcagtgttggtttactattaaagagacaaagcctctgtcctttttttgcttttataatcttggataatttagtaaggagtttactttatcaatgtaattatctgtttattctatttccaaaatttattgtgattattcagctgttaataatagactcccatatgcttatgtaggcctactcgactgttggaactcctgattacattgccccagaagtactactaaagagaggatatgggatggagtgcgactggtagttatttctttttccttattatggaatatagttttgtcttgtgttacataaatgtaaaaagatatatatctcaggtggtctcttggagcaatcatgtatgagatgcttgtaggattcccacctttttattctgaagaaccgatgtcaacatgcaggaaggtaaacatgaatgtttactgttttttatatataaaatgtggtatataagtactgcaaaaaagttccataaaatacatgtaaagagttttgtttttcatcaccttaagcactatcatggggtctctcatgctaacatctgctttgtatattcttatcaaacaaatggtcagttcgttctatgcagattgtaaactggagaactcatttgaaattcccagaagaagtaaagctgtctgctgaggctaaagatctaatttgcaagctcctttgcaacgttgagcataggctggggaccaaaggagctcatgaaattaaagttggccaccatggactatcattgttttcttatattcatgtaagcattggtttattcatctgaacaaagctgagaagaatctctttatgttataggcacacccatggtttgaaggattgcagtgggatagagtgtatcagatggaagctgcttttataccagaggtcaaaggcgagttagatactcaaaactttgagaagtttgaagaggtttggaaataatggtttctttatactgaaatttcttaacatgcaatgatgttaccatctttatatttattgctcttttctgctgttaatgttatctttgatgttaaccatatgcagtcgggcaatcccgcacaacctccatcaaaatcaggtccatggagaaaggcaagtcttttagttttgatatgctctattgatactccttgtcactaaaatgttagcttttcagcctgaatgtctctttcggtctcaggggttctcctctgtctagccacctttgttatatatttctggcttgaaactatttgtgtgagtgtgcttatatctggatgtgtcctaaatttgctgtttttagacataccagacacacacacacacatatatatatataggttctcttatatagtgtgttgaaactgaaaaatttta

SEQ ID NO: 26937 - DNA, 3111 bp, Cannabis sativa
  modified_base (2463)..(2465): a, c, t, g, unknown or other
  modified_base (2882)..(2884): a, c, t, g, unknown or other
aaaaaattaaagggtggaagcatcaagtggagtaagacagacttcaagcagtccttccataccgagaaggagggttgaagaagtgccctacccccagtggtgtttcttgcacgaaaaacatcgtgcatgcaagagtcctgttgaatttttatgaggcaagctttggcttccgcgaaggaaggctgaagttgcataaatattcaagcttatacttcgcttgaaaagatcaaaaggagaaagcaccacggggagtaagacagacttcaagcagcccttctattccgggaaggagggttaaagacgtgccctacccctagtgatctttcttccacgaaaaaaattgtggatgcgagagtcctattgaatttttatgaagcaagtttcaacttctgtgaaggaaggctgaagttgcatacaaattcaagcttagacttcgcttgaaaagatttaagggtgaaagagtcattgggagtaaagcagacttcaagtagtccttccatttcaggaaggagggttgaagacgtgatgcacgcccagtgatctttcccatacatagagtaatgcgcatgcgtcttccgagctctgggaagccctaggatctcttgggcaacctatttcctctggtgaactgcaggtaatggcttctgaagcaaagactcggactcctaataggataagcagtggttcggtaagaacttcctaactggtttataatctctctagttgctttctctgatgtaactctggggttgcaatcacaccaggcaacagaaaccttctgagcgaactgtgccaaaaatggcctgcctcaaccaacagtaccataaccaggcctgactggaggcccaacagacgccaacgatactgatggtctcctctcaccagtcgccatgataggataaatttttgacccactacacaacccagcgcaaaggcaggcgaagtagttgccggacaatagatttggccctcacatcaacaccgacgtcagagtctcaagctggattgagttgttatacctgacgaccctccctgagttagtcctcgtaaccacatcgggtcttagtttctttgcctaaccccaatacctttggcacctctccgtgtctgcatagtcgtgttttaatggacggcgaggaacacgagcttgaggatcccaatggccgatcatcttgccagggagttggctggccagatctaggtttttaggggcaaacacgagcatggtaagtgtctctaggctgcgtgcattcatcttctgcactttcttcgagcgactaagggtgtagacccttagtctgaataatatctctggccaagaccctcctgacgtttggcggaaacttaacaagcagtcaggtggttttccttcttttttcttcgcacaggcttttctttttacgggcttgtgccgggcactgtcgtgcatgtttctttcctcagccctcaatgaaagcaccaaaatgtttaccgagtttttcgacaactaaatatttttagagcttaagaaagtgaaaatagagttaatagcaaaataacaaataaaagattttgacgtggttcgggcgttaattatccttagtccacgagtccattttattaggcccattggccggcaactgtttatacaaatagagatacaatggactagaactcttttcgactgtgttcctcttgaagaagaggaagcttagtaggaatattatagagttacaaaaatatgtttgctcaggatgatcaagaatgggtctttgatccaaaagagaaggtccccctcccttgtgctttgtttagggaatttattggctgacttctttgcatgggatcccttagatggatcatcgttggggcaaaatcccactgtcagattggtaggtcgcgtatttcccatatgacatttaagggtgtcagatcgtacgagctgagcctcagatgcatgtcgccttaggacttctcccttttgaatttcccttatccctagctgttggatcatttggtctagtacacaaggacacgcatgctttgcacgatggcatgtcatgggagacaacctctgacgtcgtacttagaaaaccctggtccctaggttcgtagtttgacacgtatgggtgaagcctttgtgggttaaaagcataacccggttcaccgtgtttcagaatgccttggcccctatgggcaatccatgctcctcgaagggatcgatagccttagctcctagaatggagggggattttggttcacggatacctttcatgtggcttgcagtcggggactccccttcacggagactctttttgcgaggttgatgcctttatcttcttggagcatcaattgagggattagggtagctaatgactttttggttttccttgattagaattcacgtgtcatgattacagaatgtggataacaaaccgattccataataaagataaatgaacacaaataataacacacaataannnaaatataatataaagaaaccgattatatttatcaactagttaaaaatttgagacaaaaaaactagttccgtaaagcaactaagataaaaactcacacaaaaaccaattaaataaaataactcaaataaaaacacccattcaacatgttccaacccaccaaataattacacttataccatatctactccaaatatactcattcattatattatagaaacggttctattttagttataacaggtttgggttaatcatgttatttatttttattcgttataacactgttatagaaccgattctattttaattataactggtttgaattattttgtgttatttatttttattcattatgttacagaactggttatatttcaattataaccggtttgaattattttgtgttatttatttttnnncattatgttatagaactagttctatttttatttatatttgagacatttacttctagtgacttttccaatgaatttttcgacaacgttgaattttttggcgacgatgactttttcggtgacttttccaacgatgatgactttttcgatgactttccagtgacaataactatttcggcaccgtcccttttttcggcgccagtgatttttccgacgaaactaattattac

SEQ ID NO: 26938 - DNA, 1122 bp, Cannabis sativa
tggtgagtttactacttgtaacgatacgtacacttgcgtgtgcaaaatatcacaacagttttggaaactaaaaatcccccccaaggttaaaaatgtggtttggcgtgctggcagagagtgtttgcccaccttgaaacaactgagattaaagagggtgaatgtccaaactctttgcccgatttttcgtgatgcagaagagacaatcaaacatgccttaatcacgtgtacaagagccaagcaggtatgggaacgggttggcattgggactccaatcgtagctactggtgcgagcagttttctggactggtgcatccaatcttttgcagctattgatgcagaaaaaaaggaagttgttgtcggtgctttgttgggcgatttggagcgcccgtaatgactttggttggtagaaaatatatgttactggtgctgctattgcagtgttggcaacgagattccttgatcagtggagtaatgctcagaattctcattgagacgtcatggtcgggttatacgataggtgacgaagctgagcaatggatggttccaagtaaaaataaaattaaggtcaatgtcgacgctgctttctttgatggtggtaacaagtatggttgtggttttgtggccaaagatcatcatggtatgctagttgaaggtaaaacactccttttcacaggtacgacatctcctgaactagttgaatccataggcgtacgggaagcgttgagttggataaaaacacttgggtgacagcatgttacacttgaaaccgattgtcttacggtggttcaagcgctaagaagctcggtggacatgatttctctaattggccaagtttgaaaactgtttttgttttatttgttaaccgatcaacaaatatggtagctcataactgtgcaagagcttctatattttatcctggttgtactttcgatatggaatctgttccattcgacttgctaccatatttggtagcggattttgatggttaataaagttggattttccattcaaaaaaaaataattttagcacaaaaactaacaatctaaaaaaattacaattacggtaaaaaaaaatcgcaccaaatacaaatttgttttcgagttaaaaataaaaaacaaaac

SEQ ID NO: 26939 - DNA, 2431 bp, Cannabis sativa
tgtgtttctggcaagggacatgtggacacaagatagataattaaagcccatcaacgggccctaaacgacaaggattgggccaagcctaatgccagttggcctttcaggagggtaattgcgttattcacccaggtgagctaacgccaagaaaaatttgtatctagaggacttctagctccacgtagccggaagggtttaccagcatattcctggaagtcagcgatagtttctcttctaccaatccttgcagaattaggaaattactttccacagatctcagacaaggaatactatcaagctaaaatgagaaactacataattgaagatcaaataattaatgcacaattaactatccacaattaaaggacacggtatgaacaactatcaccgtgattaatctgccaagtcagcatacagtcactgcctcatgggctgggctttatacgataagtctaaagtactgtattatttataaacacccccattagaggaaaaaaggtaactaagtataacctctattactctataaatacacactaaatccttcataaaaagggttagaaattcttaactcacaagcttgagaagaaagtagagcaaatatactcattgtaatcctttggcttttctagcctaacagataataaaattgaatcgtggactaaggctcttttgattgttttttcttgattattatattaaaaaaatcatttttgaaaaatttcagtaaatattttagtgctttcattgagagctgaaggaagcaataatactatttcaaattacgtttagtaattatggtactcacccaaaataagtttgatcttcaccatattgatcctaatgctaagacaagagatacagaagatccaactgaggtgaccagtcgccacaagaaggatcaatacagtaaagattgaaacccttaagattctatggttgaagatgatgagtcaggagagaatagttttgaaaattttgaagatgatcactaagacacacctaaagatgatgaccaatacatgcctgctaacggtgatgctggaaagaaggatcatccatacaagttagatcttgtggtcatcatggctaaaaaattacaaaatagctgaaaacaaattgcttgggaagaaaaattttctttgctaatgcttgagaagatgtcgacagtggaagttgtaatgacatcactgacagttggagacgaaaccaaacaaaaggctctgacagacaacaccaccgataaggctaattttaacaacccttgaacttacgatcctcataaggaaaaaaggaaaaggaaagtaggtgaaacttcaaagaaggctcatctggctgaaaagcaaaagaaatataaatctgccagccaacctcaatagaaaaagaaaggaaaccatgtcccatggtagagtgaccaaactaattctaggggcagagttgcacagaaagacaaatctaatgctacagcgaaaaagcctacaacctagaaagatacaaatcactgcgatgattctatcagtcaaagtgatgatgttgaagagttgcatttgttgtcagatcacaacagtgaaagtctctccacaaatgatcttcagagtagattaaatgcaaagaaagaaaaggcaagaacagagaaagctagacctcgtggagaccacttaaggaaccatgcttgattcatctattgtaccacctactacatccactacagtttctagtatacagactaccatcaacccacgtgttcctgaagttacttgtgctcctgcacctacaactcgtgtttcatctttagcaccaactaatctcattgctgttaacaatgacaacaacaaatgcaacaactactgctgctcttgaccacactatagtgcctgatgttcttactgacatcactataacaatagttgcaatgaattaacaaaaaatgaagacgggtgccaagtctggcataagaaagctcaaagtatatttggattttaaagagacaacaagtgtgaaacaagccttgcaaagtgaacatgggaatcataccatgtctgatgaaatgtttattttaaagagcaacagaacatgagcatatgctatcttaccagaaggaagagaagccattggttacaagtgggtttatagaaaaaaagagaactctgatggcagcgtgtcaaagtttaaagctcgccttattacaaaaggattccatcaacaacttggatttgatttcactgaaacttttagtctagtggtcaaactagtcaccattagagttgtcatttccttagtaatgtcaagaggttgggatatcaagcaattggaatgtgtttcttaatggtgattttcaagaggaagtgtatatgcaacaactccgtgggtttgttcttcccacaaccctcatctagtgtgtaagctacacaaggccatatatggcctcaaa

SEQ ID NO: 26940 - DNA, 1076 bp, Cannabis sativa
gaatgtcacctcttgactagaaagttacacaattagagaggaatgaccaaggggaggcacttcttggctaggaacacaattgaagaggagtgtctaaggtcaaacacttctcggccatgatgccacatataggctgtggtatagctctcccaacaccccttgtggtccccacttagcataacttagtaattctcgagtaaagcgtgtcagcatgtcttgtgagccaatttttagatcgataacttcagaattgtgtaatgaacatacgacacacttaaatccgtcttgaaaatatctttaaaatacaagttgaaccaaatcatttagataaaaattgagagagttatgcctgttttattaaattgctataagtactttttagtttaaaatttgaccattgccacgccatagtggcagttctcagccattcatatttctagagccttctgggtatgttttgacttatttttttatggagaaccatattttgttggtttcgggtcttgaaacctcatcttgacatctgaaaccctaactggagactactgccaccaatcagcaccaaaaaatggcagtggtcggtcagggcttgtgagaagcactggatggtgtttcttgcttattttagtcatatagatgctagaaaaacactttgactactttagttcttggccaattggtgggaaagacctttgccatctttttggtaccttttaggcctaaaaaggtggcagtggtcggtcagggtttttttttacacttttctcacttaatttttatcccttgaagttggaaatatactttggccaaagagatccctctccatttagtgtggccgaccactgtcactctttgggccaaagagatggcagttatcatccaagtggtttttataccacttggtagccttcttcacttagttttaatgtctttatgatgaaaaagtacttttgtcaaagaatctccttcccatttggtgtggccgacttgtgctacctttttgtgcacaaggatggcacaggtcagctaggcttgttcttgagtaaaaaatattttttttttcacgtgtgccatac

SEQ ID NO: 26941 - DNA, 1864 bp, Cannabis sativa
ccaaagttttaataaaaccaataataattaatgtaagccaaaataaaagtctaaagttctacagtctagtctagacttagcataccaaaacatcagtttatttgttggatagcttctgcaggtcgacttcaaatgaaggagaagttgttcaggttaggagtcacattggatgactcctaattgatttgtaatgcaagaatagaatcccattctcacctcttccttaactgccactacagtaaaagcattttaacagagattcttcattggactagtcttcgttctcatcaactaagacttgatggaatacttaaatggataagagaagcaagtacaacagatttagaagacaggtgtatgtaacagtgataaatgctactatgtaccatatttgggctgccataaatgaagttttatggaatcacaatgtacatatgatttttacagttataaatagcattaaatttaaaatgattgttattgatagaatttctcaaattaaaaaaaaaaacgaaaatttgtgttgttgatagagtttgatttgccaagtcttggcggataagagttttgtaatttgcctctttgtaggctctgttttgttgtgcaataaatctcatcttacataccaaaaaaaggaaaatggaaaaaacatcgataacacttaaatttcaaatttctttaattttgatacctctaactcttctttttcgaagcccaactaccagaaaattagaatttagatatcttttatacttgtcaaaacattattggtttttggtagcatgtgaaaaaatgccaacttttttcttttattccattccaaaaatttttatcatcctggtagggtcatttaatttgatgctatatctttattggtttctctgtagccaggccttatcccttcaagagaaattaaaaattaaaaggataaaaagaaactattttttgtattatttccactttaaataagtctcaaaagttttggctccccacttttctggtggttaaatagtttttcttttttgtcaagtttggagttcaataaaatagttaattacagaaaaacgattcaaaattatcactttctcttttattagttcataatttatacattactctcttcttgagtcacaacatatatatatttaattaaagaaatattctttacagttgaattttcccacccttcactattgtataacttttgtctctatcacatctttcccaaaactcatcaattggttactaatcacaatcttaattaaccatgattattaagattcttgatggatttcagatgcaacagttctagcccaaaacttgagatgtttcttcatgtcagcagctgcagtaactcttggaacccttagatttaaaagtggtgaacttggtttccttatgagccatgcttcagataaatatggcctaatcacatctctctctttatcttcttctccttgttcttgctcttgttcttgttgtgtttcttgctcttcttcaatttcattggcatgaactcgttctagtttatgagaagatctatagtacttgcttttgtacacttgttcaagcctttgtagaccaggtaatagattcaccattctaggacttacatgctctttcctgaatatgaaaccaagatccatgaacccttttagctcttctagctctagctcccccaagctcttgcaactcatcgatttttctagtaccattgcaattggactagggcatgattttctatttttagttgatggtgatgatgaatgagacctaagcatcatgagtctagaccctgctactaatcttgatcttgttggcctcttcttcttgttaatgagcttctcttcataatcatcatgat

SEQ ID NO: 26942 - DNA, 4393 bp, Cannabis sativa
ttcactagtgaattaacggtactaaaggataaagaagtaattagaagggccaaacggtaatttgaccaaaactaattatgaacctacacatggagggttaatcgctgaaattgataatattaatggacactacagtaaaaattagtaaatattattctataattaataagggttcaattttatatttacagtggagtatttatagcattaataaataggaatctttaattgataagatccaataaataatgtagtttattggagcttagaatcataggtccatgatccccgaatttccaccttgaaacactgtcaagggtaggaataaaagttgtatatagaagttcggaaaaatatattttgatttgtcaaaatagtaattatttatttttcaaatttatgaattaaattaggaaaaacaaaattatttggacaaaagaaaccaccaatgtcttgttacgacataggtggcgccactatcactgtgtcctgactgataggcgcccttgtaataggttgtccccactagattttttttaaagttaattagttaatcaattaaaaagataaatgtttatttaaatttgaatttaaaaggtagttatatatattttgttggtcgagatattctctcaaggtagttgagagatttcctcgatcagttataggaaaaaaatatatataacagattttggttatattaattattcaaataattaaatatgatttgaatttaaatacttttattggtttttatatgcacactaaattggtggaagtggtagaagccattctttttttagtaggactccatttcatatcacataagaaatcgatatcatgaggagttggaatggaccaattgtacagatgatagaagataaagaatgtcgataaaatttggtaactatttagatttatctgataagggcagactctaaagtaatcagctattgacacgaaccacgagtgaagaggcaagaatccacccgcgttcatgtgaaaccttgaccatgcactgcaacaagggtttcaagagccactgggacaccatgtccttggttttctaacaacagtctcaggaagcaattactcatctcgtatcagttcaacttggtgctaagtaacataactaaataaaagaagtcttagttcaaaggctcggtcctcgggtcttcactttcaatagcagcattgaataagtcagtggccataactttccaccgcaggccttgtctaggtatttggagttgggtaccatgagctttgcctaaatgaattgagcagtatctcggtcatattcttcaggttttcttgtatttcttctcacacgaggcctttctactctcaacttgacttttctcaatttagaacagctaaatatcagctccacttagctcaaaactactttttccaagcaaattaagagaaactgcaccttgcaggaagggaatagttccgctcaagcggcttaaatgaaaatcatattttttggctttcgaaggacttccaatagagtttaaggatttctaacaagatctaaaatccttaaattgagcttcatagaggaggaggagaagaaaaaagtttaaaaaaatcgattttttttagaaggaattacttgaaaaattgaagaacacttgaaggattgatgaagcaaaattcttaggctcttagtttcttctttaggtgtgtgaagcaatatgaaaagtgaatagaggagttatctatttataagctattgatctcctctattcctaagccaataagaagtggatttaaatttaaatttcaaaagaaaagatagagagaaatcacgttattttttttaatctttttctcatttctttttatctttaaactttgaattttcttgttccaaagggaataggattttgaaattcctagtcttactagaagacatcgaacaacagaattaattgttcaaaattgcaaaattgttgcccacctggtagttttgagagaaatgagcttagttcacgtcatcaagttaacttcgcagaagtgtaaagttgactttgggggcaaatatttaccaaaaaataaaccctactgacgtggacatcaatatttgacgtgtggtaagaaaaataacaactcagagttgagtagtcttgagtcatggcagtcgacttgggaggggtccctagccctgcgcccaggttaactacgagaacttcagaatgggtgtatggatcctactaagttgtttccaatcactatcttttatattgttgtaccatgaagacataaagaattcaaatcataagtttggaagttgagaatatacgaatcaacagcctagaattcaacccgggtgcctagcccccatgttgacaaccctattagagttttgtgtttgggtccgtcttagtgataatgagtcaaaatttgtactaggacatgaattagacttgtcacgaacatatttgaggcaaataaattagaatcaaagcactttcaattttgagcacctagagcaccaggtgccccaggcacccagcgcctaggttgacatattgtcaacctagggcacttccaaccacaatactaaaaaaatctcaagcattttcttcgtcttcatccaaaactaggaaccaagtgctttcaggagagaaatagataaatctagaggtcaaatagggacccaacgcccaggttggccttagcactggacccaacgctcaggttggccttagcgctggacccaacacccaggttgatactttgtcaacttgggccacttcctttagcagtttagatgaagtcttccaagaatattctctattttcatcaacaattaagagtttagtgctttcgggaaacaaatagagatgtttgggggtcagaagtcttctacgcatattctttggttttatcaaagattaagatacaagtattttggggaatcaaacagattcatttggtggccggaaattaaacccagtgcccaggttgacacctggcactgggccaacgccctggttcatattttgtcaacctaggttgtttccaatcattttcaagaaaaagtgtgctagagattttttccatcatcagaaataatgatgatacaagtgatatcggggagcaaagagatttccagggagcctaaacagggccttagcgccctggttcacaggctgacatgcaacctggttcacatgttttcgcttctcaaacacaatttctactccttgaattcttcttaaaatggtcaaaagtaggggaggagacatcgttcacaatcttgaatgccatagaagtatcaaaatgggccccgggaagcactcatcgcctaggttggcacatgacctggtacgctgtggtctacttatcacaattcaattcagtttcaagtattcgactattttttttgtagtaaatgagagctacagattgtgacaggtcaaattcatactttggtattttacccttttcaacaagctgggatattagcaaaatcagggagtttcaagtcttcccaatttcacaaaatagcgacatctctaagaactggtgaacaacttcaccaggacattgaaacttactaagtggtgtcaacacatcacttatgcatcaaaaaataaaagtcttggacgtttttacactcactcaacattcaggttgacgtcagaatgtcaacttgggcgatgggttgtcaaccttggcgctaggttgtcaacctggtcgtagggtgatgaacaatcttctgtaaaacgaccataactcactcaatattgatctgattgacgtgatttaacttgtattttgaacctatttcaaagatctatcaagtcaaatctcatagatacattgtaattctgaagatttaaggtcaataattcgtcctcaatagagttgtgatttttccagtagataacgtgaaaacagttcgactaatgagattcaaagttcaaaaattgacgattttcaccaagagtcaattttcaccattggatcatcatgagtcatcatcaatggtcaagatcatcccaaactattttttttcttcatattttttttgtatgtcttaataattatttaataggatctccttccatataaaaggagagctcttctaactcatttttaaggtcaaagaatctctctctacttttttttctctagaatttcgagcctcacacttagccaattctttgtaattcttgtgagaaataaaaactcgaagtagatgttgctcgattatcattgcatcacggggagtaaaatactataaatttgttatttctctcttacttatacttaactcttattacattcttgccaatctagttagcaggtgtggccagatatctgtgcccaaatttcttcgtcaacaacaacttaacaagttataaaaaacacacta

SEQ ID NO: 26943 - DNA, 3446 bp, Cannabis sativa
  modified_base (171)..(179): a, c, t, g, unknown or other
  modified_base (256)..(279): a, c, t, g, unknown or other
  modified_base (3408)..(3420): a, c, t, g, unknown or other
ctaaaaattattatattaaacaatgtgggacccgatacttagttggaccgataacgatactaacacataagagggtgttaggtaccactgataccctttagtatttctctataaaaaattactacttttaataataattttttaatcattttttagtcacaatataaattnnnnnnnnntaaatgtgacttttagtcacaactaaaagttacttgtgactaaaacatagtaatgttacaagttgtcactaatttannnnnnnnnnnnnnnnnnnnnnnnactaaaaatacatttagttacaacaaagtgtaatttttgtaactacaatacttttagtcacggaccttttagtcacaacgcactctctgcactctctaaaaaggattcactgatgcatccctatctgtttcggcttttaaaaaaaaaaatctattttcttttcataagcatgtacattatatatagttatttataatatcttgcaaaattttaaaaaactcgaaataatttacaatatagaaagtaatgtatattattttagttatttaaaataaaagagtcatgtgtgcaacaaactatttgaaccctattttcgtcgtgttaaatatttttgagtttctcaaaattttacagaatgtcctaaataactgcaacgtacatgaccatgaaaaaaattgaactaaaaaattctctcaaatgtcgaaatagataaatgtggatctgtaatgaccacatatttaaacatggaaatcagtcactcattagtgatttaattattatttatgttatatatgtgcattagtataaaataagaattattatcaaaaagtagacatttgccatatactttctcatttatgaagattttattatattctaagtgtgtcatgcatgttaattatgaattttaacattcatgttttatgtccgataatattagaatttaaagatttggtcatagagtcacttagatacggtttagtatcttaggattagtggggcaagacttttgaaaatttaatatgtcaggatattgtgcgagtaaaagggggtttgactattttatccttaatttttaaagattgttgaacaagaaagtaagggcatttgggtatttagccttaagttgagtttgtctttttccttttagtgggatttttagaggggtgaattaatgtaattttgagctgatctttattaattaaagaaaggaattaaattagataaacattagaaaccaaaagcactttctctctccataatctctctctatccaacctcacctagaacccaaagaaccaaacttaattttcaccaatgtcttgaagatttacagcaaggagtgaagagtattttgtctaggaagatcaaggtaagttctagctcttgttcttctttaaggttgtagcttggatttagtttgagtttggtgtgattgattctttaagggtttgaattgtttagaagttattttgggagtttgacttaggttttttgttgttgtatttgttggattttgactgctgtggtgtgagttgagtgagcttgagttttgaagttcaaatcttgctcaataatacttttgattccagagctttgatgttatgtggattggatgaattatacttatattggtgtaaatatgtattttgaaaggtctggtaagttttagggtagaattgaagtagtaaagtcgagttatgggtatgattatcaactatgaacattatgaaaaattaaatgcgcaacaaaatgggagatcaatggttgaatgatagtttgacagtatatctcaaaaatgatgtattcaatgttattgacaacgagcttatcattcatcattttcaaaacatgaaaactcgtcaaggacaacttttaagatatgagtttaaaaattgatatattttgttaagattttaagatattgagtgtgttatatattttaaacatcgttttagattattttttttttctattgaaaaatttttagtgtttgatatttaatatcttttttagttgagaattgatatattgaattgtgtttttccttatatttacttattttttttggaatatttttacatatgaaaaaaatttacgcctacacactacgattaaatcatgggtccgctactggtggtggtgtatcaatctctgaagatttcagcttcttccgctcgctgttctaggatatgtgcaagcttcgaagtctgactacgcaaactatcctgagtaggttgtccatcactaccaacaaccaattcctccatatctataaatagaggcacctcacctccaatgacgttgctcaaaaactctgcttttagaccgcaaacataaaatcagagcacactgtcaactgcaaataagaacaaaaagattattaaacttagattaaaatgaaacaaataaataaatgtgaacaagtacaatgaattaaaaaacttacgttttttgcaaacaatccaatgagttcatccttgctgagtgacacctccttactctcccagtacaccattctaggaaaacaatgtaattttctgattgcaaatttcttagcaagctctaggatggactcataagtccaatactgcaatgctatattatattcataggccgagtactttgaatccttttgagtcgttccctttttaatcttcttatccatatgcttcttcttttctacgaagcccttactccaagtttctttcaatcttcaacaagttgaaagaaatcttcccccatgggtactcgtagaaaaaaggaaagtcgtcagccattctcatgataaatggcaaaactaaagtcttctcctctttcccagtcagaacacccatcacaaacaacaccatacacaacttgtaaacatcatcattctcaatgcaactctaaaagacgttgcacagtcgaccaatgctgatggatggatccccattgaagtattctactatcatgatggtctatcattgccttctcttcaacctaaaactcagtaggtccacataacatgttaagcctagtcaccagggaaaacacaactcgggcgaatcggcatctcttccttgcaatgtaaaaatgtactttgtcatccttatctgatttgatcgtatgcatgaataattgatggataagtgcacccgaaaatgctaatggctctctctcaaaaaaatgcttgaaaggggattcctccttcacccttttcaacaactgcatttccataaattttgttttcacttttggataataccaactaccgccctgccaagtcacacgaccagtataatgttctgacactgaaagtaaaaggcgtggaactttggaagactgcaaaaaaatacaaaaaaattgtgcataaacatcagactacaatcagtccatgtatcgaatgttggaattattttaccaggnnnnnnnnnnnnnaccaagtatgtttgattaacatccta

SEQ ID NO: 26944 - DNA, 1281 bp, Cannabis sativa
gctgacgtggcacatcggtatatgcgcaaaaaaatttgttgaaggtatttttataaataaaatcagtttttggtataatattaaaaagacccctttatttattgatagttaaatattatgaaaattatatttttaactttttttttttttgttaaatttacagtttagtttgtttcagtagtttcttcgataatttctataggaattttgattgcgatttaagttactccattaattgttaatttttgttatcggtatttttttttacgtttgcatgtataaaatctcactattcatcttttcgtttgatattatatttaggaaaaaatgaaggagtcttaaatgaacttttggtggcagttcatttttcaaactctctactccagaaaagacattcactactagttgttcgctgtgattttagtgacgcgacccatcataggtgaaaaagagtaaaagactacacaaattggatcttggcaaatattccaaagcggggttagagctctcttggtaatgcgcagagaggagtcacactagtagccccctcctttatatttatcaaaaaaaaaaattactctactaatatagtgagagggtattttttattttcaaaaattgtaaaacttaactattttgaattcttttttcagtacttgtaaaattatctaatttaatttcctacctaagcaaaaaactaaactttacaaaatttatttagatttctatctttaatttcctacctaatttaattgtaaaatttagttctcccaacttttgcacatttttttggtttgttgtaacatgcaacacaatctgtttttgggaaatacttatatgatatccaacccattttcttttgtaaagtgaaaaacatggaatgtaatactacaacaacttaacaaattggaaattgaatcctcccctaaattgagaaatgtttgtgtgctaattataaataaataaataaaaagtaagcaaagagcgaatttaataggtcttgtttggagcattgcttccggtggtgctatttagaggtgacgtcttgcaattgattaacgatattttataaaaattattacattaagttatgtttgactcaatatttaatgctactaataacaatatgacatatttgaaaatgctaagtattattaatgtcttttagcatattactattcaaagtgagcatttctctttctttgatatattttcatagctaaagtattactaaataaaatataaccacacgcaaagagcgatttgtctaatttattaaat

SEQ ID NO: 26945 - DNA, 1979 bp, Cannabis sativa
tttggaacttagaaatatgaacataaaactatctctttaagtgtaccataatgtagccacgtttcatcagtagagcccagtagataaaaaaaatacgagcgaaaattctaagtaaagcagctggttgagataagaaactcactgtaacctgtctgctgcatcatatatacccattgtttctgtacttgtatcatcaatttgcagaataatatccccagacgaaatgccagctttgtttgcaggacccccaggaacagctgatattacaacaagcccaggaggggatccatcaaattttgtagggtagccaatggacagcccaacacctgtaacagaaccttgtgatccagactgccttcaaagaagatataggcagattttagggatattacttctagagaatctaatgagatagaaaattatttgatattgctaattacatagatggtaaataaaggctttatctcacccaaacaaatgtacaacatacctgataaacagaatattacaagttcaaacagcataatacctgcaaactcttaaacttttccggctccaaaaatcgagtgaaaggatcattaagtgtggcaagcatcttctttattgccatatctgaattcaaataccaaatcaggaaatagagcatcaatataatggtaaatgtccactaggtatctgttcaaaaactactaaaaaggaatcatgttgatgaacagctatgtaaagatcaaaacataaagtttacatcactgacaaagataaagagaaaaaaaatacatgtttcctctcgtgtgttcatcggttcacttctaagtgcattttctctgtatcgaaaccaactttgtccattaaaagatttgtcaacatatgcccggtctattgttctccatgcctccaagaagagaagattctcctcagttagagcccctgcagaatctgaaaagaaaatgctggaaccattatgattggcaagccttgttgattaaatcatcaaacaaaaatgaattaaaataaacttacaggatggactcttgctaatagcaaccgaaagtgacataaccaacatcactccaacaactactcggacaaaaggaatgtagaattgtggtgtattttcttccaaacagttaatcttttcatggacactactataatactttttccatttaggtatccatctacagcttaaagaatacaaaccaaacttaaaagaaaaacttttactgagactccacaatggctgaagcaaaaaattttgtttgaaagctccttcatcattatcaccaccagtactaattcttgatttaacactacaatttgtccttatgcacctcaaggaacattgcaattcaattttcacaatttttgtaccattaaatttccatggaattacctgcaaaatagcacacaataatttcaaatcttgtcttcatattccaagatcaatatcatattaatcaccaaattggtcaccagttgaactaacttaagctaaaaatctctcatatttactcactacattatcaaattgctcgtcaaaatcattatatatacatttataaatgaaatcaacaacgagaacgataaggagactcagaaactagattcttagctttctacattctcattcgaatattaatatggatttgatacgtacgtatatctagagagagagagagagaaacctgagaggcgtggttgttgaagagcggagaaagggagaagtgagaagacgaagctgcgatcgccgaggtcgcgaggacctccattggaagagctcagctatcaattttatttattttttatttaaaatatttatattttgattatcgttttttttaaaaggacggtacagaatccacgcgccttatatcttatctctttgctgggaatattcaattaaatttattaatttatctgatttaaattatttattattattttttctacaaattatttcaaaaaaattataaaaatat

SEQ ID NO: 26946 - DNA, 2798 bp, Cannabis sativa
aaaacgatgttcaaaatatataacatactcaatattctaaaatttttttgcaaatatatcaatttttgagctatatctttggagttgtccttgacgagtttttatgttttgaaaacgatgaataataagctcgttgtcaatagcattgaatacattctttttgagatataagtaaaactatcattcaactattgatctcccattttactgcgcatttgtggtgggcaattaaaataattaaaatattttttttaattaaaaagtaaaagaaatattctttttcagcatggacttaagcccacactgaccttcattgggtcggccaatgcctctgaaattgtagctagacaaatacatgcatgcatgcaagtaattcacgcatagagagaggagaatagatgatcgattcaattgaagcttataagaaattcatgttttataaacagtaatgtgatttcttcaataagaaaataaataataatgcagttacaaaattacattatacataaagacggattttttttttttttttttgcatttttacataaatcaaaaatttgaaaaatttataaaaatacatcaaacatacagaaattttttcatttttacttgttgattttttttatttacaaaaatacctcttcagtataaaaataactgtttttttttagttattgtataatttatttatagttgtattatagttttcatgagattttttttttgttgttttatagttaatttataattatcgtgaggttgatttcacgatattttttagttatattttgttttttactttttgctgaataaagtgtatttttgtaacttttaaactttaaaagagtatttttataattaaaattttaagccataaaattataaataaaaaaaaggtatttttgaaaacttcctaatttacataacatcgatggagtgatcagtgcctagcatgtggaacatcgttattatttcaacttaattgctaattatttattatatgaggtctggaaccaacacgttcatgtggctctaaatgttcttaaaaaaagtaatcactaaattaggacaccaacaccaagtaaagtaaactactatataattgttcattcaaattaaaacaactcccctttcaaaaaaaaaaaaaaaaaaccattatctatacagcttcaatttatgagtcttcaaccatatacacatatatcatcttcgatcttcatcacatggccgcgtgtaatgtaacaaaacgaatcaatatttttcatttaatttttgatgaatcaggtaagtaggtaagtgtattaatcactaaaagatcgtagttaaaacctatatctaatgccaatgaggtctgtgttcttctaaaatgataatttgtttttttataaatagagtatgaattgtatattttttagatgaagatcatacgctacaaaatagcacaaaacataaactaccacatgagcttatcacactgcaatagagagccgaaagggaaacttattccctctccaactgtttcgcctaaagttactaaatttgaaacaacactatttaccaaacattttatggccccttttggtaaatttttggcatatgatgttttaacttcttaataatatcttttttgttaagttagaaattctcaattaataatctagcttctatagaaaatgcctaagaacactcacaatatttaagttattgttgtccttggagtaatttagacaaccaaaactaccagtaatctcttagattagagagtactattattaaaaaataaaaaaaatttagtcacgactttttaatcacaataaaaatagtttgtgattaaatgtattttttgtcacaatttatgataaataatattttagtcacaataattaattatgataatctttaaatttttaaattttataacttgttagagactacaactagttgttgtgattaaaaatacattttgttcaattaaaaaaaattgtaactaaaaaatgtgactaattactatttagttactaataatttttttgtgttgcgacaagcgactgccttttaccacaactgtttattctttgcactgtttataatggctaatgtttaccagtcctcaccaccggagttttctccgccgtttcttgttggtatgtaatctcctctctagctttctctaacccacttggctaatagattagggtcacactataacctccaattttctctggtatggattcatgtttggaagagaatcaactcgaaaagagctcagtgatgtgattgaaagtcttcgctatggagacccagacccaagtcctcctccgccatattcttgattctatcgtaaaaacgaacgaatgaactctctcgcttgatcttacccctttcattgattcagaattggactagttttttctgttcagtgagtttgaattttagtttataaaatttgtatatttagggattttgaatgagttccaagtgtgagtaaaagagaggtattggaattgaaacacttcatctcaccttgtttcatacatgaaatctcttcaatataattgtgttttggtctctttcattttgaattcaattacaattattttcgctcactctcacactcacactcactcacaggtacagatttgattttatttgctttgatgttgtaattgtattggatttgttattctgaaattatttttcttgccatggatggaaactttgtcttctctcctttttttttttttttttgaaaataaaattatcattttattaaacgattaattcagttaccaaacaag

SEQ ID NO: 26947 - DNA, 2475 bp, Cannabis sativa
tttttttttttttttttgatgattggagcctcatagagccaccaagaagagaacaaacaccaaaaaactacatcagaacagaacaaacataagaaataaacaccgaaaactacaacagaacagcaacacgaactaaaccataaaactacaccagcaaaggggccaaaaaaaatgctacactacaccagaaaaagaggcacagccatctgctactccaacgagcagggagctgtcaaaattggccaaatcaaacaacccgaaattgttgttacgatttgcccattgcgccacaacatgggccacaccattgcacaatcttgaaatccaaacggcctcacaaaggttaagattgccaattgaagaaagaaagttgtgattggatctcatggcgcttcctcttcactgcgaacaccgcattcgttgaatcacattcttatagtctagcttactcgccatctttgctccataacgagccacaatttcccctgccaaaggatcatggtaaccaattcgaaaagtatatatttttatgatagcaccatcctcatttttaaacaccgctgcccccgctgtgtgagactcccctactgcaacatcagtgttgcacattagccaccctgcagtaggcgggagccagttgggttgaatagaaccagctggttgatggactttagcaagttcatcaagtctacgattgatgtgagtgagtataaccgcgaggggagttgaatttctgccatgaactaggctgtttctctctttccatatactctcaaaaaccccagcaggccccaataatatgtggtaatgaacacggccgggccgattatcttccatgacaaaccaattcaaccaactatcccaattaggacaattagcctcacttgttctcacattccatgagcagccgaaccaaatagcccttgcaaaagaacattcccgaaacaaattaagagagctttccaatgccaaagagcaaagagggcaatggtagtcgggtatggggaggaaggatcttaatttctccctcgtaagaaggcagttggaaagatttttccaccaaaacatcttgagtcttttatgaattttagctccccatactgttctccactttctctcgattgtagctctatttcttaaatttcttataactctgtaagctgatttaatagagaagacaccattggattccgaaagccaaagccatgagtccttagagggccggttaggaagggtgatattaagtattctcttagcatcatcatcataaaaccagtgtcttatcaactcctcattccattggttttgagagatgaagttgctaaccagactcatccctaccgatacttcagaacgaggttgaaggttatttccagggacccaagggtcaaaccaaatggaggtggaatttccattaccaattttgcgacaaaggcccttagtgaggtagctgcgagaatgaaggattgccttccaaatgagtgagtctgaatatttttcttccatgtcaaggaaattttgatctttaatatactttgcttccataagatcactccacatgctatatttatccatcagaattttccatgccctttcataaggaaagccttgttgatgtccttcgtagagcgaaattctagacccccatgcactttaggatggcacaacctctcccacgcaactgtgtgtaccattctcttgtcatcattatcgccccactagaaatcttgtagaactttgtcaagtttgttagctgtcgaggtaggaatgacatcagaggatgcaacattgtttgataaagttgtacccacgaccttaaccagacaagttttccctgcatttgacagtaacttggccttccacccttggactcgcttaagaacacgatccacaatatcttgggtatcctctgtttcttttgatggatctaaaaaaaggtagtcctaggtaggtggccttcccgatcattctttttatccccaagaactgtgatatagtttgcgctttcctactggacactcatttggataagaaaactgaggatatttgaatgtttacaaattgcccagaccggctgcaataagtattaagaaaatctaggaatgatctagcttctcgcaaagttgcctacccgaatacgattatgtcgtcagtaaacattaggtgggcctttgattaatcccttgtgttccttgttaatgagaaggcaggatagtatttcagaagccatgatgaatagcgaaggagataagggatctccttgtctcaaccctcgttgcagtttaaatttcctcgcaatggatccgtttaaaagaagtttaatttcttccaccaaaatctaagcccttatccactaagtaaaagtactagagaaactgagttgatgaagcactaagatgatgaattcccactccattttgtcataggctttctccatatcaagtttgattaacatgaagcctctcttaccttttc

SEQ ID NO: 26948 - DNA, 5461 bp, Cannabis sativa
  modified_base (4708)..(4709): a, c, t, g, unknown or other
attcattccttgatcaaactgcccgttgaactgtattgcatccatttctttaaattttaaaaattcaatcatggtcagtcaacaatgaaaaaactataaaaaaaattgatcccgatcaaggtattgaaaataatacatatgttgttaggaatctattttacaaccttaaacacttaatataaataaacttaccacaatagagttttctctatatgagtcgtgtattgtcaattttaaactctaattttttacataataatatttcagtatcacaattattaggtaactcataaacaacgtacgtgcaactatttatgaacaatgtgcttggacatcgttaagaaaaaaaattaacaaagtattaatgcattgatgaacaatgagttgtagtttaagaatattttgtgaaaaaacaactgtaagaacactataaactaatgtgaactcaaacaatgttaaaatatgaacaaactgaccaattagaattattttttatgataaacttgtattgtattttctacataaaatacttgcaaataagagtaaaaatagtgtaaccttcttagtgtgtcattattaatatatcaattattagagcgtcaataaaaatgatagctaactgtaatgcaactacatagaaataaaaaatcaaaataatattgtcagatctatgacgcgagatgaatgcaagtttagtttattgtctcgatttgttgaataatttcaagattaaaattcaagaaaataatgttaatacaacaattagaatattagctactctagtgatatatattttttaggttatacttgatttagattgatcagaaactcgagatctatttgttacaggtctacatcttctgaatctgtatattaaattaaggaggaattagttttatagaatttaaattattttacaggattgagtttatgtttcaaactagttttttttctattgaatcgttcatcaataggtattggttgattttcggtttgttagttttcttcttctcaggttgattcacaaaattaatggtgtttctttgtctatctgcgttgcttcatttttgtcgagctccttccatcgcggttggctttgtttctcagatgcaattctggtgcagcttcaattgtaaaggaagaggttgttttttttttttggattgtataaatatttatatggccaacccatagtatttttgtaatattgttacccttgggctataatagaaaaaaattctttaatttttatatatatgtgtgggatcataggggacaacttttagagttgtcaactattagagtacttttagcggaaaaaaaaatatcaaattttatgtggatgagaataaaaaaaaataaaagaaagtaatattttgagatgatgagtgtacatttaacaactatagatgatgcctcccattgaagatgctctaagtgcaccaatgcacttattcgagtttttgacatggggataattttaattttaattttttagatgatcttgtacaacttagttatttaagatattcggtagaattttgaaattttttaaaaagttttaaaaaatttaacgcgtcaaaataaggttcaaactatatattgtacgcgtgtctcttttattttatacgagtgtaaaatatatatttgaattttactctctaaattgtaaattattttacatttctcaaaactttgtaagatgacttaagtagatatattgcgaactgtgatctaaaaaattattattgaaactatttgaatattcaaaacacaaaaattgtgcactggtgtaccactattttggagtgcaatatagaagcacccttaaaaatatttttttttaataaataaatatgattaataaaaatattaattatacatatatgttttatgaataaaaagataattatgtgagaaatactaacacattattaatgtctaatattaccacaaggtgtcttacatacattaagtgcaattaagtatatcaaatcttatttattttaatttaataattatatataaaatatcactaaccatttatgtattatagtgttagacaacattaattaatgagcttttttataaataagcataaaaagctcatttacaatatttatatgtatacacaaatttttcaatatttatacagtctaactttctagcatataaatataaaacatacttgtagaactctctaccctcttcgactcattcataccgtgaaatccaaaataatagaagccattgttactattatctgtatttttggatagaagacacgtgtaattcaaagatggttcaattcagctacaacatacccaattataggcccaaccaagataatggacctgatccatagagaggacaagccatctggatgatggatagatgtctcgtccaggcgagataagcatccagcacgacaactcttcaaatagcatcaagcagtgcttctaggagagtggttaataaacatccgagtatctagctttgtatctcactcatttattactaaaccctacaatatctggaatttatttccaagatcatgtccgaaaatcaaatagtccaattaaggaaatgaactagtcaccaatcaagcatttatgtgtctttattatccacaatagtaggtatcaacatgatatggcatccacatcattagaaaaacaatatctcatgggtcaggcttcactagatgaacccaaagtcaatatgttttttgtatttacttcatcagtgggcaaggttttacgtactagaattctagctctataaatataagaaaactcactcatgcaaagggttatatatgaatacgggagagcaaattcttgagtttagagtcttggcaaaacacttatgtaaatcaaataggcttttctaaccatataataatattaactcgtggactagaggtctttaatccttgaacctcataaaaactctgctctcactcttcatttttgatctatttcgttagctttattatattttatatcggcttgcaaaagtctcgataaatattttgatactttcattaagagctaaagaaataatggataccatagttttacactacaataatggtagccatgagaacccctgtcgaaaacctggtgctcgtaatggggacactcccatggatgacgtgatcctcttacagtacatgtgaaagcatatgttgtaggagatacatcaaaagtgactaatcatcttatcaagaaaaatcaacataatgagaagtatgttgatgagaatcccatcgatgaagatggtgaattaaaagatcaagatgataatcatgacgacaaagatcctgaaggtaatggtgacaataaggaagacgaaggttattactacgagctaggtctcgaagttattcgaatggccaaaaaacttgctaaaaataaaaagaaattggcaaatcaggaaggaattctcgtcaaacacaagaaacttcagacaagttggcggccaaaattgaatcagggaacgtggctcctgatgaaaatattcttgatgaacccactcctcgggaaaataacaccatgaagaaagaaaacgctaaagatcctagaacttctgatcccacaagggacaaaggaaaaggtgttataagggaacctagaaaaaagactgctccaactgctccatggaacaacatgaatcttgttaaccaacctttgcagaaaagaaggcagctaatgctccagagaaaagttagccaattgatccacgaggcagagttgcgaggggcgataggcctggtactcagatacaaaggcctactgtatgaggatagaaaaattgccttgtaattctattcactagagtgatggagtagacaaagttcacccaattatagaagatagtatgtcaacacggacctctaggaatgcttgaatgcaaagaaagattgaaccagaggcaagaaggcaataccttgtggaaatgacctcaaaaatcacatccatgatagagtttctgggtgcaagttccaggacgataacactaggcatttggaagaccaaatagctaaattaaccaagttaacaaagcgtctttcccagaagcaatgtggggtcgtatttgatttggaagaagaagattcataaccatctgtaaaaagaataatagaggcacccttcctaaaacactttagaattccttaaatagaattatatgaaggcaagacggaccttaaggcccacctatctaaatatattcgatttattatgcaagtagcgaaggcaagtgacagtgcaaaatgcctctattttttattaactttatcaaagtctaccgaagattggtagaagagactatctattagggtttatgctctaaaagcaagtattaaattgataatatatattacaaaatatatgaaataaaaatataagataaatgaatatgttaattataaatatctaaaaatttcatattcatatagagtgggtatatgatcttgtaaggaagtacaagaaaaataagatcatacaatatgaataaaaaaaattggtagtgtattaaattatggaaatctttaatatagaattatcaagtacaatttactaagcactatactctagtgtgtgtgattttaattcagatcacatatgtggatagatatttagtaaaggtaatatgtataatttgattatgcatgagttaaccaatatgaactaacatcttttannaacgtgtcgtttatcataaaagagttattcatatcataacgatgatcattagtagatctgtctgaatcttgagtattcatgaacttctatttttgttcactaagttctttgatttactcattaaagcatggtgggcccataacccacaggttccaagatcaaaacctggctctaggtaaagttattgctgaatggtagtgagtttggagctggatgaaaattgtacatatcaagacaggacctagagtgttagatcttcgtgacatctagggctcacaattttgtagtcgttgtgcgacatcttttgattttgtacagttgaaaaatgtaaatacaggatcctacattttataaatgtaatgcattttatgtttatttattaaagttcaaattttatcacttttttgataaaccctttaattagcaaaggttacataataaatatgaaaagtaatgtagcacacctaaactagtagggtgttacaactttggtatcaaaacaaccaagttgactaccgaagaccatcaagagatgtacaatcaccattagagataatcttgattctcaattcaataagcctttacatgttttagtatcttattataattagaaaagcatggtagaaatatgttagtgatatattaattgattgtgtgcgtgtctaagatcccatgtatgcggtcttaagtttattatgttgaccactgcctgattaaactaacttataggttcgtaggctagtatcatatcg

SEQ ID NO: 26949 - DNA, 2336 bp, Cannabis sativa
  modified_base (1768)..(1770): a, c, t, g, unknown or other
tagtaatggttaacatgttcataaggaagctcttttttattttttcttttcgctatactatgttttaagtggctgcataaaatgcttgagtcctttgtttttctgcttacaatggatttttccagacccttgttctgcttaaaccttttcctttgggtacttttgataaatgtataattagtttaataatctattgtttggctgttctttactgactcaactcaacatatataaatttggtgcaacttttgcaagcaggaaaagggtcgaccgctaccaaaattcggtgaatgggatgtcaacgatcctgcttcagccgagggatttactgtaatctttaacaaggctagagatgaaaagaagacaggtggcaaacctgaatcaccgggaaagaccgattctaatatcaagccagcagcagatcctgccaagcctcctcagtctgtaagttgttgttgctgttcttaatggcttattattatttgcttagtgattttatcttcttttattaatggcatggtaggtggcaagcaacaaccttagttgcccattagtaaatgttggtttttctgtaaaagtgggaagcttttccatttttagtgactctagtatgatgggcaattattatagccctcaaatgcaagattttgactctagtactattaatcagtaacatgtcaaatttcgggccaccttctgtttattgattggcttatcttcctaaacatagatctcaaattaggtgcaagttcgagattgctgtgatactctcttgataatatagtaagtgcagagttcaggatcttctgagtgtccgaaattaaaggcgagcaaaataagtgcctggacactctgtactcactatatcaagaggccatcatggtgatttcgggctcgaacagttgggctaatatttggccttctgtgatgaaattttgttccaacacatcattataacagatttcattcatttatatatcatatgatctttatactctcatcatcttgtttggtacataactcatttttctatttgtttcttttaacaaaactgtgattaaccgaaatctcaagtgctctcccaagtaaaactaactgtctcatcaaaacatcttcgtgatctaattattgttacccttttgtttttttggtcccattgaattgatatttcagaaaaaatggttttgctgcattcaagatccacctgcagaatcctgaaaagaaaaaaaggttttctttcttcttcttcttttacttctctccaagaagcttcttccacaaaagagcaatattgtttatttacaagttgttccactagatttttacatacaaacaagataggagctctagatcttgagttggattatggggtctggaattaatttatctttctgtgttgtaaaattagagttgtgagtgagtgagtggagataagaaaaagaaaagaaaacaacaataacacttgctgtatctatataaatatactgtcttatgtggtgattatattggatgcaaagtctttttttctctttttacctctcaatgtgttataatctttatcttcatatatttcctttttactttcttttcctattcttttttttaataattaaaatatgtatataaatggtattttctaaaatatcattttggaccttatgttttgtaaaagttactaattggacttctgttttgtcgaatgatagaataaactttgtattttctaaaattgtacaaataggaccttaaactaattttttgtcaaaannnaatttaataataatctgatctatagatgttatgataaaactggttacattttatgtcactattctagttaaaaattgtcttaaagttgtttatatcaaaaaacaaaattgtcgaaaattgagtttagggtcttatttttaccattttgaaaaatatagagtttattttgtcatttaataaaatagatggtttaattggtaatttttgtaaaatagaggatcaatttactcatacatttagtgctaaattttgttttgttttgtatactattttatgtcaaaaatagaatgataagtgtgttaaaaaagttaatgactttttttttttatatataatgtgtttagctattccttagaaaattgtagttatatgaaacatgtaataattataagtgaaaattttattcaaaattcaaatttaacaaagggcaagggggaatattttagtgttaaaaaaagctattttgttttatatgttaataaaaatattttgattgaaaaaagaaagaatatatttaggtttaatgagtgctcatatttgtgattaagcttacaaatttatcattt

SEQ ID NO: 26950 - DNA, 1595 bp, Cannabis sativa
  modified_base (1304)..(1305): a, c, t, g, unknown or other
gtggatcactagatatcaagacaaattctttatgcaaaaccattaccttacatttatatggctgagtttaccatggaataagaaatgttcaattttatagtatcaaaagaacattaatagtttcctacatattttttaaaataaagtacgtctagtaatatttcaataaagataaagtactcaataaatattagttgcaaataaatattacatatttaatttaaattacatattactagaataatattaacacattagttcattttttaagtcgaagagacacattagatcatatttaataatatggacaatttagcaaaataaataattaatattatgtgacacatttttgtgatccaatcatatttgtgaattaactaaaaatataagcaaaacatttaatttttataaaaaacataaagtaacattagacaaataaataagtaaaaactttaacttaataatttaatatgtatctatctaactatatctatttatatatttatataaaaaagaaatatagagcggtaacataacgccttctataaattctattctaatttatcttaatttttaattttttacatttttatttactttttaaaagttattaatttcacttttttgtgagttattttgaaaaaaaaaatctcaaattatttaaaattgaatgtactagaacacttaaaagactatttataggtcactatttttttcacttattattacatgaattttgtatgtgtaattgatgattcttgtttaaatactttttagaaaaatataacacatattcttgcatttttaaatttgttaaaacttcaaaatatccttaattatttttaataaattgaaatattttactaaattttagttattttagtttttaagttatatattttatttaataaatatttaaaattcttagtaatgttttaaatatatattttctatataaggaggggacatgtgccttttaggaattctattccaattgatttttattctcattttataattttttatttactttttaaaattttattgatttcactatttagtgagttaatttgaaaagaaaattctatattgtttagaaatgaatgtggtataacacttagggctcgtttggaacggcgtattaggtcgtactgtattttattgtattatattaaattggattatacatcatatttttatataatactatattaaaatttaatttatactaaaatattatatatttaagtgcccataagagttaataccatatatagttttatataaaaatattgtataaaatnnaattcaatataatacaatacattataatatggtgtaatacgacataccaaacgaactcttagagactatttgtagatcactatttctttcactttgatttgtgcaaaattaatattacatagtttttgtatatgtagttgatgattcttgcttaattagttataattttttaaataaatttaacacatattcttaatttttttcaagttttttcaaaactttaaaattcatttaattatttttaacaaacagaaatattttattgaatttaggttactttacttttctaa

SEQ ID NO: 26951 - DNA, 3779 bp, Cannabis sativa
  modified_base (948)..(950): a, c, t, g, unknown or other
accactttacaaaatgccacctccataatttacattcttccttactaccaaaattatttgttatttatttatttgaataaattatggaattttattaatgacaattagttaaaataatggtctgcaattcaattggaatatctcatcggttaaagacatggccaagattagaattagaaaaacaaatcaaataatcagtctcctaattctcacagattgtctgacaaaaaaattaaaataaaatcatatgacaaagattgcactgttatcgttaactttaagaacatctatattcagtttcatttatcgctcagaagacataatagtagaaactttagcagcaagttcaacctcgcagtattgtgtaaggtacgtaaccgcactaccaacaaccccttcagtcgcaaaaacttgttatttccaaccactaacaacgttgtaatgacaagccattgaagaacaaagaaccaacaccgaaacaaaacaaaacaaaattatttcacattgacaagactaaaacacttaaaaccatatcacacaagcaagactaaaacactcaaaagtatgtcacagagataagactaatcgcactaacaaaatataatctcaaccaaaccatacctaagcccagaaaacgccgacgggtgtggccggagaaaattttttcccctaaatttggattcttcttcttgttttttttttaactaattccaaaattgtttgttattaaatctgtgaatcactcatcattttcatcacattaccaccttagccaaaagtaaggattaacttgctttttgaaaagtagatagagaagaatgtaaggattaacttgctaattaatcataattggggatcaaattgaaaaaaatctactaattcaagggctatcaagctaaaacccaaaacccttcttcttcaaccttcactctctctctctctctctcnnnctctctctctctctcttgcttcagacaacaacaacaatggcgatcaccaacagctctgaagaaatccttatgcttgaagctcctccctccggacctttatggcatgtaccagcaaacgccgaaatcgtcgacgctttaccctacatcgacgacgattacgccgacccaaccgttaagagagacgtcgatcgattagtggaggaagaaatgcgaagaagttccaagaagccttccgatttcctcaaggacttacctcctctacctaaatccaatttccaggtcagttatgaaaattcaaaattttggtttttttagggtttgaactgtttggatgctgagaaaatagcctttttttaggatcatccaatgctcgctagagagtacgaacgtgttcgagctgcgaagcctccggtgattcttgatttttctcgtgataagttggagattcctgtggctaataaaaggaacgatgaaactgcttggaaacaagctcttcagaaagctcagtgttctttgcagcatcaaactattaggtaatggcatttaattaattagttagtgtttaaacagaaaatcatatgtgaagtttttgctttaatcattttctgggatcgttgtttttgtaggttggaaaatttggacttgacttttaagtatggttctgaggcttggaagcagcacaatcgacggttggaagtgctcttgtcaaggttcgttcttggtaattgttcttgcaatgctatgcttgtctgtatggaattttgcaatatatatatatataaatgtatatgtgtgtgtttatgtgtttgggtattaagattttagtgctaaaagggttaacaagttattgatttttatgatctttcaatgatgaatagagagtcattttgttgattctaaaaatctaaactttctatgaattcaatttggctgagttacataaagattgaagatagagatcaatggcagaagttttctaataactaggtggcgtttggctggaagtgatgaaatgaaatggaaaggaattaatttttatttatttcctttgtttggttgcattttaatgtattggaacaatattccaatggaatgacttttgaatcattattattttgaaatagaaggaaagacctaataatctttatatcattttttttatgcattaaatttgatactatttcattcttattgctattcccattttcatttctattcttatgtgttcattatatagaaatacgttaaaagatatgtttctaggcatggtttgatgaggctcatatgtctgctcatattgaagttaatatgtagtaacatggttagaagacatagaagctgctttgttttttacaccatgtgaaattgtgaatattagttacgattagagttgatattacttattcactttatactaaacattgaagatatgattttcatgtccattattgttcccaacaattgaagaagggttatactagttatttttccaatggttggttcatgttatcattgttctttattcaaaaattttatgaacttttacagactgcaaaagttagcgcagcaacaatatgacaagattgagacagtaaaccgtgaaaggaaatatcatcaggtgacttggacttcctcgcctttaaattaatgttcttccattctatgttacatactgatgagataaataatgtgtgctccatttgcgtccagcaaaacactgcttatgagcttaatgctctctctgctcagtggaaagagctttgtcacaagaatatcgaaattcaagctgcatgtggtcaacttgaaaatcacatatctgatttaaaaagagaagcttcagaaaggtaaaataaaaaagggtttctttcttttgtgagcatttagtcattcacagctaatacatttttattcaattagaggatggagtttggagacaagtgcagaggttagttcaattcagaacttggaatgaggtattcttctctctttctttttcttttcaagggtgggttgggtgtgaatttgtgttttgggcaaaatggtgtgtattgttcttagaatcgtttgtcctcgaaaatagtgaatgttcgcattatgcatgttagatatcctcatgaaggcattctatgatctctatgatttcaggcctgcttaatgtgaatcagtgattcttttcgaggcttttatccgttgagggcatgacaaccttgtctgttctttttcttttttatcccgatttttttcttcttcttctgttacatgataactttgtctaattcaataaaatgcacctgaaatatcaaatagtaatgttgtgagtcacttgttgtgtcattctggtatgtttgttcaaattagcttcgcttcttgtattttattttgttatttacagcattagaagtcttcaacccatacccaaacacatgattagatcctgaggtaccaacaatcataatatgcagaatttagagagaaattggagtgtgttctattaaaatagagcagcacatagtagtaaattcccaggcattagagagacccggttctcttcctagaagtaaagctcaacagaaataaaattggctaatgagagaatcccactttgctaaaccgtcttacccacctgtcagttatgctccgatcataaaattacttcttaattcatttttcctagtttattagccaagattataacctttctagatggtaaacttcttataccttttaaactcaattttgtatctaaaatcaagataatacgaattcattaagagcaattttagctctctagagtctagactacaaaggcttcttgaactcaacaatttc

SEQ ID NO: 26952 - DNA, 1963 bp, Cannabis sativa
tgggtatgaggatatgagcaatcaacaggtaagtaaattagcatgattatatgaccacttcaacatttttatggtaattgcattcacattttgagctgaactgttaatggcaggttttgaagttaaacggaactcgaataaggaatattcatcacttggctcatcttgtcgattgtaagtgctgatgttcctatagcttttcctcctcctgactttgtcttttgctttgtcttatatttaatattgttcttgctttttttgtgcacttaaatcagcatgcaaagacaagtacttggtctttgagtttgaagacaactacattgttgtcttggagagagaagcatctaccgctgcttcgtcctgcattctaaaagattatggcattccctctgaaagatcttcggatttgttggaaccctacgtggattcggtgggagacaaccaatcattagacaaggattatgctgatagcccagtttcaaattttgaaatcggttttgacgggctcctttggacatgaattattacaaagttttaaaaagaggccattctgaaatttctcattgcatcagatgtaggaggtaggtaggcatagtttgtttatggtaaaattgttaccacacctgcttttccttggtgccatatttatttgggagttttttaactttattttttcttctttaaaaatagattttctaaaagagttcaatcatttttttccaaaatgttatgttcttgtcaatgagggcataaagtatttagatgtcattgcgtcttagccttgaaataattcgtgtaataagcatgtgcaatgacaattattgggttatttgataaacgaattgattatttatttatttagagtgggttgttcctttttcatggtaagttctcatttttatttggagggtaatacctgttattatcaattaaaaagagatattatttacaataacagagtaaatacgtgaacgaatattcttcaaccaaaagtaagtcttattcacttctaatgcaaactaagccaactcgtgtgtaatcatattaattgtatatttaacatgaataatatttacattagaaaaaaaagagaaagagactagaaatgtctacaattaagtcattaaaagaagaattacattaaagggagctcttaaagcataaaaaaccatcaatgcctctgtctccattcgtgttataggcaattgcaactgaagggcccaattcaaattgtgaaagagcgctttggcctccataggatgcgaaattggcaataatgagttttgaaagagcaacaacaactagaacatatgtgtctcgaacaacaacaccaactccaataattttcttgttagcatccacattcatctcgagatcactaagggctagaggtttccacagcacatgaacaacagtaggaggggagagttgaggagtggcattaacttcaagatggtatttgatcttggctgcacggaaattatgcaagtaggttgttgtaaaagatccaagatctctagctggcttggctttatttccattctttccaaattgaccaaagagtacatataatttgttccatctcaactttgagtaaatagaagatagatgaaacaaataatcacccttgtgtattgaagaaaatttatgccaatcgaaaaccatgtttgagtgacgccataatgattgagcatacttacagctaaagagtgcacgaccaataaattcacatgtttaatgactaatggagcacgttgaatccgtgattactttccttctgaacaagaagtagctactggtaggggtgggcatccgattcaatccaacattttttttctcacccgatccaatccaattagtaactgaatttggaaaatcagcatccaattcaatccaattaaacctcaaatcctaattggattagatcgatttttttaaatggatattcaattacacacctaaa

SEQ ID NO: 26953 - DNA, 1978 bp, Cannabis sativa
aatgctccaaacacgattaaaactcaattaaaaatatactaaaattaatctaaaattaatactaaaaataacctaacatgatatctgtatctatttaaaaatgtggctatataacagaatttttagtttatgagaaattattgggtgactttttttttaataaaaaaaataacaaattattagatgttgccacgtaaaaagtcagcatccatgtaattagttaaacctaaatataattaatccacctaaagtgtagcaattaataataaatttgttcatattttttatttttaataaatttaggacgaataataattttttttaattactattacaaagtataatattaatttttgtttttatttttatttaaatcattattatgttttcaaatttcaattattatgactacattgaatattattaattttaaaattatgatattaaaaaaaactaaaaactaaaataaaattaatataaatcactttaacatgtatctagtattaaaatatgtctaaaaaaatatatatgtaagtaatagttatatggtggtgctcttttattaacaaatgtttatatttattgttttgacatgtgtcaaccgaatatacatacatggattccctacttccttggacatggtagcggaattaaatcaagttaattgcatatcatgaaactaatctaagtcaaagtattctctattaacaataaaatccaagaaacctctacatcactagagctttgtaatcgaagtcaatacattttaattaagcatagaataaattattatattattttatattaatatataaaaaacataagacaaaaccatcgacagagtcgtctaattaagaaaataacgaaatcaaattgtgtcattgtgatttccttcaaggccatcttcatatctctatataaacacgccataactaaaaacttaaaagcaccataaccataaatatggagtacacatgcaaggatttcaaggtgggaaagtgcaaagggcaaaaagtggtggacggtgagagcatgccactggtgctggaaccagtggagcccaacaagggtgatgacgtggaatctcttctttctgttctgaagaagaacaaggagtggttcgatgagatgataaccaagaacagtgctgtccttctgcgtggtttcaacgtcgagaacgccgaggatttcaacgaaatcatcgaagccttcgggtgggatgacattcgttacgtggggccagctccacggacccatgtctacaagagagtatggactgccaatgagggacctctcactcagttcatatactatcatcatgagatggttttggtaataataattaataatttctcactttcaatttatttcgtcctttaattataggaaacttctttaggagtactttggactaacggtgtacgcccctgttttaagcacttgaatatttattgcatctatcctactaatttttttaaaacttccaattaatgtacatgacggtcttaaggtagatgggacctagggcgaaattaaattttggggctcctatatagtttaactattataaaattggtagttctagtacttagtgcaatggtaaaatttttaaaaactcagttactttaaagtaaaactttttaccactacaccaaacaatttttgttatattttctttttatttaacactttatttatattataatattttttttttcacaatttcggggccctgagcgtttggaggcccgcctaccctcagggtcggccctacatatgagcattgcttaggcttacgcactagtttgccatttgttagtaataatatataaaagttattacacatgacactttagagctactagtgcattttaacattgtgccttttggcattttttttaggctaattaagatttttttttttcttgaactttgacatgtatcaaattatgccctctaaattttttttgccgttaaa

SEQ ID NO: 26954 - DNA, 4345 bp, Cannabis sativa
gagtgtccccccgagccagccactaacaccttcctcatgttgggtcttggaagtgtcacccctaagtattagcttctatccccgaagggggttaacgatcataccacaccctggggagaccctcatcgtcagtggctagctcaaaaattcaaatctggcaagaaactcaaagacggttacaaacccatagaaatagcgggatattaccataagaatcatatttcaaccatctttgaaaaccaaggaggcagttgagatggcttagcattggtcgcgtctcctgaagagagaagtactgaccttttttcctacataaagggtcagccatgacttgggaaagggattcaaaaatttgagtacttagagaaaagagactctgccattgttactttttgcattcaagagcttgttcttgattttacaactttgatcaataaaatacaagggaagtaggctattaacatttggggccgaatctctttaaattccagtgtctttctttacatttattgcaaattctggtgtcattcttcatacttattgttagtttctgatttaaatctcatttattccgattccgcgtcagttggctaaaaatccagtcaacacccgtaccattctctttagactttgtattgaactgtacttgtcttatattgattgaaagaaatattttttgttcaatacatatggtatccacttatttcttttttctgtagttttgttgaatgcatctatatacacttgcagtgtacttatttgtaatttttccgtaaatttgatgaatataaatgtatatatacatttattgtgttatagttttaagtttattttttttgataaataaaaatttaaaatatatatagtatattgcatattaattttttttttttaaaaaaaaacaaaacgctttttaataagtgtgggtgttatcagaaaataattaaaaaaaataaaaattacttacagtgacgcgctgtaagtgtagttctaatctttagagtctaacaacacaagattctaaaaggctataatgacacgcaatgagagagtccaaaatattttagtgacctgccccagagagtcagtaattacttttcctgatacctacattagtgacctgcattgaagtgtcactaaaattttttagagtcctttaaaaaaagtcactgaaccccatatttgtggtagtgttgttttgtgtttttaatgtatttttatcgtttttatttaagaagttatttatttgacaacacttttcttaattttaataaattaaacaaaattgcaacaaattatcttactaattaattaagctgattatagttaattttgagacgatagaggaaagtttatattcttcaagcattgtcaaataatttgttggacaatacttaacgcagttaccaacaaaaaatataaaaatttcaaaattaatgttgtaattaagtaatcatttcttatgaatatgagtttaaaattttcaattagtaacggatagatctataaggcacacacgtaaacacatacttcacatgcaatacatttattaaatttaaaataaattccactgtaaatatatttttcccgtatatgttatatgtctttttattcattttagtactgtaggaatacgtagctatcaaaatatatactttggtggtaaaaaatatattagttaaatgtattacatttgtttatttttatttttttttttttcaaaatttcatttaaacatattttttttttcataaatagaaaaattttaagaataaaaatattaaaaaaatttctaaaccgacataaattatttttctttgtggccatctttttcatgaattatttttgaccaactcaagcttaatcatctttgttttgttttgctgatgatgttcttttgtttatgtcatggtgactttaaatctattctatcaaatgcttcaaggtctcaagctattttctcaaacataattaagtatggcaaaatttgaaatattttgttgtatgacagaaaatgaggttcaaaggatagttgatgcctcagaatacggtagaagtctattatcattctgatacttgaaaatactgatttgtggcaaaaaaaactacctgtagctgaattaaataaaagtactgcaacatattttcttacttattaattaataagttgattataattccactcgtgatgatggtgataggtgtaaaattcatattctttaattattggtaaataattttggataatactcaacataattgcaacaaattattaattaagttgattataactaaatttgagacgatcatgagaggaaagttcatattctttaatcattgacaaataatttgttggacaatacttaacccagttaccaaaaaaaaaaatttcaaaatttcaaaattaatgttgtaattaagttatcatttcttatgaatatcaattttaaattgtcaatcagtaacggatagatctataaaacacacacgtaaacacatacttcacatgcaatacatttattaaatttaaaatagattctactgtaaatatatttttcacgtatatgttatgtctttttattctttttagtactatagtaatagctatcaaaatatatattttggtagcaaaatatatattagttatatatatatatatacatttgtttatctttctttttttttttttcaaaatttcacttaacatattttttttataaatagaaaaattttaaggataaaaatactaaaaaaatttctaagccgacatgaattatttttctttgtcgccgtctttttaatgaattatttttaccaactcaagcttaatcatctttattttgcagatgatgttcttttgttatgtcatggtgactttaaataattgtctatcaaatgcttcaaggtctcaagctattttctcaaacataatcaagtatggcaaaatctgaaatattttattgcatggcagataatgaggttcaaaggatagttaattcagtagaagccaattattattctgatacttgaaaatattgatttgtgccagaaaaactacctatagttgaactaaacaaaagtactgcaacatattttcttaattattaattaataagttgattataatacggtgctcaacacaattacgtacaacaaaatataaattttttaaaattaatgttatagttaggtaacccttttttatgaatatcaatttcaaattttcaatcaaatacggatagatctataagacatacaaggaattatagagttcacaagcaatatacatttattaaatttaaaataaattcaactgtagaaatattttccattaaatgtctttttgtattctttttagaagtagtacatggctatcaaaatatatattttggtaagaaaaaataaattaactaaaaatatataaacattatttgttcatcttttttatttatacttaaacaatttttcttcttaaatagagcaaatttaaggataaaagtattaaaacaaattctaaatccacatgaattattttgctttctcagaaaactaaatcagatggaataattttcctatatcttggactaattatatcgatccctagcgccttgctagtaatcctcgatatgatagaaataataacactaatatcagcttccaaacagagaatgaatgaatggaacaaacaattccagctgctttccattttctctctgaaatatatagttataatacgtatgtatacgtatatatatattatgtacagtagtgttaaagaagaagctgttgtgtatatacatgtgcatctactaaatgtatttattaattagtaattaagttatccaaaatatatagaacaccattattcttatcgttacgcatatacgtttatttttattctattatagaataataaaaaaaaaaacaaattaatattaacttacaagagcggagcatccaaagatatagggaatcctatgtatacttcttacgtttgaacttaaccatttcagaataatgcatttgttttaaaattagataatatgtatatattattaattcacgaagaatgagtgttcttgttctttaaaagcttttagtttattattatgaagcaagctcaaaatttatatttagagagaaatggcaatcgagtaatgctatagtcagtacttcgtaggattttatatatcgggccattattattttggctgtaatataagataatgattactagcaagctatatagggttccatatatgcctctgaaatttcagttacatgtatttattatatatatatgttatagtattatcctcgtgcactcggtttataattaattaat

SEQ ID NO: 26955 - DNA, 3292 bp, Cannabis sativa
  modified_base (656)..(664): a, c, t, g, unknown or other
gttcttcccttatgtctgactataggttcctttctctttacagggtcatggcgtgctctagggtcattagacttgtgaagtaaatcccacagaggagattggtttcccgcattgttcgaatcacttcgagtagaattgtggttgttcctattagtcacttgtggtggacttataggtctatgatctggagtttgagtcctttcgcacactcattcatagcttgtttccctaataggtgaccactcgatatcaggcagagatcccatagatcaatgttcccgagtataagtcctttcggacacctcgcttgtagttcccttttttggggaatctcagtgtctgctgcttttggagtagtagcttgactacctagagtggtagtgttgctttgtgtgatcatggatgattgcttgcttgaacttatgaattcttttcagaacaaagctcctagcaaagaaatcaaaatgtagttgggtaactcaagttgtggctataaataaaagcaccaaaatattgacgttgaaaaatggccaacaccagctcgctagattggcaagatgaataatgagtttacataaaataatttagagagacacaaaaaatttatagtagttcactccccgtgtcatgattgtaatagagctacgtctacttcnnnnnnnnntttctcacgagaattacaagaaaattagctaagtgtgaaaattttaatttctagaaagagaaactagagagagatgctatgacgttatgggtacttttttgaataagaaaaatgagattgtgtagctctcattttataagggatgaaggtcctaataaattgcaataaaataatcaaaaaaatatggaaaaatacttttaagctatttttgaccgtagatgatgacttgacggtgaaattgactccagaggttggtcgttaattttagagcttgagttgcgtttgcaggacccacttcgggtaaggtttagcttaaattagtaatttctctaaggtaaaatatggagtcgatagcttgagaattgcgattgaaatgtgagaaattacattatagagcattgaaatagtgtcaatcgaatcaacattgagtgagttatggccattttactgaaggctattgtgggcctagcgcccacgctgacatctcagcgcccaagttaacatccagcgcccaagttgacatgtgatgtcaactttgacgctgagtgtgtaggaaaacattttgggaatttattttttgatgccttagatatatttggacatcacttagtgtatttctatgttttgggaaattcttagagatgttgttgttttgtaaaaatgggagactcaaaactacccggttaccgagtacatcaccttaacagaaaagtgaaaatatgaagttgtgaatttgactcttctgacttcatggctctcagttattatgaaaaactcgacgaatggtcaaggcaaaatcaagatcgaataagtagaacccagcgcactaggccatatgtaacactgggcagtaagtgctttttttagagattttgagatgtcgttttgatacttccatagttattaaacttgaggatgaggtctcctaccccgtttttgaccattatagagagaatgttgagagaaaaaaatttatttgagtgatcgaaaccagcacaccaagttgattgtaaagctaggagctgcgcccaacacctggtcaatctgggcgttgggttgagttttgatgcccttgattatcgttttctccccaagtttacttgtatctttgtcatttatgatgacagaaaattcctaaaatacttttttgaaaaaattattggaaacagcccaggttgaaaatatgttatattgggcgctgggcctagtgccatgtgtcaaccttggtgttgggcccaattctttgcccttagacggctccttttggtccctaaaattagttggatcttaatttttgatgaaaatagagaatattgctggcaactttttggaaaaacacctcagaattggcctaggttgttaaaatgtcaacctcggcactgggccagcacaaggtgtcaacctgagcacttgtcccttgttcttgcacccaaggtaggctatttcttcctcaatagtatttatttccatgtttttgatgaagtcaaagaagatgcacaagttggattttagatctgatgcttggaagtggccttgattgacaaattttaaacttggacgttgggtgcatgcgcacctgatgctccgggtactcaaaaataaaagttcttgattctgatgcctcaaatatgttcgtggtatgtctagatcatgtgccaatacaaagtttgacccatgcattaacactaagaggttcttaaaaactaaaaacctagttggggctgtcaacccgggcactcaatgaaactctagttgcccaggttgattttgaggtgcttattcgtgtattttcagctctcgaggcctgaacttggatgcttcatgtcttcatggtacaaaatactgaaagatagtgggttggatagaacttggcgggatccaaacacccaatctagagttctcgagtcaacctggacgtagggctaggtagccctcctaggttgacttgctacgatctgagactacctctgagatgttttctttcttctcacatatcaaacattgatgtccacatcatcagggctacttttggtgtaaacaacccgtatatgataacaataattcacttattaatttataacaaaatgatcgtgagtacttaccgaacattatttgatttattttatgtataaaatgtaagatggttattaatgacgactatatataggtaagatacagtgatgacaattgttttaaaattatatgaccaattttctataaatttattgtagtgatgagaattatcttgaaattatattataagcatttataaatttattgtctttttttttttagatttctattttgtatggggttgtttacttttaaatttttctcttactataacatacatttagaatgtttctttgtacgactactttcttttttataaaattgtacaatgatttttttaagaattatttaatgttctttatataaatttattatttgtctaataaatatgtttattaaaaattatatataattaataataactttgaaattatttgatgcaattttactattcaattaatattatataaaatcagtagggaacctaagatttaaaatgaggggagtgtaatttttttttggtaagtgagaggggcaaaaaagtaaatttaaaaa

SEQ ID NO: 26956 - DNA, 1234 bp, Cannabis sativa
gcttgttcccatcagtgttgtttctagtgggtgcagatcccatataggactcatcataacgattgtagcagagtgcagctgagtgtctatattttccacatacttgataagttttggaccattggatctgcctcttcttcatctgccactagatttatctcgatttccaccattgtagcctcctatgcctctgttaccatgttagtctggactgtagtgaccactaggactattttcgttagcaagattagcagatggagaagagttttttgaggacttactgttaccagaaagtgtgctaagcctaccaagcttactgtcaaatcttagaagtatttcttagagagtttgccaggatgtcttctctcttgcctcaacctgtagaataataggtaattactctatatctagccctgacagtgcattggacaccagcaaagcttttggatagggatcaccggccaatgccaagacattagcccattgtctcttttgtttgagataatctagcatagtcgtggtccctttccttactgtttgtatttttgttctgtactcatctatttttgccttggagtgagcaccaaaaaggaattctagagcaatccaaacttcagctgaagaagagcagcccatcacttctgtggctatactctcggtcatagataatgaaagagtatgaataagagtatcatttgtgtaatgagaaataaatatttatgttaattaagtaatcttaaataaaaaattaactgagatttttagtgatttgaacttgatgagatgtggaatagagtcactaattctgacatctgacatgattagtcatgggttttaataattttattaattagtataattaataaaattaattagatatgactaatagaaggttctagattagtcaaattcaaaatatcagttttgaatatcaaatttaagtatctaacattttagaatattaaatgatgaaaggatgtgaaatgaaattgatcattccaacatctgacttgattagtcatgggatatattgagttcattaattatcgtaattaaaaaattaattagatgtgactaaaaaatatttaatattgaaaatatcaaatgattaatcaaaagcagaaaattgaagaaaataaaagaataaataagaaaaatatataaaaattaagttttgtatatttgttcgatgatgatgtagtggtctccgagatctgtaactacattatgtgga

SEQ ID NO: 26957 - DNA, 3059 bp, Cannabis sativa
  modified_base (27)..(34): a, c, t, g, unknown or other
aaaatagattacattgaaatggagttnnnnnnnnggcataaaacccaacactctatacacttgagaatatccacatcacgtctattggagacactcaagagtctgagtgtcaagttttagacactgctccaaaactagtcaattaaagacagatttgactatagttctaggactttgtaactcaagacatgagtcgggtctgacacatattttctcaacatcaaaatatggaatacattatgcacaactgataatgttggtggtaaggctagccgatacgctacctgccccaccttctcgagtatcttgaatggccctttgaacctagggtataactttcccttcatcccaaagcaccttatcttcattggtgaaacccgcaggaaaatatgttctcccacctgaaattcaatatctttacgcttaggatttgaataacttttctgcctactttgcgaagcaatcatcagagccataatcttgcctattgcctcattggtcctctgaactaactgaggaccaaaatattcatttcccctggtctcgtcctagagaattggggaacaacattttctactataaaacatctcgtagggagccatccctattgtactttcatagctgttgttgtagggaaattctatcaatggcaagtacttgatccatgaaccctcaaagtccataacacatgctcataataaatcttctaatatctatattgtcctctcgagctgtccattactctaagggtggaaagctgtgctgaatttttgttttgtacccatagctctctgaaggcttacccaaaactttgatgtaaattttagatctctgtcttaaacaatggatttcaaagctccatgcagacgtactatctcttttacgtacaactccgcatattggtccactgtgtaagttgtctttatcagtaaaaggtgtgttgactttgtgaaatagtccactattacccataataaatcatacattcccgtggttctaggtcaaccaacaacaaattccattgtaatatcctctcacttacagtcaagaagcgttaatggttgtagtcaccctagcggtttatgatgttttgccttaatctattgacacgttagacactaggacacgtattcaactacatcttgcttcattttgcaccaccagtagtatgatttcaaatcctggtacattttagtggtactcacgtgcagtgagtaaggtgtagtatgaggctcatcaagtatttctttcgtgagatcactactgctcggaacaaaaactcgtgccttgtaaagtaacattctattatttgagattgagaagtccttaggctaaccttccaatacctcctctcgaatcttaactagctcagggtcatccaaatgtttctttctaattgtttccaacaaatctgactgaagtgtcaagttatgtaatttcccaaccacaaactcaattccacctttaaccatatctgaagccaacagaagtgatatcattacggttctaaaaacttgcccgagaccttttctgcttaaagcgtctaccaccagattggctttcccgagatgatacaaaatctgacagtcataatccttgacttgttctaaccaccgtctctgtctcatattcaagtctttttgagtgaagaaatactggcgactcttatggtctatatatatatctcacacttcttctcgttcagataatgttgccatatctttagggcaaacacaacagcaacaagttcgatgtcatgtgttagataacgttgctcataatcctttaactgtcgagaaacataggctacgactctgtcaacttgcaacagaacacatcccagaccctgtctagatgcatcacaataaataaaaaactattcttggtctgatggtaaagctaacactggtgctgtgatcagtcgttacttcaacacttgaaagttcgtttcacatttgtcggaccatacaaactgctggttctttttagttaatttcatcaatggcattgaaatcttggaaaaccttctacaaaacgtcgataataccatggaaatctgagaaaactttgaacctctgcaacagttcttggcctcggcaaattcttaactgactcaatctttctcggatcgaccataattccatcttttccagtaatgtgccctagattagatacatctaataagtagaattcacactgtttgaactttgcataaatcttatgatctttgagtcgttgtaaaaccaatgggggatgtttctcacgctctgcttctgtctgagtgtatacaaggatgtcatcaataaatactataacacaattatcaaggaaatccttgaacactctattcatgagatccataaaaaccatcaaaccatttatcaatcctaacgatattccatgaacccatagcggccatacctagttagaaatgtcttcctcccaaattctcaactgatgataactcaaactagtcaatctttgagaatgtagtcttgccttaaagctgattgaacaagtcgtcaattctagaaaatggatatttattcttgatcatcaacttgttaaactctccgataatcaatacacaattcaaaggtatccattctaccttttcacaaacaaaaccggagctccacaaggcgacacagtgggtcgaataaaccctagatccatcatcccctgaagttgtatttttagctcctttagttctaccagaaccatccaatacagtgcctttgaaacaggctctgctctaggtgccaagtcaatgatgaaatctatctcttgctgtggcgataatctcggtaactcctcgagaaaaacatctagaaattctcttactacagtggcatcgtaacgcctaaatgttttgggtctgctggagttaatcacaaccgctaaaaatgttacacatccactgtgtaataaatctttagcctttaaaactagaatgatcaaaattcgggaaccctgaacggaaccaacataaacaaatagttcttcgccctccagctaaaaagttataatcttctgtttacaatcaatgttggttgaat

SEQ ID NO: 26958 - DNA, 1686 bp, Cannabis sativa
aaatcaaaattggaaagacaaagtacttgcactattcatacctgggaacttaatgaattcaacaaggatgtttcctttaacatcaattccttaatctccaatagtgtattataggtatcataatacttttgtgtttgctgatgttttccctgaatatgagcatataactctgataatctcccttcatatctgcagaaagaaagaggcccaactcctaattctgaatggttatgaacattataaacagagatagtattgcccatattataaagatcataataaacaaagaaaaattgtaacatactgaataagttctgattgagaaggcacatcatcaagctggcgtcttaccgctagtattttcctcatcaaagcagctagttcctaccagatgaacacagaatttcaatcaaaaaaataaactcaagagctatgttacagtttcttcttctgatttgcttaacaaaatcatttattcctaatgaacaagaagaactaccttcctagccgaaactaattcttcttccgattcacttaacaaacggtttaatccatcagaaagactcttgctgtcgctgcaaccactttctactttctcatttaactcatcaacatatgattgcaaatgagaaagccttgttgcattagaagacatgttgatttcaatttctttcctttcaagctcctgtaagaaaaagcattaaacattcagtctctcctccacaaccttttgaatcaatggacaacttgcatttttaagacagataaaaagtttagaactttcttattttcttagatccattcaagctcaaggattcaaaagaagttgctaatgaattctaatccattgtaatacaaatttacacacattggagacttaatagtttacaacttaaaactattatatataatgcccaacaaattaaatcaaacaacaaaaggaaaaagcaattaaattataatacataaccaatacaacccaaattaaaatataagaaagaaccaaaacaacatctaggagttaaagtaatttttttgatcagtggatacacaaacaaagctacaacaacaacaacaataataataataatatcaatgcttaagaaatatgcaaccaaaacccaaattacattataaacataccaaacaaaaacattgttcttcagcagtttattactaatcaaatatcaatgaaatcaataaaaatacaagaagactataaactataactgtaaaacacaaattgaaagagcaccacagaacagatactgtaaaatgaagattaagaagaaggaaaaaagcaattaaattagaataaagaactaatacaacccaaattaaaatataagatagaatcaaaacaaaatctaggagtcaaagtaaatgtagtctgtcccaacgaacatgaaaaaaaaaaaaaaaaaagaagcaattttgatcagtggatggatacacaaagaaactactatactacaacaacaataatcataatgtaaatggtaccaaaaatatgcaaccaaaacacaggagtataaactagaaactgtaaatcgcaaattgaaagagcaccacagaacgttagatgttattaaatgaagattaaaaagaaacagaaaaagaaaaatggttctctaagcttgacctgcgtgagagagagagagagagagagagagagagagcgttgga

SEQ ID NO: 26959 - DNA, 2877 bp, Cannabis sativa
aataagataatgtgggcatattgggaatagtttatacatcccaaatctaacatgcagacctgtttgacatggttttttctaagccaaaaagaaacgtttgggcttgaacttaaagcccttttagaagattttttaatgaagccaccctaataacatggttttgacaaaagcatcaatataataagacaaacagtgttgagatttcaatggaacattctgtttccatattaatacttgaataaaaaaatctcagtttatcctaaaaacacttttacagtagcatagcatttaaatagtgtatttaaaatgtatgacttttacttatctttttttaatgtataaccaaaagtgagttttctccatgttcaagtagacccaagagaagtaaaagaaaaaggttttcatgtatactctgcttggatagctaacttcacaagagaaactccataagattagggaaaatatggaaataagaaggttccacttcaatgtgttatcaaagctcttctttgtcaagtcatgtgagcttgactttctatcaaatctacttttgggcttatgagattgaaagatagtttccgaaaccaagccaaacaaacttcaggataatataaaagtaatatttgcaaactcagacgaataatgtatgtggacaccgttttctaatgttttctaacaatctaactaatttgctaaaccacagtcatcaagacactaggaactaggaagcagctagtcttcatcatactaagcatcatttaaatggaaatcatacttagctgaatgtatactactattaacatgatgagatcaatactatatttaaaataagtagtttagttttataggagaattagacaaacgaaacaaatttattacgtaccttatcaaagtccttgacaattttagcttctggcgaagaattttgttcatactccatccatagttcacctatttcctcagctggcaattgcagttcagataaagcggtcagataagaaaaaattaatattaccatgtaggctatgtaatctttattctttaggggcatgtttgacatggctttgaaagttcagatattccaattttgttcatttaaataacaatctttaggggcatgtttgacatggctttgaaagttcttcaattgaccaaaaaccactcacttaggggagtgttttagatgatctttggaaaaaaagaaatgattttgagttttaatgcaactttgatatttcttatttttatcatctcctaataatagatattagatgttaccattatggatttccccaatttttgctataagtacttttaaaatagactatcgaaaaattattttagaaaaagaaattttgtttctcttattttactatccaaatgtgaaaagcaatcaaagcatgtctataaacaaaagcaaatcatccaaacggacactcgattacttctgctcgcgcacgattatataatgaattacctcttgatcctccaccaagtagtttgcacatttgatcaagtgcttctctttctcttctgctcttctcagtctttgagaccccatcagaaggggtaatgtccccaacaatggctactccaataaagaaaaacaacataagtgctaactaaagagcttaaacttacaagaaacacatcaacaatgcactgatcaattttataaacacttgcccacttgccaatactagaacatggttacacacaaacaaacctctgttttatccattaagacaggcattccaattcattatgatcatcaatatccacattctccttgcttccaaaaacattcataccattttattttgagaaatgtgaaagggcacccatagtacctagcactcttattaggtgtcatatcaatactagtgcaattcaatatcgaatctcacttattttactttaataatgattagagaaaaccgctaaccatttatagaaagccacattataaggctaggcactataatgcctaatagcaatgctcttttattttccccaaaacatcacttacattatgattactttatatttcaatacacaacccaacaaaaagaagagcaaaaatctcaatccttaagtcattttgttttaaacaagcatttacacattcaaaattaaaaatgtggcatctcaccttcagcaatatcatgaacaatagccattttaatacacctgaaacagtaccagaacaacaatctgagtctcacaaaacaaaagcacatcaagtacagtaaaaaattaacactaacttgtctctatcaacaccaggaatatctttagcaataagagccataacacccattcgatacatatgatcagctacagattccggatccttaacatctctcttcacccatccagctctcttagttgtcttacacacacaaacaaacaatcaaatcatcttccattaccaaaacaaaaccagttataataataataataataatcaactcaccttaaggcgatgacaaagggaaaggaaatcaatggcggaggaagcagaagcggatgaagaggaggaggcagctccttcaggggtggccatagtaggattagccttgaggggtgaggaagaagagtgaggagtgagtgtgagagagctaaacctgagaagcttagagtgtgagtgtgaggaagaagaaagagagggtttacagagccacacacaaactattcctctgctaatcgaactcatttttctcttttttctttttaattttattatcttttttttctttgttttggtttttacctttttatatatatttttggtatatttgtaggatattgtgaaattaaatataaacgggaggatattcttctgtctataataaagtaccaaattatctttttgaa

SEQ ID NO: 26960 - DNA, 2452 bp, Cannabis sativa
aatgtttaaattgtagatttaagtctcatggtgtttttttttttttttgtgactcaaggtgtaagcctcaaggtccattgaggtgtaaattgaggtgtaagcctcaattatttaattaaactaatagttttagagtaattaaaaatagcaataataaataatgttttataaatatcaaatactgtatatcataaaatatctcctaaaacaaaaatataacatcaaatatctaataaaactcaaacttaataaatatatttttttgtttctagaactagaatcatattctattatcctataaaaaatcccaacaataatggcatgatgatttagaaatcaccaaattcatcattgttattattgccctcatcatcaccattactactaccacctccattatgatcatgaatctccttccattcatcttcatcaacctctaccaagcactttcattttcttaagaaaaaataattacaaactaatcaataattaattaacataatacaatatgtaaattaaaacaagagataaagtttacgaacccccttttaaagtactttctgcctggtttgagttgttagtggaatgagtcgattccgattctccaagttgagtattcttattctttagcctcctttcattttcatctttactttactaacaagtcattcatcatcaaatggaaactcattgatcaacaaagaatcatcttcatttgaatcttcatttgattgtgttgttgaattcatcttcaaaaatctatttttcattcttttgttgaacattacgtatgccaaataatgcatcttgaggtagtcagttgatttctttatttttttttttggtatgaatttgattaaaagtactccaattccactcatatcccaatgctaagcaagtaagacccaatattttgatagcaaattctgtaactctgacgtttgatctccatattgagttcaccattccactaaaaaaaataattactttattattcatagtacacattttgaaaaaatttagaaatttaattatctgctgatcgttttgaaatatctgttgagttaaggtgagtccaaagaacccttccctgttgtggaaattgttacatcgaaggttagcttttattctgtctttggaattcggtataagtttgtccatagaatgaaacaaatccaacttgatctctggatggttaaaaaatccttgtgaataattacaatgaagattcaaaaagtatgcagcgacatgcaaacgtctatacaactgaaattcttatttctcatttatgatttttcatatctccttgtaatcattttcttctccaccataagcttgtgctattttttcttttgttgtatccatagcattgtaagtaactcatagttggttcttcatcaccgttaactagcctcaacacttcaactaaatattttgtggtcttaatggcataagacacacttgcccaaaaatatgtgtctttcaaaactatgtgtcttgcctcctttctaatagcttcagaggcccaaggacaggttgcctactcttaagaagtaaatataacttccaaatgttgcctcacttaatatatgctttatattgtaagaaatgcagtagcaaatctagtggcaacaagtcttataatatcttttttgcaatattttctcttcaagtttaacacctattgatgattgtgaaaaaacatgctcaatttttttcttttggacaagacactttggtgttgtggcaattcaccaatttttttaagcaccaaatcaagacaatgtgctacatggagtccaatatagatgctttcttttctccattaacaatgtgctcgctgctttgtaggcactgacattatcaatgaccacttgaacaactagatgctctctattttcttcaatgacatcatccaacattttaaataacttttgtgcatccttactaaatgaagaatcattaatacttttaagaaacacaatgcccttaggattattgactaaaatgttgattatgtgttgatttctaatgtctaaccagccatcaggcattattgaaacttccattagtggccatgactgcttaatatcctcaactataacttttgtagtattcatctcctccttcaatatccatatcctaagctcatatatactaggagtttccagttttctcccataatctccaattgagcgacacatgttgatgaaagaatgactcttagccaagtagaaaggcaatcattcttaaagaaacacctcttaatgtacatgcaaactttattacgcaattattttgtatttttgggagttacttgggtttgttcagtttctgtctttcgaccatcactacccataaatgttatattatttattatataatataatgtttaagattaaaattgtgatatgttatatatatatattattacatataatataattgggaa

SEQ ID NO: 26961 - DNA, 3888 bp, Cannabis sativa
  modified_base (3700)..(3705): a, c, t, g, unknown or other
ttttaaagtcattaaaaatactcacttaactattaagattgttaaatttaaaaatatttatctaattttaataaaaaaaatctaacataaatgaaagttaaaagacattatttagtacatattaaagttcaacggatataatttggtagatatcaaaatctgagaagcacaatttagtacataaacattcactaatagtaaaaattaaataaaattaaataaaaatttttaaatctaacaatcttaattatttagagtacattttgaatactaacaaaattcaaaattataatttaatacgtaataatatttaagggcaaaaaacttatttaggctaaattgaatggacatattagaagtcacaagtggtgccctttggaatttacgtgtcctgtttggtcaagctgcgcgatggcaccactgccattgactccaggactcgtcagcatatttaagctaactataactataagctacctactacctatatatatctatagctttctttctatgccttttttatttttcctcctgcactgcttccatctatggctgcttttctatttttgtcattaatgataagtgcctctaaatgtggatattttcaataattacatttattaaaaataattaaaatcacgtcaatatcatgtattattctctctataaattaatctaatccaataataaatattgaccaatttaattataatcaactgccaaatattaaatattttagattaaattaaatattatttttaaatatccaaattcaatatattcagcatcttatcaaacaaactaatattaaggatagatccaattcaatatatactgaacatattagaaggattgatccgatatactaagtctaaataaatttaaattaaactaatacatatatatataaaatatatctaagatctaatctaacattaattagatgactgaaattaattagatcgattgggattataaaatttaacatccaatatataattaagttattaaatctgaataactttaaaaatattggatgtatatttaataaacaccccaactcattattagtcattacacaagctttatctctctatcttttctaactaaattaattataagaacgatttcaaagagaccgctatttttctttaataacatatatattaaatagattattgtagaataatgtatatatatatagtattttgcctgacaataatcaaagaaaacgttgtaaaaactcattgttcaaaatttataattatacgcgatagtcggtgtgtcaatggtcgttagtgtacttttgattctaaaaagtccaataattaataaatgttaatatatatatattggtcttatatgcttccaattctacatattagcgactagggtaatttggtctctattttgtaatctgttaattcaacatttaacgcagccccatttatagtctaagaatctttaatttttttaagaatatatatttaatttattatctttaaattaatcattaatttgtacatgatttgaaaggcatacacatgtcaaattaatatgcctataattttcaatttcatttgtatatttgtcacaactatatataataattttttattcaaaaaatcaaaactaataatttttgtaaaatattgtgcgttatttattttaataaaatggctttctaggcatatgatatggcgttttatgtgacgccatatcatattaatttaattacaaagaactatttttctttaaaataaaaattattgtaaaagaagaaaaattaggaagaaaaaaatagtcgatctatcaccatacatatttatatgttatcaaacatcatttgatgtagtatttgtaattagttaaatttaataattttaatgtttgaaattagaatatatatttttttgctttcaaaatatacattaaatctaattaatataatcatgttgaatatattctctccctagtaatacagtagaatactgatctatttaaaaatacacttaaaatcaatcaaaatatattttaattaagatgttataattaaataaaaaagcgtacactttacaaaaaattgaaacacccatttcaaaaataaaaattaaaacacaaaaaaatatcaaatgcaacaacaattacaatgtataatctttaatactagatcatataaaattagtttttgattaaatataatatttatttatgtattatacaattttcaataaaattatttattttaccaaaataaatttataaattaatatattattatttttatatagaagtatatatatacttttttaataggatttaagaaaatgtataattaattatagtttaaaaatatttatttataaaagtagatacatagtttaattatagctaggtaacttaattctttccattaaatatttaatttattactgatcatattccttagcacgccacacacatgccaactaataaccttgaattattaattgtgctgcaataaataattcggaaatcatatgaaacgaaattaacttacaaaccaaggtctgcacttactccctcccattggatatttaaaactgcggttcaattagctgtattaataaataaatgtaagagtaatttgcgttataaatatttaaatttaagttttgattgtaaataattatttaagtttaatttttaatgctaataatatttaagttatatttttaaaactttgtaagtacttattccttaaatgttaaattatcatctacatgttattttttatttgtatattcaaactaatttttttaaaaaaaaaattaatgacgtgaattaattaataattgtcacgtgagtgataatttacttaatacttaaccgttagttacctagctaacgaagttttaaaaatataacttaaataaaaattaaatttaagtatttatttacaactaaaagttaaatttagttatttatgttacaaattaattataaaaatatatatatcatcttatgtcttttaagttattaaaaaaaaaaaacttatgtcttttagttttaaggtcaaccttctctttttcaaaaaaaaaaaaaaaggtcaaccttatatatactaacattttaaaatagatcatagagtttacaataagtagtgggagagagatcatatatatgtgtttgtttcttgtatcttgtgttttttcataaaatcatttctgcgcgtgtcttataagttaaaaggttaatttgagatttaattattataattatttataggaggaaggattagagagaatatgaatgtttggcttcttttttttttttgtcaactaaagaaatcgtgtgatttggggctggggttgatcttggacccgcttttcaggctgtcttccattctttctcatcatccaattttggttcttaagtatcatcctttacaaacgttacacgtgtgtatagattgaccactcatgattcaattcttttataaaacaccaaatatatatatattagaaaatttagagcaaatattctcaaaaaattcaatttgataaagataagttactaattttaaaaaatagcatcaataattttcaaagtcatattttctatttctccgttaatcctaattttaactgagctgtttactttgttaaaattgccacatgtcgaaatattataggtctaaattattattttaattttaaannnnnnaaataaaaataaataaataatttctttttttattctttttctttcttcgtcttcttcttctcagttctcactgccagaagccctaaccaaccaacccccaacccaccaactcctaaccagcaccaccatcacgcctgaatagccatgacccaaaattgagttgcaatcacaacccaaataccc

SEQ ID NO: 26962 - DNA, 1681 bp, Cannabis sativa
caagtttcaagcatatatttcccataaaaatagggtattttgtcaaaagacaaatgacaaatcttatcatttcatgtattttctacccctaatagcatagagtgcatacaaattctcaaacaaagaaaaacaattacataaatggtaatctactaaccttgaagtgcagtctctctttgaatgattttgtgagaatcacgaacttcaaaatccttttcagatgaagaaaacacagaaaaatacaaagatttttgagaattcgaaattcaaaaaagagaaagatgggaaaacaaaaatgagagggaaatgaataaaagataattttataccaagaagtttaaatactaatacccctcatttattgggatggagacacgtggcaaaagaatgcctaaggtctctcaatccaacagttaccaataatcacacctgcacaaaccacgaagagttcagatgatgtggcgcctcaaaggattaaaagtaataattacagtcgtcttttcgaaatcctcgactagaaaatcaaaggtcagcgcctcatgacaacctttcgcttgcctctctctcatagtttccctcacgacatagctgtcaattgagaaactaggggcatgtgttatagtataaattttttcacctaaaaactcgagaccaggctctcataaagatgacacgtggactcactctccttgaggagtgctgagctgtcagaaggagaccactcaagtataaacctctcctgaactagactttgcgagattatgtgtccccgatagagtctagttgcattattacaccttgtatggagcaggattaagaaggctaggtttaaggctcgcatataccaagatatatgtgatgtctatagagttttttcctataaatcagtaaagatcgattctttatctagcgagctggtccggatgacctcaacgtgctcgatgacctgataagtactcgcacatcctaagtcatcggcttgtaaaagatatccatatacgcggcttagataggacgcagatatcttaacacctagactcgttagtcctttacgcatcctaggcccgcgagcttatgcaagaatacgaacagacaactcgcaccataaaggtcgcatacattgttgtagttagtgaaatgagttgaaactattattcatttattccatttacatttttattgatttaatgttgatattcaatgtaaaatggtttgataagtaattaagttttgtataatcaaaggaaacttgctttgtatataaaagagtgatccaatatggaatggagaggatagaaaatccttacagcagtagactaagtagaccgtgatctaactaaaccactataatttgcttgtgttcattatattttccagtacatctgtgtgtttattcattgaatacttgccattctaggtggcgtactcgcacgttttcattaaatatttatattttcttttttacacggtgttgtcaaaattcctccaacaacagtgtggaaatatagaaagtgtttcaaggtcaagaatgtgatccccaaaccctagcctatcattatttatgtataggcttagaatttgttagtgatcccccaaaagtcgatgtatctcacttcaaatctcgtatcatgatgtcgcccaattagttacactgcggtcgcggtagtaaacgggctatgtc

SEQ ID NO: 26963 - DNA, 1052 bp, Cannabis sativa
  modified_base (28)..(30): a, c, t, g, unknown or other
atttattattttttatattttttttttnnntttttttttgaaaatatttttttatatttttattaaaaatattaattaaacattaaattttgccataataacttgtcatcgataacttatttttataaacaagagaatcaaacaaattaaacaccagcaatttctataattctatgtacacatatacaaacactttcctgatacacaagtataataattttactatagcactggattcataaattataaggttaggttgagtagagacttacgtatacacgaaacacttgtttctcttcttcaaattcaagtccgctgtttgaggcaccatgattctctaggtaatctacatacgaatcaagaatatctgtgtaatatgaagctctacgcggcctcagtgattcttcagaaagacagattcttgtgacacacttttgtttataatctgaacgctgccacctaaaaaaacaatcctttctcagttatcatattatggttgggttgtctcttttttcttttctttttaacaaattacagacttttcatggcaatcagacaacttattaagttatcatatgtttaaaaaaaaaaatttgtccaatttcattcaattaaactatttcggttattatttatgtactaaattatattcccgccactatataggaattttttcaataatatacttaaaaaacaaattaatcacaaaaaaccctttatagatctaaattacaataataccttgacacatcatcaaaaaatacctcaattccaaactaatatgcctgaaacgaaaaataattctaaattctgttttttttaaaaaaaaaaattactgtgttttggaaagtaaccttttggttacttataatgtcgataagaaattaattagttacttttacattaaaaaaaaaaacactttatgtttatattatatagtttgagatacaattgagttacctctctaaaacttatttgtaaacatcttaataatcaaatatttattttaagttgtattatggtttcttattatgtaaaatatatttgggtaa

SEQ ID NO: 26964 - DNA, 1444 bp, Cannabis sativa
ttttttttaaagcacataatagggctgccactatgtattttgttaagataaattattaatattattcataaaaaaaaaaaaaaaaaacctgcaagtagaatccattggaggctttgatccgaacacggttggaatcattggaatttcttacaatgtggaatttatcagaaatagttgttatattggatatagccactactttaatttgattttccttcatgctaagccccacgaattgttggttgaacactctgaagtgaaatgtattttcattgatcctccacaactataacagaattaaataaaatataatttgtatcaaatgaagaacacaatatatatatttaaaataaataaaaattataactactttaaatgtttcccagcccgaagcagaagttcgatttgctacgatgatagttcctccaccagactcagcacaaaggtacttttttgttgtaacagacttgaactgaagtccagttccatcctgttgattttaaatttagttataacaaatatgtatcaatgggttactaaaaaatttactcatatatataattattataccaataagtccttgttggggatgccatcaaagagagaaggtttaatccaaccttctgtaacaagccaacctcccagattaacagctctgagtttgaatgtagagttggaaattgtttgccttccttgtgaaacagacaccatacaaaataggagactaaggattattttgatggcccaatttaaagccattttctttttaacttcgttttctctcaattgtactactactactactatatatatacgtggaataatgtattattcgtatatgttttggaatacacaatacacagaaaatatcaaaggtttgacccacaattgggaagactttgaatggtgattcttgcatgttgtcaggggaagagaaagtgattctctgactatgaacagagattatttcatttttagattaggcaaaatcaaaaagtgtgaatcaatatcgcaagcttacaaaaatattgataatgacattattaattaatttggtaattgtacaccattattctaattgcttcacgatcacaacacggcaaagaaccacctctgtgtggtcgatatttttcttattaaatccatttgtgaattaaatatgttacaatttatttgcactttcattttggtggtatttttttattaaaaaaaatgcttaaatgcctaaaaaaaagtttggcagaaaataaattaaaggagtcaattagtcgacgctatggaccagatttcataaacaaaataatgtcattttcaattgttggttttaaaataaataaatttgtgattctgcggcgacagtagtgctacggtttccgttttaacgtgacaagtttgagtaggggtgttcgtggtgtgggtagtgcagtttttgactattttttca

SEQ ID NO: 26965 - DNA, 1984 bp, Cannabis sativa
  modified_base (1003)..(1005): a, c, t, g, unknown or other
tggatcgtagaaatagcataccttgttaattggaaaaatgactatccccatccaatattgtctgtagaaatacatattatgtcattatttattattggaaaaataaaaaattaaaaatcaaagaataacactatcactcactagaagttatatatggtacgcataagaacattcttttgtttgctacgcctaagtgtttagacaaaaatttgctccgattctcagtattatgcatttttacatcaaacttcgaagggtctataaaactttagtaccctatctcaatagtttactggagacccattgagatcaggtccccaattttttttctaatttattttttaaaaaatcaccaatgtcggtggtttcgtgtgtaaccgtcgagattggtatctatctccgcagttacacacagaaccgttaagatcagggtggcgagtttgcccaattttttagtagtcatgactacagtgtaagatattttttgaagtggataatcgagatgagtaaaatgtgaagatgtaaatgctagatttatgcagcaatagtagctgctgccgcttatgacatttggggatgtaggaaccaatgtaagtattttggtatcaaagtgtgtagtgctttcattgttaagcaaattaaatttgagataagaagtaagattcattttcagctatcaaaacaactttctgttatagatagagaatgaattgttcaagtatgtattcatcagatagatcttttcaggcccaaagagtgttattagtttgtatataatactatatatggttgaaatatataaaataaaaaattaggaaaattctatgcaccctcttaaaatttattccgatatatttttatcttttggtatccgaaataaatttttaatcaaattttttttctattatacttatttaagacatcctgcaaaattttaaaaattcggaaaaatttaacacaccaaaaattgcgttcaagtagtgtgttgcacgcgtgactattnnnttttatacgcgtgtaaaataaattgtttggacattgttttccatattacaaattattccgaatttcttaaaattttgtaggatatcttaaatatctataacgtacatgaatataaaaaaaaattagactaaaatttttttctagatgccgaaacaaatagatagtgcatcaatatattccttttaaaaaagtgtattgtagaatcaccaaaaaaaaaaaattatatttagatcgataattttgaatacatttgacacgtagtagtttgtagactcagtatttaaatacatgcatatgcatgtgcgcgtacgtagacagttggtgcatgaattaattttgacacgtgtttattttgaccatatattatattatatttcactgaccgaccgaattgccttatattttatatatttcattcaattttgtattggaaatgataacataaaatattatttgtcattttcaacgaataatattaattattgacttctaatttatattattttcatagagtcttattttcaattaaattactttcttaaataattaatattaactgtttgattatttaaaacgtattaataatatggttgttcatttatctggcataggtacttagtattatatagtgatcgtattatcctaattaattgtattattagaacatgcttaccaattttcaatgaattcgcgtccttggcccatgggaagttattttattgagtggtgcatggcttttctttacaaaaaataataataataataataataataatttctttgcattggatcccctaaagccaagcatatcatgtaatattatcataaaaaataatattgaagttttgtaattattattttgatctatatcttaatcatttgttattccttatatatatgtagtactgattatttcatattcaaacacaaataaagaaacatggcaaaggagagtaccaccaaatatttttccaatgaa

SEQ ID NO: 26966 - DNA, 1097 bp, Cannabis sativa
  modified_base (46)..(52): a, c, t, g, unknown or other
cttgtaaatcttagcgttctcatatacctttggcaactacttttgnnnnnnnaggaaataacactagtagttaaggtaatttagaatggtgccaaaatggagcagacactggactaatgtgaacttacacacgaaatcgtcaacaaagaaacacgtatgaaaaaagttcgatggtggattgtatccaaggattaagttctaccaatcaaagatcctcgaccaaaattatgtctgaaggtaggtttttgccaatgaattatgtaatttatccaactgcctaatcatttacctgaatgacgatattttattgatcaacagagcaagtacaataaactttagctgaaaaacaaacataatgattactatgttgcttaaatgtagaggaccaaattttttaatggttattttgtcggagcagaaagattttgatatcacagattagaatgaagctattattatttctgacatggggatttacccaaaattttagtatggattatacattatactgaagaaaactatagttacacttgataaacacatcaaaggtgttaacacactaaaggtgaggaaggtttttttcattacataaacgtataatcgggatataataaataaaagaggttataaattaaatatatagaaaagaaaggtaaaaataaaatgggttaacaaaaaaaagaggttttatggaatattacaggagaatttgttttgttttttttttcttagaaaaaatgtaaaataaattaaaattctcatccattgaaagaaaatactctcgagttgcggttcatttttagaactaaaattcaaatacaattctatatccaatttttgcctccaaaactgaaaacgccaaaacttttatgtcttctactctttgtatcatctttctcgccagaagcacacacatcagttcccagtgatcttcaagaatcggcaatctttggcagttgatctttcccatgtaactttctatcttaaaagatggtgttattactctgggtcttgcacatccaaactaggtttcgtccgttgctaaatcctgttgcagttgagcttatatggataaataaataatcaactcgtgtttc

SEQ ID NO: 26967 - DNA, 2739 bp, Cannabis sativa
catttttcagtggaagaaaaagcacaaagtttgttcttctagtcagaaattagggcttttcttattagtaatagattataatgaaattaatactacaataattctctaaatttatattacattaccatatacaattttttactcccattttttttttaaataaattatcttctatcaataccacaaaattaaacaaacttactttttaaatagattaataaatgtataacatagtgggtgtgtgtgtcttagaggtcctgggttcgagtcccaagtaaaacatggttgtaatatataaatgcttaaatcaaaaaaaaaaaattctttttatggatatataaaaaactaataagtaactctgctagggttcctgcttccccttccctttcatccctaaatctcacgatgctctcattggaagaccctacacaagagtcttgcccaaacaacctacccaccatgaatgatttgctggcgttaactcagaaccttcacagacacgacgagcacggttgggaagtcaacattgacgacccatcagagataggtaaactctgtcttcttggtcatttatgtactcaaaagttcttttgtcgatccttactgaaaacaattctttgtcgattgtagaatttgggggagttagaatgggacttgaaaatcaagaagacgactacaacaacaatgctcctaaaatcgtctccttctagtaggagactactctcaattgagtttacctagtgtaatggctactcttctaattttatttatgagaggttggatcctgtgctgagtaatttggtctgggggaatacttttgaggttaataaagtgaaggacttgctagggtggtgctcggaccactgtccattgattcttacttaaagtactattcattctgcccatgatcgaccatgatggatctcccacttctactatgaacaagtgtgggctaaggaggaagattgccacaatattgtcaatgaaatctgggagaacaacttgggtattcacactacagacgacctacatactcaattccagcactgtgggcagctcttggggtgttggaaatcataaaagaaaaaagactctcaagccactacaaaagctctcaaagaaaagctagctaccatgtccaaagctactactactgagaaccttgttgatcttcgatacattgaaaattccgttaatgatcatttgctgaaagatgaaattaattggaagtagaagagctgagccatttttcttaagcatggacaccgaaacaaccgttatttccaccattgctctacttccaagtagaagaaaatgaaattaaaggcctttttgactcttctttcatttggagacagtcaaatggtgacctggaatagattacaagtgatcatttctagtctttatttacttccataggggcccctcctgacttaatcaaccaccttcaaaggtttgtttcgcatcacctcagctctaagcacaatcacatcttacttaaagagtttttagttaaagaggtgacataactttttcccaaatcagccccctgaaggcccctggttaagatgttttacacaaactttttgatgagcatcactaggaaagtataggcaatgatgttatctgcatatgcctggacattgtcaacaataatgcatattgtcgggctctaaataaaatagtggtcatcctcatccctaaagttggttagccatcagtagtaacagattttaggcctataagtctatgcaacgtgagctacaaaataattgtaaaacactcacccaatcacatgaaagctagcctctctaaagtaatatcagaaaacaaaacgcctttatcaaggggtggctcattcaagacaaggccatccttggcttggagagccaacactgtatgaaaaagaggcgatttggtaatgctcggggtttaccgagatttttgaaaattgattatttatatttataagagctaaagaataataattcaaagataaagagattttgaacactcaagattttaatgtggttggggcattaacaagtcttagtccacgagttaatattattactataaggctagaaaagccttagggtttacaagaagatatgaactctctctttttgcatgagcaaataagtaatgaatttctaaccctttgcatgtagggttatttgtgtatttacagtgttgagagatcatcctcattactctttttctactaatgtgatatttacaaataaaatattaattttggacttatctggtgaagcctgacccatggggcgtcttgtgtatgttgatgtggattcaatgtcaaaatcgtgtagtatctttgtgagataaagacacatttattacttgattgccaattaccatttttacatatttagcaagatatggtcttctatccgggattctaagaagataattcctgatctcgtgggatctggaagtaaattggaaactttgcttggctttttgatacttgttaatgacttcttccagctatgcagtttactatattccgggtgtaaaccgtgctagatgggatctcgcctagatggttcgcttgttctttattcgaaaggaccgagtaattattgatctgacccagttatctcattttggctcgctattaggcctcgagcatttaataatggttcgtggagaactagcagaatattaagaatgaacaagttaagtaggaacaacaaatggctaacttgtctcaac

SEQ ID NO: 26968 - DNA, 3443 bp, Cannabis sativa
  modified_base (3384)..(3405): a, c, t, g, unknown or other
atcttgatgatcatcgtcttcaacctcaaaatctccatgaagatgaaagtgaaccagaggaaccagatgatgaagccctttctctttctgaacttcctctaactaataattccaatcaagagtcatccttcaaaactctcactcgtcgatcttcttcagagccaccggaattctttgagtttttcagtgatgtaaattccggcgaaaacatgtcttcggctgaagacattatcttttgtggaagattaataccctttaaagagcagtgttcggaaagtcataataatgataatatgatgtctttaaagaatggtattaattttcccgaagattttctcaagaaacaaacaggtttccggcgacgatcggaatctttatctgatttacagagcagctctgtttctcgatcgaatagtactaaagctatggcgatgaggaacagtcgttctttggattatcagaagcttcggagatctccaaattactcgatggtttctcctgccccgattgatatcgatcgaaattcgtcggtaaagagttcagggaaatcggaatcgccgccgaagaaaccgttccgaccacggtggtcgtcgtttcttatgtttgggatggcaagatttccggcggaaatggaactcagcgatataaaaagccggcaaattcgacggaatccttcaacgctttttccgaccatcgattccgtcagtgggaatttaccggttagccggaactccggttccggcaagacctcatggaagctactcaaggcgttaagctgtaaagaccatgcgagtgttgctgtaacgacgtcgctttgtgtttcgcatgtgtgagttttacttataagagtcacgtgaattgcacgtggtactaatgtttattgattggcctattctaccccatgagttgtggtttcagttttgaacttttgttttatcgccgaagggtaaaatggtcagaacaaaattatatatcacttcttggattgtttgggaaaaatgatatattgatatattattattattatttttttctttgtaattaaaattaagactttacgtagaagttaagcttgggtacagtgtgaggaggagtgtcatatattatttatttatttatttatttttggtgatgatgataatatatattttcatatatatatatttttatttatttttgttaggtggtttatacaaaagaattgaatgaagctcacgagatttttgagtggcataattttatatatatgttttcattttatttttaatatttagtttgtgtaccattcaaaaaaaaaaaaatatttagtttgtgtgaactatatatcatgcatacattaattagattccaacattgtttaggtttttttagcatttattatattcatctaactattttatatattttcaatagtataagatgaaagaaaaaatagaaaataaatataatgaaatgtatcccacaaaaataaaagaaaaagaagaagaagaagttattatatctcaattcactttaaagaaatcatgtattttttacgtatatatattggtaagaatataaacttatttgcatgtgagtataataaaaattaatctctatttcccttcacaaaaaattaattgttatatatatactcttaataagtttagatttttttttttttttttgaattttttacaaaatagaccaaaattttaaaaaaattataaaaatacgttaacataattttttgtccttttaaaaccctaaaccctaaaaataataaataattttttattattttgtatagttgttataagtttatttttttgattattttttgttattttagtatatttatagttgttgttagattgatttattgttgtttttttagttatttcttttactttttcttaaaaaaatatatttttataattttaaaactttaaaaaaatatttttataaataaaaaatctaagtcgtaaaattagaaataatacataaaataaatatatttttgaaaattcctttttttttactcaaaaatataacttttgattgtttgagtggtagtgtaaataaatgtaataggtaatattattagtataaaatatcttattatcttttagtgataactaataatttttaattatatatatataattataaagtattaatatggcagcacgagttgcatgaagctataaaagcaaagttcatttaaaagaaattgttaagataattttaagggatatctaatctaattaatattggaatttagtgtttggaatttggacataagaataattaaaggtggcgtatctattgtcacaaaaagatagttttaattttcaaaatagtaattagttcaaaattaaaaccaacttcatacgtattacttaattccatataatcccatatatgtataataattaatttcatatttttagtaattattattatataaataacctaattatatgtcactaataattatttaattaagtaaaattgacggttgcgtgtcagaattattgaccggcaaatttttatttttagtttgagaattaaatatatttttaagtgtgtgattaaataattataaggttaattatttttttaatgaaaaataataatttttttttttttacaagtctaatacgagtttttcttcttgttaattaaatacagttatatactattactattatacgcaacttgaatattaatgataaaatttggaaattagaaaaaaatagatagattttgagatataatttccttctacttatttatttttgttttttttttttttaaaaaaaaactcatagaagaatagtatatgcatacaattcaatgacaataaaaataaatatgatttagtggtttattaaatttattaaatataatttgtgttcctcacgtataaaggcatgtacatatatttaatttttgaatatatgatgaataattttttataacattttggagtagctacagcattggcttctaataaattataaaaatatatatatatatatatattttttttttattggaaaccttattttataaataaataaatagatatatagtatcagcttaagaatacagaaaacaagattttagtgattattattattagaggcatatttaattttggttgtctataaattaatagttaagtttaattaaacttaaatatttataccttaaattagttatgagcaaagtttagatattaacatacttagacggtaaaagcaatgccctaaaaaatgaaacttatttactttggtatcagacaaaaattaaatgattatagagaagaaattaattaagctataaacaacatttctccatgctaagcataaaaaccatcatcattattattattattannnnnnnnnnnnnnnnnnnnnntattattattatttccactaataataatatgtaccaaa

SEQ ID NO: 26969 - DNA, 9902 bp, Cannabis sativa
ttttgaaatttttatttataaaaatacttttttaataaaaataattttataatttatttatagttgtcatgagattatttttctaattattttttgtttttttataatttatttatggtttttatagtgagtatgaggttgatatctcattattttttaataattttttttaccttttattgagtaaagtatatttttatatttttaaaattttacaagtatatttgtataatttaaaattttagaccataaaattgtaataaaacatgaggaaaaaaatatttttaaaattttctataaaagtatcgaattttacatgatttagtataataatttttattaaatattactaatcgtatataatttaatataataatttttattaaataccacttaccaattttaaaacttcaactctttaattttcttatatataatataaatagcattaatatatttttgagcaagttattatatctttcttcatcctataattatatatggatatgagtgttgttgtatgtcaattaaaaatgacataaaaaaagtgtataccttaggagaaaaatatattcatttcgatatctttataataaatattattttgaaccttatattttataaaaattatttaattattttcgttatgataattttaattttgtattttttaaaatagtactccaagcaaattttttatttaataaaaacttaataataattgaacctcgagattttaagactaaattggttagattttttgtatctattcatgttgaaaattggttttaagttgattttattaaaaaaatgataaaaatcaagctcgggatattattttgtattatttttaaaaaatataaaatctaatttattatttaattaattagagagtacaatcagtaatttttctaaaatataaagtttaaaataatatttattaatatttgtatgattatatatatttgttaaaaattatggttattcttttaaatattttctaacataattatattatgatttgctggtttctataattactttaatatataaatatagatattagagaaaattgcattaattacttttgttaaactatcaaaaaaattattttactaatgaataaatactaaaattttactttttcaaattaaattatgaaacattacttttcttgtactttagtaccaattgttaaattttactcttttgattagttaatattaatcaacatattatttttccttttcatatttttaccataaaaaatataaagttttaatttttatccactaatataaaatggctaaatttatcatatttattatttataaaataatttttatgtaatatgagtgatctaacacctcatgactatatgagggactcataaacaacctttgaaaatatctaaaataaaaaagaaaaccaaccctttaaatttgggaataatccaacggctgagattgatccagccactaatcagtgatcacggcctcaaacacaagtggtgttaaatatctcctaagcaaaaatatctacaaaaaaacaaccccacttgcggagtggggcccacaatgtgccacgtcatcagcccaatctaattcccaatgccatagatcaaatgttaaagcgccattgatcaataccactttttttttatttatttttattatttatttattttggtggtgcaaaattttccttgtaataaaaaataaaaaagaaataatgatttagatattttgtttgtgggtcccacttttaatgtatagacacaaagtttgatacttttaacaacaatccctattcttttgcttatttacctataactttttttaaaaaaagtttcaaaagattttatgttatattgtacagttaataattaaataatttaatttaatttattactacctaaataaatttcaattgatttagattatgaatttttagtttttttaaaaaattaatttaaatatactaataaaaaaataatacgtgaataatattttgacatttaacagttaattatttatagaattttaaaaatataacattaccgctaaaaattaaaattatttaataattaattacttatagaattttaaaaatataacattaccattaaaaatgaaaattaaatattatattgtaaattatttcaaaaattattgtttttctgtagtctgtctattttgtaataaaaaaataatttttatttttatttaaaataaaaaaaatcaaaatgttttaagatataacttgttttaagaaattaaataactaataattaaaatatattgtttcttttttttctatttttttaagaaaaagcaccctctatgtttcttctgtctaatttaattatgagtaaaacaaatattcaaattgtgttgtttttttgtgtgtgtttatatagctattgtttaaatttttttcagatattttacaacttttatttatctattagtggaagatattataaaattgtgtaaattatcctaagataaaggactattttgttatttcactaaaaatagatatttctttcctttggagtactccaaagtccattaacgacggctgtctttttttaaggacacgattgtgccacgtgtcaaatcatcaaaggagaaaatttactctcgtggccactaaatttggtcaaaacgctatctttcttttttttaaaatataaatttaggcgcgtgagacttttgacccactcgccatctcattggtcgttaaaaatctttaaaaggattggctggcggtgatttttagacggtctaaaattacgataatatccacgaatgtgtgacacgtggcatcctcgtatagtggtgcggcgaatataagtgatcgatgttaaggcgtagctgacatgagtttgaggttgtttagtggccctaatttttccacgtgaccgttatagccttggatatctatattgactaatttgtttattgtcacgtgacatgacgtaacatcgtacacgtgactttttatttaagtttcctcttttttatgagatagtaaataataaaataagtaccaaaagttttatgtttgtaagcggtataaattcaatatttaattttagcggtataagtacttaatgtttgtgaaactgtaatttttctctgattatgattcggttattatcttaaacatggcatatataagacctaaattcttaatcattgggtctagatagaaatatatagtatcagttagttccaaatgttattttgataaatttaaaatagagtctgtactaacgaaactagataaaaattatagttttacaaacattaggtactttatgccactaaaaataaacattaagtttatgccgtttacaaacataaaattttaactacttatgtcactatttagcattgtttctaacatatgaatacaagcacgataaagataaatgaataggattttttataagctttaatatattttaatattatgatattaccatcaattatttaatttattaatgaacattgatggtattttattttttataataatttattttttaaaatgttattgtacattggagtatcataataaatatagtattgattgagatttttggcaactaatttatcgagtgattaatttttttaaaaattaaaatcatgtctttattaaaagataacctctattaccaaatgaggtaacaaaacaattagaatagacgacttaaaacgataatcagggcataatatagcagcttttgtaaataaatgagccaccatatttgctagttgtttaacaaaatgaattgaaacacttctcagagaattaagtatagccttacaaccattaatcacttgaccgaatgtggaaatcataacaatatagctacgaattgcttgcacaacagagagacagtccgttttgaaaatcacctgtgaccattgatgattttttatccaactcagtgcttctcaaatccccattgctttggcaacttcaggagaactcgacccctggaatagctttgtgcaaccttctatcaagaactcacctgaattgtgtgccacatacccagcaccaaaactccaggcatcctcaaacaaagccgcatcaacattgatcttaatactatcaacatgtgggactacccattgctcagccctatctcccgataagaaatcagcaaacaaaggatctagatgttaattttgagcaagtagtcattgcttaagatagtttgttgctgaagaaacgatgctttcgacacccacaatcttatttcaccaaaccttgtcattccttgcattccatatggcccagcaaatagccaccaacaactaaatacgatctgtttccaacaccaaaaactgagaaatacaccagccaagaaaagaggtacccgactgcaatgtggtacatatcccccacccgattcccgcacatagttgggcttgaagctaaagcatgtatgattgtttcatcctcaagtgaacatcttggacaaagattagcaacatcaacatgctttgatcttagctgaaccatggttggaaggcaacatttaccagctctccacaaaagatttttcattttggggggaactttgatctgccaaagcttcttccaaaactactcctccaacacatcatcgacattagcgacactaatcatctcttagagcagccggtaagcactttttacggtgtataaaccaaacaactccttagaccagctcaagatatcagcaccactcgtcacaggtagcaataggataagatgtcgatccctctattcaaacagattggcaccaatttcttcaacccaactcgagccatcaactgtcataatgttacacaccttagcatgtatgagacttgggtgattagaaattaccatggggttagtctcatcgggcagccaaggttcgctgaacaccgatatatccccactgttcccgactgtacaatgagtccctttgataactaaattttgcgcctccaagacacttcgccaaacaaagcttgggttggagccaatagtagcagtcagatacgatccatgagggtagtatcttgcattaaaaatctgagcaacaagagactcaggtttagtaatgagcctccagccttgcttgcctaagagcaccaaattaaagtcctgtaagtttcaaaatcccatttcgcccttactttatggcttcaaagccgcttccatcgagtggttaatgttaatagagtgtataagtagtgaaatttctacgtgattcatgcattaaaaagtcttagtccacaagtcacttgtattgaaattgagagttataattatgacagagtgtttagacgatttgacaacctttatctaaaattcttcccccttttatagtggacatgtcttcctatttataaaaaaaaaatgtggcttattcaagaaggcaaaggcccatttatcttacaatcactactacgaaaaagattttttgtgttggtcaatgtgtttggttaaagtcattgaccggcgtaaaagttaaccctcacttttttgcttttattggtaacatatgcaaataatgattaatttgcttcagttgtaactctgacactaaaataaaaactaacgctaaagatataaaattaaaaaaaaaataatatcaataagcttttaccgtcgatcaatatttaaagcaaaaatggttagcttctattgctaactaacgctaaagtgggtatcttttattgataactgacgcttaaggcgtcttcttttacaaaaataataaaaaataaataaaagaatcatcagttatggttttcggcccatttaaagaaaaacccctaatataaacctaacattataacctaaccctctagttgcccactattctctctctgttgcaccgtggaagctttctccctcatttttttttctttccttggttgttagatccagatctagatctagatggtgctaggtgagattaatctagtttagaattttttttttagtattttttgttcacattggttcgtaattgaagcaaagaattaatttacatcgccgcactactatttgcatcgatcatgaaatgaagcaaaaaaaaaaaaaaatacatcgattaagaactaaagtaaaaataacaatatttgtgtttatagctataacgtcggtcacactaactcacacaaatattttatatgttacttaaaaatcgtagcaaaaaactttttttgtagtagtgaattctctttttggttgtattgactgaggattgtttccttagtgtggagggttttccctcttcacgagcttgcagactagggccaagataggtgtttggtgagaaaggacagggcatgtctgtagttgatgtgactactgagggcatgagcttcatatacacaattgtgaaaaatacatgttagaaagggagcaatgaaaatttctaagttatttatttacttttgtgggaaactcattttttcgcttgtacataagggatatgctacaatattttttctaataatgcactacgaaggttggggcgacatgcatcggggggatccgaggggtcttgaccttcccagatgttatttcccctttatattttacttacgtaattttttgggttgacgcgactctccgggagggtgctttcctctcagagctacttgcacttttcccaagaaataattattactaagtgtcttaagtcagacccctcttgccacatggctaactctctaagtgccatgtggatggtctaaattttggaataacatatagcatatctatttttgtgttaaatttaatataatatataaattttaccctagttatggtcttaaatcaacaggaaaatttaattttttatgcatatattactctaaaattaatccgttaaacccatatgtattaatattagccaaataggtcaacatttctttttttttttctcaaaataccctccccattttcaaacagccactatctctctaccctctttccctctctcggtctcttcatcttctctgaatgaaaactcgaacccctaccaattttccatccgaggattcacgcaacccaccacgacccacgacccaaacaccatccttctctaccacccacgacgactgtgaatgacgaccaccgtgactgacgaactgaagacctatttctccacgaccaccgcgacccacagacccaatgtcaaagttagtgtttttgaatctgtgatttttgagttagaaaatacattttctaggtagcccagatacatgtttgatgcatccctgatgtaggcccgatacatcatgatgtaaaaattggatctgggttgaagacaaatgctcgatatagggcctgatagggtccgatatagagcccgatagggcccgatggggcccaatggccagtgaatatttttcagaaaaattgactggccattaggccccatcgagttctatatcgagcttttatcttcaaccaagatccaattttttcatcacgatgcatcgggtctgcatcgagaatgcatcgagcttgcctagaaaatgcattctctaaagcagaaatcatagattcaaatctaaccctaatctaatccaaaatgtacatatcagaccttaaatctatcaataaataatattttaaccctaaatcaataagaaaaacattcaaaataccatagggggaaatcttaccttggtagttgttcgtcttcatggtgggtcgactcggtggtgggtggagtgggtcttcgtcctcaccatgtggtgctcagatggtgggttcggttggttggacaaagttcgagagaaagagagataggagaggaagagagagagtcagtttttagaatgagaggggtaaataggtttttagtaaaaattaatctattttacaaattttgaatagttttgaattagtgaattaattttagttattaatattacattgctaaaatatatcatactttataaagaaaattaaaaattattccaatagtatatcaaaaatcatgttaaatttgatacatactaaaaattatattgaattgacacgtaccaaaaactgtactaaaataagaataaataaaagtcaagttgtgctaaaatatgtaataaaatcctatttgaataaaaaagaaattaaaaattagtggaaggttgatagtgactttagacttatcacccccatcaagtagacaagggtcaataatgtctcatttatattgttgggcatatttctctattctacaatcaataaaaacaaatatctacatctaatcctagaaaatcaaaaacctataaatgttcacttttttttccttaagaaactcattcaacattaatcatattaattaattaagatttttttgggtgagagaatgagagaggttgatcggaaagagacaatacataataattatactcaaacttattttttataaatgctttttaattacttttataaacgaaatgaatggctaataaattaattaatatatagttagacacaaaatcctcttaaatattttagaagtcatgtttaaattttaattgttcaatttcattaaaaagatgttttgatacatttttatctgcttcgatatacaaaccagtttattagttcaatttttattttataattatgtatgatgtaattatttagaatcacttataaattttttaaaaattctgaataatttataataccaaaaataatattcaaatatttaattacatgtgtgactatttttttctcatacgtgtagtaagaaattatttaaattttattttaattctataatctattcaaaaaaaatttaaaatttgtaaatgctcctaataaattactaatatacatattcgtcaaaataaattggattaaaaaaattcttcttacatgccaatatacatatagtacgtaccaaaataattttttaaggagatgtactgatttttcctatattttttataattataattatttttatttttatcatagatagatgtaaagaacttttgcaggttcatattaaaagccatgcagttctatgtattaaattaaaaattatttcttctataaaataatttcggaaataaatatcaaaagtttagcaaaaatctacactatacctcccaaaaaattgttctagtatatatttgtttggacatgcataaaatcttttcagtttaattctttttttatagccgtgtatattgtatttatttaaaattatttataaattttataaagaatttttaatatttataatgccgaaaataaaattaaaatatttttttacacttatagttattttttttcatataagtaattattttaactttatttttaatattataaattatttataatttttttaaaaaaattataagtaattttaaataactacaaagcatacaattataaatatatatatatatatatatatataaagctctcttaaataccgaaagattttaataaagagttaataaagagtgtatcaaacaaccttttgaaagattttactatacacttaccctataattttaagtaatgatattgtcaatttgaacctttttattttttattttttatcctcccttaattaaaaatacatgcataatgaaagcaataaaaatgtatttttttcttggtgtaatagatgaattaatgtaccatcttgaagtatataggaaaaagaaatgaagatgttttctagtgtccaaaaagaatatatataatgaattctttttaaggacatttgttgttgtgagtaatacacaactttagctttcaaggctatataacatgctatgttcatatatatatatatatatatatactagttaagagttacgtgcagaggcacgtaaatattagttttagttgaagtttagttt

SEQ ID NO: 26970 - DNA, 5604 bp, Cannabis sativa
tggttagatgttagataatgccatatgccatattatatttagtgtagtgacatttactttttatgccatatttatcataaccttaataatttttcccatatttttgaaattagcccttttttctttaatgcttttcaattttttttaatgaacccaacttttcaagggactaataacttgatattggacacttccatcttaatttccaaagcccatttttaattctattactgttttaaacaaaaaaaattgttattttactttttttttttcaaacatttcatattctttttttttttaattattgtattggaatcaataataattttaataaaataattagaatttttagtgttttgtaaaatatataatcgtatgataataattaaaaatattttttataaattatattttttttgtaagggcccaattttaaaaattggaacaaggcttctaaaatatttaagacggcactgtctgaacataggagggctaggcttgtgtctatagtccacctagctcaagagcgcaatatttttcccttttaaattttacattttttactgattttaaaaaataccacattttttaaaaaaaataaaggcctaaaaatatttttttcttatgacccactaaatttcagggccaagtttggtgtgggctatactatttgcagaatgcagaaggtcataacaagaaccaccaacaacaacaattaagcagcaaataaattaataatattattgagcaaaagcagaattactagaaggttttgaaatccaagagacaacaattgtagaatcacactccccaccgaagatcgcaagatgctcaaaccacaacaactggaaacgaccccaacctccccgccgctgaagccaccctaacaaccacattagcatctcagattactctaccctaaccctcacaattcctctctaccacaacagatgcattcgtgcttaaagagaaggtgcctacctctggcaaaacccatctcctacactgtcgttctgtccactacacctcgctctaaggcggccgtttagtttaaatgttgagaaatattacatatgaattagtagacccaaagtccctagttattgtcccttaaagaaaagttactaaatcgagaatggggaaattttatggtgcattcctcaaataggtatttttttgatgcaccactttgtattttcgatacctaaatagttttatttttaaatatttttatataataatgtaaatcgtatgtaattatttaagtcatcctcgaagtatttgtgaagtttaaaataataattcaacatgtcaaacaaggttaaaaaaaaagagttataatttgtagatccaattggattttgataaaagtataaattatgattttaggttataaggatcacggatatcatgatccattgttttttttaagtgtaggacatttattatatttgggaaaagaaaagggtaataaaaagtgtttttttgtgtctaattaataacatcacaaattttattgaattttcttgagggataaatctaaaactagaattttaattaatgatttgtaccacttttcatatggttttaccaataaaccacgtgttgcggttaccttaaaaaaacagtgtagtttaataataggctatataaaaagtggcacaaatgaattaaaatactattttttttgtaaatgttttacatttttatgttttttttttttaattttttacaatgctatataaaaacaatacgaaaataataatataaaataacaacaaaaaataacatacaaataaaaaaaattaataagtatgcaacataaaaatacatcaaaagactgtattttttgtaaataaaattgtacaaatatttaaatatttaaaatcattacaactatatttatgtaactttttttattatttttgtgtatttataaaataatcccttaaaacaattatggcatagatgaattattacgaggatattagattttatatcctttttatattgtcctgttttatttttatcctcttttttaaaatctatcatttttacttttttttttctaaataatttatcaattttgtcactatcacttcaatatactctccatttaatataaattagagataaacttagttaattaagagagaattttcaatttatctaaacattttcttatgggcctaagaaggcccaatattgcatgggaatgaatagaattctacccaccataaaaaacaatttaagcacacttaaatttctttcttttccatatacaatgatactaaatgtatgtacatatttacacttgcagtttgtaactaccaaaaatgctacgaccaaagaaaattgcaaatattaagtgccatcttagttaaagacaatagttgcaaaatgtcttaaactcagtaacattggttttatcatattgcccacaaatgaaactaacatccacactcaacaatttcaacaccagtaaggttccataaacgtttttgcttcaaactcagcagaattttccatgaacacttactgttaccgtcggttgatcaacaagaccagtaacatctaatgtcttaagagagtatgaattcgaacttctaggcccgggatgggagcacggcacccaatttcgtcggttattaattctaaggttgttttggacaaaaataagatcttcaactctctctaccccaaatctattggcagtctctcgatgtggtaaaccattctcttggaagatctcttgacacattgtaacacttgaaacttgacttaaaacttttgttgctagtgtttgcaagtggggtgtttcaaaaccgaaattttcccaccatacaaccgggtccatcttatctctacaatcgacagcatcttcgtctcttaaagagccttctaatcgccagtaagagctgagttgctctctgagaattcgtctgtttgcactatcactctcgtatctttccacggtagctttccaaccccgcatcacgattttatccttagcttgactttttccgaaatatctaggattcaatatgtaaccagctgcatgaaggggtgaaaacaatgcatcccatctattctctataagttcttccaattgattcaacatgacaccaccaagtcccttactcctaacagcttcaagcgactgaacccgccaattacaaatatcacccaagatgagagtaccgatatcaattgtgccaagtaatctgacgaatggctcaaacaactgcaacaaaaaatgagcactgttccagaaattatcccctaaaaccgcagcttcaatatttacaatttcctctgatgtatttagtttccactgtttccactcctcagttacaactacctcttgaagtggttgcttcagctcaaagattctttggattacacaaaagaaaggtgtgaacttcacagcaagcaggtcttgacaccctttaaggttttgagtaaacatagatggagaaaaatgctggaatgtaagcatgcattgctctatttccttggcacataagacaactgattttatccaatccaattcagctatttcttcaaacaacatatgaatagactgagatgtgcatggagatataaacacttgtggaaactttgtcaataaaagagagccatataactgattagaattttctaaatgtgagattatctgaagcacatttgcagcaccaacttccataatcacatcactaagaacactcacaaaatgattattatcttcccctgccccaatagtatcatcatctatatctactgctttcatgaacacaagtccccttggacaagacacaaatatattaacataaaaacaaccaagcatactttcataccgaccgagacacaaaatggtgcatccagtgtgaggccaagactccctaattagttcaacatatttttcaattctccccttctctttacttagaaatgaatcagataactcatctatcggcggaggttcataaccggggccactagctccaatagctttcgccatttccctaaagtaaggagaactaacaacattaacatttaagccattggcataaatgaatcttgcaacaatatcatcaacatcttctttcccaacacaagtactgctactactactactaggccgacgagatgccctaatccgctgcttcccactgagcttatcgcccccagaaactcgcttcttcttacgggcaattcgctcttcctctaaaatttgaaatgcctctcttaaagacctatctatagcaggacaacttttgacaccaacacctgtaaatccaagcaaatgggctctaactcttgaataagaaccattgtatcttagattacaatgattgcatttccatcttttagtaccacttcccttgtcaaacccaccaaacacactcacatgcttccatccccatttctcacattctggtggcatagttcaagttttttcactattgaaaaaaaaaaccctaaatttatagaagaaaaataaaaattcaatctttacagctgtaaaattttcttctatatcaattgttatacaaaatgaatattaatttgaatcagaaaatataccatatataaatttcttgttttgagattaggtatcttccaatttgtacatgaattatttaacctaaattaaatatgaaaaattgacgaaccatagggaggttgatcgggaagaaggtgtttgcagtgccctaaaaggtccaagcttcttcatcggccatgcccaggtaaacagaaaattgcagaaaactcatgcgtggaagaattggaggcgcttgaagaagaagatgaagatgaaaaagggctcatcatttgaattgttatatttttttttattttttttaaatggtaataaaaatcattgaaacatacacattcttacttcatgtttacaaaaataccaccaaggcataattttattttattattataaaaataatttgtttttggaaatttatgtagtaccaccttaaaggctccatctagtaaattttatatttatttggatatttatgattgcattcattttagtaatttaagatgattttgagaaaattttaaatagttgaaattgtttggtttcataatttgaaaattgtttttaatttttaaaatagagaataatttttaaaaactaagaggagtgtttgaccaaattatttaaaaatagatttttgaaaattgagttttaaaaaattagaaacaaaatacatcaaaatatcatttttttaaataattttttttttgtctaacatactttattttatttttttgctcatataatcgaacttggatcctgattcggacccggggcatgagttagggcgtgtgatgagtttgtgtcgtggtatgatgtagttttaaaaaaaacatgagtcaaatgccattaaaattttataatgacaaaaaatattttcaattctcatcgtaaaaattttgaaaactaaaaatttaaaatacagccaaatagtctcttaaagcgtgtttggccatattttttaaaacaattttcaagaaaataagaattttaagagcaacataatgtactttttgtcaatatttcttctctactttatttaa

SEQ ID NO: 26971 - DNA, 2120 bp, Cannabis sativa
tttttttttttttgaaggaactaagagttcattagtaaagatagttgggaatcacaactggagatccctcccgatagtacatagcattaccaggaccgttaattctggccattttagccaccttatttgtggcaagattgtcttctcttttaataaacttaaaattacaaacattgaaatgacaagaaagcaaacggattaggttgacttttaaaagtttacattgtatattatggaatagaatgcacactattttaactaaaaaaagttctttaattttgttagaacttttctaaaagaattagaagaaatattgattggtcaatctttagattttgtacaattttcataaaataataataataattataatattaaattgtttaggatcaaaattttgttgcatttatacaataaaaatggtcatttacaaaaatctatgactctgttgtaatgtcgattaaattttctattactatgttgctataaaatttttctattattattatgttgattagattttgtataagaaaaaaaaaatacattactgtatttatttatatactaaatagtatacattattatggaataacatttatagactgtatttatttatttatttatttatagtcttacgaattcacatatattgttctcttgttattttgttgttaattttttgttatttatatatatttttatgtagttttgatgttgttatcctgttacttttatgtgatttttttgttgttttatagaatatcgtaaaaatatatatatataaaaaaatttgaacataaaaatataaatattttactaaaaatagcgctttgtataaattttcctttaaaaaaaaaatttgcatcggttggtaaagctcgcatatgcaagctttataaactaacgcaatatatattatggatgtgggtccccgacgcaaaaaggattccatttttaaaattttaagatttttctcgtcttattttttagagaccaattaacaactgacgtaaattaatgataattttgcattagttgaaaagcctggcacatgttcttccctgacctattccgtcagtcaacactgtaaacaattgcacaaatcgacgtaaatagtactttttgtagtaatgttcacccctatttataattgttgggaaaaaacaataaacttcaaacacaacgaaataacaaagaaacaaaacaaaataatttatttaatttggttaaactaccaaacccatgaagagagatatatttcgcttatcactttaaaatttgtgtctcaatctctccaccaaaatcccaatacactctttgcttcttcttcactctcaccacacaacaaactcacacacacttctcttttcacaactcactatttttctccatacacatacctctcttttcacaacaaaatttgaacatcaagacaacttgagtacaagacattccaaaactttcttaaaagacttatcaaaatttggccaccaaaactttttttttctcttaatcaataataactcaaaaaaaaaaaaaaattgcaacttaacaaatgtagatagataaataaataatttgagtaaaataccaacaataatttcccacgtaagacaggctaccaaacttgacaattaaaaaccaaggaagtactgtaccgcttcccttaaacccctacacaacttggtatatatatttagacaacaacacaagcaatggggtcaaaatggagaaaagcattcccaagacatcaaggcttttgaagcacaggttctacttgcattcaatagtttgcatctaattaaaatacttagattcaaaataacataattagttgtttgtataatttaaggtacaaatatgttaataaataatctttctagacacctaagcaattaatataattagtatagttagttaggtataacggcctgatttaacaataatgattataatgatgataaacaataaaaaataataataatacacctcctttttcaaggagtccacattccacgcctaaaccaatcttcacaatatattgtttgcgtggctatattgcactattcatattgattagtcataaatatcattagctaaatcacttatattaacatcta

SEQ ID NO: 26972 - DNA, 2465 bp, Cannabis sativa
tatatatatatattatattctataaaataatatattttttttttgaaaaagtggttagttaatttttttttaatatagttaaatgattattttttgtttcaaaaattattataagcttataattatatttattttatatatataatattagttattttataattattattttaaaactaatttaattttcaaaagttaacctataattataggtggttatatttaattttatttttaattggattatttctccttctctctcagttaaaaaacatacactttctctcttcttgctccaaagcttttggcttttagatttgagctttcatagtgtttgtcaatggctgtttgaactcttaaaatttctttttctttaacttaatattgagttgtatatgttatagagatatcatgtatcttttgaatatatattgattaaaaatgaataaagcacacggcaacaatttccttcatggtatcagagctattggagagactggtggttggatatagatcacccaagctattacatcttcgttgaatggcttgactctcaatcccaaaaccagtccactaaagttctcttttgcttgttctcactttttcaacaataatacagtatatagtttcttaccatacaatagtacaaataaaaaatttgctcaaaacaatataaataaaaagagtttcctatcacactaaaaatgaaatagtttgtaaaaaatagtatattgtgtaaatatcaaaataaataataataataataataaataaagactctttagcttttagtcttatgttaggttgaataaaacaaattttatacttagtatactattaatcaacatgaaacaacataaactaattttttcttcattataaatctaaacaaacaaataaaaagtgatttcgatcgaatctatataatgagattattaattatctagtgtgcaagtgataatttcaaaaggaccatgataatttaaatatttttcattttgctggcacatcattaaaatactatatataatcatgtggaaaagaaaaagaagaaatttttaaaaaagaaaaataataagagacctttattatgatgtaatatgttttgatatgtacccctacttcatagacactcttgcttaaattgtcttaattattttcttttattgtataattggtatttggtttttctcttacgtacattcatgatcagtttccttataccagctatgctttttattaattaattttcattcaaattaccaagttgttgcttatgatcgaatagagattgaccaatatttctcatcagacaacaaacataatcttacaccttacaaaagaatgtcggaagaatctaagagaaaaaaacaaattaagatatattgttcttcttttaccttagattttcaatatatttatgaaatcctttaaatggttttgtttggagtcttttacaatttctattcttggctctaaaagacatcagaaatctaatacatattatatttacttttttttcaatatatattttataactttttacctttagcttttaattatatggagacctttaaatggttttgtttggagtattcttttacaatttctattcatggccgtaaaatacatcatgaatctaatacatatatttatttacctttgtagtggagtgagacctttttataacatgaaaaaaacttaaaggttgggtagaaaatttgtgttattgtattatgttcgtaataatacaattaagataattatatcgatcaacacgatatgattattaaatgtttcaaaattattaattaaatactatacgacgccatgacacaattaatatttcacaatgtacaatacaaacacaaacacttatgaaacctatgataattaatttgaattacaagatcatatcattagacagttattaaacatgtcaatatgattataacactaaataaataaaaatacaacatgattattaaacatgtccaaaaaaactcaaacactaaatatacgataattattaaacacatattatccaaactcatttatttattttatcgtattgtgagaatatctggaggtttggagaagagtagcataaagttgagcactacaacatgttcatggaattaattatgtatggcttattaagattggatcaaactatattaatagtgggtaggtttattaattattagcaaaaacaaatgtcaaagagtgaaagagaggaatttctttttcaattttatttgaaaagcattatccatttttttttttaaaaaaaaaaaaaagttagcactgcaatttatatgatcatcacccaaaataaaaagaaaatattaccatcattttcaaacccaaaatcattggtgtaattattcacaagtccccactccttacaaaatatcctccaagatcaaaaggggtgtttgaaagaaaagaaaagagaaaatata

SEQ ID NO: 26973 - DNA, 3258 bp, Cannabis sativa
  modified_base (2769)..(2769): a, c, t, g, unknown or other
ttttaaatagcaactcaattcagtctttcaacttaaagaccttgatcctttatgttttttcttaggtttggagaattgtcgttcctcaactagaatttcggtatcccaatgaccattcaccgtataagttttgactgaaacagtttacttatgagcttacatatcttctacacccatggagcctaacattctttcatccgacgttggggaaccattggaaaatccgaaagcttattggtaaattgatttacttaacttttacatgccttgagatttccttcattgtgaataagttaagtcagtttttatctaatcttagagttcctcatcttacggtcgctcatattacaatatcttaaagaaacttctggccaaggattattctttcattcagcatctttcactaacttatgtgcatatgctgaaactaacatgtccaatgcagactttcatcttaaaaatttcaaaagccaattcggcttcatgtagtgacacaacaaggtttgtttctggctactttgtcttccttggtaaatcattaatctcttgaaaatccaaaaaggtaatccacaatctcttgttcatcggcggaagcagaatattgggtcatggctaatgccacctgtgaaactacctagctgctagcactactttgggatttcagcaccaaccatcaaactcctgccatcttatattgtgataacacggtttccattcaatcttcgagaacccagtattctacgaacaaacaaagacattgacatagaatgtcatgtcgtccaggagaagatccaagaaggaaaattgaaactcatccatgttacaaccaaaataatatagctgatatatatttacaaagtctttatttttctagttacttccacactcttgtatccaagatgaacatgaaaaatttatatatttcatcttgagaaggggtattatatttgataatttcttcttattttaggcttctctcttactttcagcacatgtattttgggcccagtatataagggacctctctttagttgtaacatacacctttcgacatttcgttcttttcaaagatttgagaaagagtttcctctctattagctattgaatggaagatttaagaaaccatttgagtcaaatttagatggccagcctcagaaaatatcttaatggaaaggaataactctcttgagtgtcaacgataataatatgtccatattaaaggtagagttgggatgaatcaaaacttaccttgtaataaggtaaaatatgaacgaacttcaactagatgatcatgtgaaaaacaaaattgtctcattagagcaatagctaaagcaactcgtgaatgaaaagaaaattttccaaactacatgtcaaatgaggaaccataaccacactcgacaatacaaatttgaaatatatatgtatgtataccaatgctggtatacaaaacatatccacctataaacaaagactattcctaaatggcacaaattgacgataagaaaacaaatcaagattactacttaaagcatataataatagtagctctctcttaaagatattttaatcgatctacaatttatacaaatctcatagtgaagatgatccaaacaaaacatatccacttgaaaacaaagattattcccaaataggatagacacaaactaacgataggaaaacaaatcaaaattaatatttaaagcatataatagtaggtctcttttaaatatattttaatcgatctacaatgttctaaatcatattactggcattattaaaaagtgaattgaacataaaaaaaatcctacaaaaatagcaaatatcatgatacttgaaaaacaagataagaattgaggtgttcatctaatctaatatacactattttgcttataatactagcaccaagtgcttattttatagtttggatttaattcaatgtgcggaaccgttcaaattcaatccacaataatgttaaaaataacacacaatcgtatactacaactaattaatcatatatttatttttgagaaaaaaaaaatatatatatatatattactgtttttttagaagaaaggcatcaaaagaaactacaatccaagtaaataagcttaaaagaaagggtaacgacactgattcattgatcaacaaactcattgagaattaggggataaatacatacagtagaacctctatctaaaaatacacttgtgaccaagaaaattaaattctaattgagaagttataactaaatagagttatagtacaaaaaaaaaattaaaataccaaaaaatatcaatgttataataataacaataaataatcattagtactatatcataataaaattattttaaagtaaatatcatgtttatacatgtattataatttggaataaaattattgattttacgtaaataaatttataaaatatatgtgtatattgagttttaggagatacatatgttgtattaatttctgttagtttctttcacaatttttttttcatatattaccatggttgtaagtttgtaattgtactctttattactctgaataaaactatatttattgttataattatttttttcaatcataagaaaaagtattattgtaaatcattgtgaaagatatagtaataatgatattttaattttatgaacatgataacataatacaaaaaaaaaaagtgttatggagtatattcaatagtgtttatgatataagtgacaaaaggtattataaatattaaaataataatgatattttaancttatgaaaataatagaataatacataatatatattaagtagaaaaaatttatttatgacttgttcctctaaattttctataagtaaatattaaatattatttagttatgacttatatatacccaaatttatttgaataactaattataatagcacaaatattactttaataaaataaatcattcatatgatcattaccttcacgtacaatctaaataagaaaaaataaaaaaaaaacttaaattttacctaaaactaatatttacgtgcctcggcacgtaactcctacctagtttataaaatataggggtctttttaatattataccaaaaactgattttatttataaaaataacttcaacaattttttttgcgtaaataccgatgtgccacgtcagcataaataccgaaattcaaaattattaccgaaaataggaaaaacttgaaaattctcgcttccagaattttcagtgttttgcaagttttaaa

SEQ ID NO: 26974 - DNA, 2685 bp, Cannabis sativa
  modified_base (28)..(28): a, c, t, g, unknown or other
tttagaaacttaaaccgtaaatttaaanaaaaaaaaaaaactaaaaaaaatagtatatggagtaattcccctaaaaatattttatttgtatatatatgatatgtaaaataatcttatatttacatggtaattctatttatacagggagaaacatgtacaagtagattgaatgagctagaggcaaatgtgaaagagatattgttagttgagatgaaatctaactctttagctcaacttgagtttattgatgcattgcaaagacttggattatcttaccgtttcgagactgaaataaacactattttaaatgaaaagtactccggtaatattatcgataaccctaattataatttgtacgccacagctctcgaattcaggcttctacgccatcatggttatgatgtatctcaaggtaatgtatttcgttatgaattgcatgtttcgttttattgtaattataagagcactctcatcagtttttttatattttatattttaaaatacatcataaaaatatacttcaacttcttgaaaataatacatcattagatattcccatattaaagaaaattttaaaatctaaaataattaataaaatatatttaaaacaataaataagatctataaatatatagaacatgaatatattaaattctaaagaaatttttaactgagaagaaaaactttagagcatccaatgtaatttttttttaagtttagcttttcaaatatttttaagaatcgctattttaaaacatacgatgtgagtactctaataaaataataaatatccatatttcaaccaatgattcaatcgacggtttaattaaacagagttcgatctataatattattaattaataataatttatcattgcagaaattttcaatgtgtttaaggatgagattacaagcaagttcaaggcaagaacgagtggcgaagatataattggagtattggctttatacgaagcttcattctatggcaaaaaaagtgaaagtattttggaagaagctagggtttcctcaatcgaatgtctcgaaaattacgtagcaactatgacgatggagcgaaacaaaccatcattattagtcaatgattatgatgatgataataatatgttattattagtgaatcatgccttggagcttccactttattggagaataacaagatcagaagcaaggtggttcattgatttatatgaaaaaaatcataacatgaattctactttgcttgaatttgccaaattggattacaacatggtacaatccatatatcaagaagatctaaaacatctctcaaggtaaattaattatgatcttaaatattttttataaatcaaattaattagttcacatcaattttaatgaatattaaatggatagccactacaaaaaattactaaaaaattaggagcgaaaaaagtcgcttctaaaatttattaggagactaattattaggagttaatctttattattatttaacaacaattaactttgttgctcctaatagttattactttattatattaagaaacaaaaagtcgcacctaataacagtttagagcgactaataataaaaattatcgctaataaaattatcaatatttatcaatattggattatagattattaaatttgttaactagtatctatagagtatataacatgatgataagacctagtgccttttccatcacgttttgcgtcggtggtataggcgtcgattttaagactcatagtaaaacttctctattgtacgatcaggaaatcccttttttagtattgatgtcaatatatatatatatatatatgtttatttatgtatatatatgtgtgtatgtcaaaggtggtggagccatacaaaacttggagagaaaatggatttctttagagatagattaatggagtgtttcttatggactgtgggaatagcatgtgagccagaaaaaagctattatagaagaatgtctggaagattatatgttctaataacaacaattgatgatatatatgatgtttatggaacattggaggaattagagcttttcactaatgctgttgagaggtaaatataaatagaaatactatttgatattgattatttttagtacatagataagttatatataactcttttatgttttatatttataattttacagtttaaaatttttaattaaaaaaatacacttgtaaagttttaaattataaaaatacattttgttcagcaaaaagtaaaaaataacgagaaattacgataactataaataaactataaaacaacaaaaaaaatcatttattatttatattgaagaggtatttttgtaaataaaaatattcataaagtacaaaattaaaaaaattgtatagacatatttttgtaatttttgtcaaattttttgtgtaaattttactatagttacacaccgaggatgtgccacaaatatttttataaattttggataatttaggatagcaaaatcagaatttgttatttttttgcttattttgatatatttttatacaaaattgtatgtttggatatcttgatttttagtattttaaattattcggaattttttgaaaaaatttatagaaaatctcatatgtaattcatataataatgatgtttttttttttattacaaaaattaaattggttttgtagatgggatgtgaa

SEQ ID NO: 26975 - DNA, 2951 bp, Cannabis sativa
  modified_base (1692)..(1693): a, c, t, g, unknown or other
cttaaaccctacgttttttttttttgacagggtttaaaatatataatttttttttttgaaaaggaatatatatattaatacattctatattcatgtatttgagttgtctaaattaaataatggtactagctaacctattaattatgattcttccatttgcttaagtagcttattacttttataatgaccataagattaagattattaaaaattggttaccatatactaattaatttggttttgtggtcataatcatgaagctgaccaaaaaaaagttgtgatcaaaaagcttataataaaaaagtgagtattaggaagatgtagttttctataagaactttccaatattattattctcaattatacatactacttttattaaattttccccaatttttttttttttaaatggtgttttttcccttgaaaataattggaaattaataaatcactacattattatttccgcaaagaacgatcgttgtttcttcttcatgatacaataattaatgctacatattatatatatttatagagaagcatttaaaagagaaaagagaaaaagagagtgaaaaatatataaataaaagaaagcaaaaagatgaaaagaaattgagagagaggagaggagatgcatcttatctctaatttttaatatatatgaaatatgatgatgataatgatgatgatgatgggcaacccaaagaagtgtatatgagatggactaaatagcaattgtgaatacaagggcatgattttatgcaccatcttctcatgatttaagccactcattatcattatatatatataataaatgtacatagatacatatatagattagtttttgagaattgatagaaatatatatatatatatattacaaccttatgcatatattatatagtatcaaacaatgtatgtacagtacatgcactacatatgtatatataatgtatgtgaaaatattcacggatctatcaaaaatatatgtattgttttaatataatatatatgaagaataataaagaatatgcagatatataaaaataaaataaaaaacaaagagaagaaaaaataataaggggggaacatgcatggatatatgcatgctccaaatatgctcaatgaattttccaagaaactttttggtagtttaaaaaaacgaattttaaattaattaattatataccaagtatatttatgtgtgtgatatgataatatatattaatatttatttataatgttatcgaaccaaaaccaatgtcatttatttataatatttataatttgttaatcgttctgctaatagggttgttcattgtgttgctaggggtcttatttttcgtcagatcaaattttttatgagcataatgctccctcttctttaagagatattgtaattgcgaatgcaagttgattatctatgataaattctattttcaaaaaaaaaaaaaaccaatattttccataacaaaatcaaataaatgacattcatgtcacgggtaacggtttcaaagatagtatatactatatttattctatatagtgtgattatgtaaccaaatttttagtttaatgagatttttttagttttgtatgttaattttaaccgaatatcttaattacttaacaaaatattttttattaattttataagattattatatgtatttaaaaataaaaattatatanntattttatataaaaaaattaatttaattatatatataaaaataaaattatacttatatataatcatatgtatataaaatatatatatttaaatcttaattttacgacaataatttgtacactatattataacaacattctcctataattataaattaagaatattgtatctatcattatcattatttttttaaaatatatgcttagacataatatataaaatatattttgaaagtaattaattctctaatcaaattcaaattttgtcaaaatatttctaatataattcttacacatagagagattaatataaaatacgtataacaatggaattcattgtatatataaaatacgtatgtatataatcacatgtaaagagtacattaatataaccgcaacaactaaaaaaatttaaaaatcaaaatcttaaactctttcaaaaattaaaaaaatatatatattacctacttaaaaaaatttaatatacatatattgcacttaatatcagctaattaaacctaattaaaaagaaagttaattatacgcacattgcacacttcaatttagtatatatatatcaaaaattaaataaaaaaagaaaacttaaatattttattatatattattattattatattgtattattatgtctagtttcaaagtactatgtgtgtaggcctaaaacaacaaattatttggggaaaggtcttcaaaagtattttcattacaaatgatactaggtacctagctaactagagtgctataaataagtgtgtgtcgaactaatttgggttcatatttttttatattttttaaaatatgggttgtgtcgtaccataaaaaaatatgtatcgtattgtgtcaagtcaatatttttaaagagtaagctcgatattttcgtattgtgctcaaattttaatcataatttactcggtcaatccacttttcttaaatagaccgcgtcctattttcttatactaactcgaattcatgatgttttgtttttaccctttcacatttttttacaactaataaaatattatatatatttttgtataatttttggatattattttatacatgtttatataaaaattattataattcttaaaatttgaaatactcaaaattttaagtcacactcaaataaattaatatagttttagttttatattttagaacagtgataatgtgacagtcagtagttccgtgatccgtaaggggaaacaccgggtaagctgtgcaatcccacaccgcct

SEQ ID NO: 26976 - DNA, 3431 bp, Cannabis sativa
gaatagaattactcttgttttttttttagttttaagtttcgacacttacaatgtataaattggtcaaattttaaaaaacgatgatctataaaatagagaaaattttgcaagaaaatgaaactaaaacttaaagtctgaattgaactatgttctgatccgattttggagaaagttaaaacataaaggttttagatctttttttatctttcaacgcatcttgaataagtttatttggagttttatgtgaaagttatgcataatttattgagagatgttgaagtaaaaaaaaatgtgtggtcgcgacgagcccattttcagtcgcgaccacaatacttttggctgcggcgagggactatacagaaactagtttttcacttttctaaagtcgtcgcagtgaggctattttaatgaaaagggatcgcgaattttagaggggatagactgaatggaaccctaaaaacacaagaagaagaagcttggagatccgtgacaatactccatctaattttcttatcttctcttgatttcttatgtttttatttgtgtctagtttaattatggatttgattatgaactaaactccctatttaggaatgtgatggatattgtttaagattatttcatgagttaatattagtttattattctttcttcattgattatgtgatttattcatctttgtgtgtattgcatgtttaagcttgatcaccttatgtatgatttataatccaaatgtgaaatctgaaaagtgaatgttaggaatgctttaaatgaataaacataggttttgatgtgaaacgaaagtatttacatagcttgtaacttttagattattgcttaatgcaaattgtatgttgttctatctcagatatcagtagttggcatgcaatttaggatcttcatgtttagaaaacagtttagattaatttataatatatcatcacataggaggaagaagaatggtaaattagtattaacaattggtagtcaaagtaattgaagtcatgtccctaatttcatatccatcgttaaaccttttatatgtttgtttatttaattttgcttagtttatttagtttcaaaatgtatttatttgattatcaaataaaaataagaattcaattgattggtacttaggtacagtccttgtgagaacaatctcacttacctgagtattacttgttaaaacgatacgtgcacttgtgtaacataatttttgcaacaattttttagcgccattgtcgaagactattttagttaatatgaatatagttgaattctattataatttgatttctttttatttaattttactaattttttactgaatgtgtttgacctgcaagatcaagtcaaatgctatatcaagatcagtaccttgtgaatttttcacaacaacacaatgagtcattctatcctgcttgggagagatttaaggatcttagagagagatgttatctcaatttctcaagtgggtgttttactctattcttttataacagacttgatgataaaataagaagttgtgtggattatggagcagatgtaactagagggactttattaaggagaagccatgatgaaatgaatttgttgaatgacatggcagatcttgattacgattggcactgggatccatcacttcagggttggagtcacgaataccatccttatttcccaaattcaccacaaccatttcaggaagaggagaatacactatcacttgcagaagaaattaatcacttggcagacatggtaggatctctgtgtgataatttaagggtgcataattcgtagtgttctaagtacaatgttgacctcatttttagccaacgacaatgagtcaaattaaaacaatttatggataattgaaatgacaaaaatagataatataaattaaagaaaaatcaagatttataaaggttcgacctcttattgatggtaatagcatactcctctttagttgtattgacttgtgagaagatgaacaagaatgccttaaaatcttttaaaatctcttacaatgatctctgagtatttcactcttgaatctagatttctttctgaagtgttttctctaaatgaatttcctatccctgaatagtgagatgagtccactatttatagggattaatttcatcaaattagtttctcaaaattaatacggaataaaataagaattctatctactttctatggtaacaattagtagaataggaaacttaggcatgcttcctttattttgcaatacttcaaatctatcccatgagtttagggttagtaccgtgtcttgcaagcattaagatatataggatttatctatgaaattttcacaactcgtatctcctggacggtgcatatgagccacctgcttgacagaaactggtcagatgtcttcacatactctgctctgatgtcacaattcctgtttatgaccttgagtgtcaaatctccatgtacgactcattaagagtagaattgcccgtctaagttatgaaatgtattctatgtgtcacctagatggatgctacatcaccgtgtagaaatttggataatatttgcccccaagtccgagtgggatcttcttagtcgcacgtggaattactcagtcacaaagttgatcggatgggtgacgcgtgtacgattattattttatgtatatatttttttaagaatatatatgaaaagaaaggaaaaaaattaaaaaatattagtgtaaattaaatatgtatattttatataaaataaaaattattaaaattaggtacttttataaaattttagagggtacaaaaataaaatctccttttacaaatttataaatttattgtttttttttttttgagataaaattgtgacattttattagcaaattgcatcaaccattacaatattcaaaagatccactggagcattactcgcggtgaatatatgacctgaatgaaaacaagagctacgagtcatataatgtgcagccttgttagcagaaaatttaacaaattgaatctgaacagattttaaagaatcaagcaactccttacactcctgaatcaccactccaaagggagacacaaaagaaccgaagaatgtaaggcttggacagcaagaaggcaatcgatttcaagctgaacttcattccaatgcttgtcattgatccaataagagcctcctttaagcctatcgcctccaccacagcagcatctaaaaaacttggtttgctgcaagaaaagcttcaacaagatggccatgacagtcgcgagccaccgcacaccagccttccaatttgtataaatttattttttataactatatattaacaattttataaacggttcgggtttctaagatggtttctccagtgatttctatgtggattgttatacggattttggttgcgatttaggttgctccgttagttgcaataggagttt

SEQ ID NO: 26977 - DNA, 959 bp, Cannabis sativa
ttcttagttatattatggtagctactagctagccaaattgttctacttatataatggtagctagccgaattgttcgtacttatactgcaatagttagtagaattttacttatatcacagtagctagccgaattgtttttatgtctatttctgtaggcatttagatttaaacttatatcacaattgtgagtcaaacgtcttacattagctggagtatgcgaactctttagataacagtcttaagtaaatcttctaagcgtgtatttgtttttaattttttttttaaaatttagacatcagaatctaaataatacttgaatctgaaatatttagactttattatataataatattaataaatgcattaaattatattttattttttttaaaattaaatataaaatttatattattaaaaaaacactcattattaatatgttttactttgcatttgcacaattaaattgctcaaattattaatatttgtgctctccaattatgttcatttataatttgtgctctttcatttatctaattgagtccgatttaaatattttatatctaaatatattaatatagtgtaaaaagatatattttttttagcatttttttaattaagtagttaaactaaatataaatattaagaattttcttttattattcgtcataggattaaaatctaataatttaataattttaaaattaatatttataattaaatttatttagtgactatcgattaatatcattaagaagtattctataaatatatatataaaaagttataatgatgttgagtaatttaagagaatgaattatatacctaatgagaattggttatatataacaatataatatatgattttggtatattattttatactaacaaatacgttattattttttgcgctttttttatttttatttttgcacattaaaatagtttgttttttttttttt

SEQ ID NO: 26978 - DNA, 2855 bp, Cannabis sativa
attatgtacagtacgtatatatattgtttaaatgctgtgttgtatggaagttgtataactttttgaaagatgtttatcgtaagtgagactaggcgcttgagctcgaaatttaattgggaaaagaatcaataacagaatgaatttcagagaaatgtatgaccaaaatgtgttgaatcttttataaaaagttgatgtatttatatctcttcaatgtacatatatgtttgaaaatctggttcccagacttttctatattaatgtttaacgattgttatatgcctatgcctacataactattgtctatttgagtcttgaactagtagttgagtgtgttaagcataaaaactctggttttaatcaaacgcctgtaaaggctgtcaactcctccttcaagatctcgaatgcacaactctagcgctttgagttcattttgtacaacctcttcaagcttgttatctgctttcttcaacttctggccggcgaaaatggacagcgccgcatcaaggctggcgaatctgtttgattccattacttcctcacaacatactcttttggaattcatcttggaaacgaatgaccatttgtttgactttgatagagaattttgccccgtcatgaatgaaattaatgattgaaaaatggtgagagtgattgattcaacctctctcaacatgttaacgatttctactgactgttgatccttgttaaggggactgaagttgcatctcttctccatagccttgtggagtgccttcttcatcacttttctaaaggccaagaatttcttaatctcactactcagctctgcttcagcactgcttcttcttcgcataactgattcaagttcttgtgtggcttcctttgtttgcaacaacacatccttgacagtgttgcatacatccaaaaccctaagagatccatccaaaatctcatcaagacatttctggttttgctctttacacaaggcttgttgattaagaggtaggcagagtaagttatcaacacaatcatgtagttcttcaagtccagttagtttgcatacaacagctgatgatgaagacgctgcttcagaggatcttaatctgcacaactgctcatcatattcagaaaagagaggatgttgcttggagggcacgctagtagagcgaacgtgatgagcttccattttttcgatgaaaggaagaaagagttaatttgataggtattgaatgttgatgaattaggttggtttcctttggcacatactatcatctgtttatatactcggatggtaagggagacaagaggaacgttcatcttcttcaatacaaaatgaacataatcacatgaactacatgatcagtataattttatataaattttgaatcaaaacataaatattgtagtgaggatgttgatactatgccccccaccacctgttcctctctggctattaataatattaacatttcgaaatgagcaattaaaagatgcaaagacgcaatatgataatgaaatcatatcatagtttgttggaaacaagataaaacacccggaacatgagacaagagaggtggattatatacatgtatatacaacataaaatattgacatgcaatagcagactccataattaaacaaagatttgttttcgtgtcttccttccatctttcctttggttggcactttattttatatccgggaacataattttttttttttttttaaaaaaaaagagataattggtctggcccaactggcaattggtatggaataatataacaccataattttgttttttgatattagaataattaggacataattgtagtattaatgaatttaaatttaaattaattttctgcttaattcattgaatcataaaaaacaagatcacaatatagatttcaaaattattattctacgaaaccaattgttgtccaataaaagaacaataaatcctacgccactagcataataatagtttttttttttttttttttttttttgaaagtggaaaatttcattataaaggctaaatcaaccataaccaaaatagagatgaaactcaaaaccttcggcaccaaacatgttcattatacatcgataaagctacctgggctaggcgatgagccaccacattagcttctctaggaacaaaggagaaagaaacataattaaacttacgacaaatagataaaatgtcactaataacacccaccataataagaataggaagatttttgcgacgaaataaacttgaaagccgtatcacagtccgattcaagtgaaaccatcatcaaataccccatctgcaaagccacctgcaaaccataagaggttcaaacgactcagaaggcaacacaacaacgtacgactaacacagttccctcatagtcatgcaccacagtgcctaaccccaacatgtgtttcaaacttgagatagcagcatccgtattaatcttcaccaagtggttcgggggaggagtccaacgagcagactggtcactacttcttgttgccactgaataaggaaagctttataatgagagtttagataatggtcacactagttaacaatcaaactatcaaccaaccaacgctcctcatgcacaatcttattctgtcgaaaccaaatcctcctggccatacaacagaccatacatttcaagaatcttcataaagcaatccaccacctgccgatttgcatcaataataaacaaactatcgtcagcaaaaaataagcttttagttacaacatatatattttgttaaattagatctcactgtaatatttattattacagttttacaagatgaagtgaaaatacaaataaatacaacagaatacaaaagacagatcctatgtggctttg

SEQ ID NO: 26979 - DNA, 5616 bp, Cannabis sativa
aaatataaatatgtttaattaataggataaaaaaaaaagtattcctcaatttattaaatatttccaaaaataaagtgcttgcttgagtcataatattaatagccagattttgtttcactattattattattttgtggtaattttcaagtttgatctgcgggtggccctgacaagtaacaatagtcaagacagaaaatggcacaaatttggcttgaatctaaatttgatagaatataacaaagtacataatctcatttttatgcatgtactttcctttttattctctgttctctaatgggtttccctttcctatcctccattccatcttcaaaagaatactattgaagaaaatgcagtaatgaaagcctatagctaaacaactataaagcaactaatatcaccacctgaattcctttagaaaattagagtgtactgatattttgtcttcggttgccttgtattctcagtcacatagagccttgaaaccttcctttcttgaatcattgcatttctttgagtcaactaatatcacatcatcgggtgcctcattatggtcattggtaacttggtctagaacagaagactcgttggttttccttaagtttcctgagaaccttttgatgggattctcattactgtcatcagtaacttggtcagacacaaaagattcatcaactttccttgagttccccaatatttcatcatcaagatcctcatcatcgccattggatttccctaagttcacaccattggtcaaattctcattattgtcatcagtaacttggtctgaagcaaaagattcattggacttcattaagtttcctaatattccatcaacaagcttctcattgctgtcattagttacttggtctgaaacaaaagagtagcttttctgaggccgttgcttcctcactatgcttttcaaagaggtttgacctttgacaccggatgaaccagataactttgctgtgttttttgagaaatcaagtaacccatttacattttctgatttgtccttgcaactgtcacctcccttgctactgtaccacgaatcaagaatctgaagaagagagctaccatcttccgcccctctggccattctctccccttcagctcgagtcatatgtgatgtttctcctgaatcagataagtcatcatcggaaaggacaggctcatagtcaaattccatttgtttctccattgattcaacttcagtcttcaacaccaatccaagtttggaagtcgcagattttggcgatgcaacaggcccaagttcatcccacagcatgtctgaaccattgcctttctttgatgaatcagaagattcacaatctaaggctactatatgattggcctcttgtttgtcagggacagaagtacttttcacactcgtaatatttggggctttatcgaaaggaattacataaccggactctactttcacgccagacatgttctctaaaagagcagccaacttttcaaaaccaagcttctgtaaatcaagatagtatccatacttttcaagaaaatgttttctaaagaaacctaaaaaaaatcccttagggtgctctttcagcatctcatttacaagcttttgacagtcagctaatatctcatcattggacctgctgggtggaattgttttagtgaaaggtgatgaatctacatgagtagcattctcagatttcccaacttgagtgagtttgaaagggaaaacttctgaggagcattcttccacccatttcttttctgatattaatatatcaatcaagtgaagaagatcattttctccaaagagctcatgacttaaaggcccttctctctgaagattttgtgccaactgctccctgagataaagcatggacaaaaggttctattgagctaaaaggtagttatggtcaagttctttaacaacatagaaatcatgctcaaaatgaaacagccacaggggagggcaggagaagctgtctaaggtttaatgattgcttttatcaaaagtaaagaagattattttgtacggtattgacacagttcgtgcaattccaagcatctttcacaattattattagctttagactcccattttggtcgaatgatttgtataaatttttaaacatatgtaaatatcagaatgaagcaaggacgaaataacaaaatgaaatatatatatacattcacataggcaatacctggtcattgttttagagacaataagtgatcctttgggtgtcttcaaaaatgattccatactactccaaaatgagtccttcagaaaaagcttctgcttttcagaatgacaactaattgggtttagtctatcagaggaatgatcttcaggggaatttctccaaaatttacaccaatttttgactcgatcaaaaaaccctggcctatttactgttttgttctcataagcctccgaacttgtactggtgctattgtccattgccacctcatttgtggacaaagaatgtgttgaaggaaatactgaaacagcaaaagaatctgttgactttaaatgcatttgctcatgtttttccttctttgcgccaatctcagaagtagagtcatccactggagtagtatggcttttatcctcaaaacaatcagcagaagtacaagaatgatcttgatcttttgaagtcttattatcaaaaccatcacttttacttccaaaccatttagtccaaacttttcttaagaaaccaacctcagatgtagagtcttgctctgacacaggagaaaaagaaccttcagattctggtgaaactgttttaacaatcttcacatctccaggggaaaaactactgtcagattctgctttattaaccatttccattgtattatcatccacaagaggcttttgtgctttttccaatggcttctccacatttaggtcagcaagtggagttatggattgcttctcaagtaattttggtaatgttttctttttttcacctacttttacagatttctcatcacaactcagttttgaaagagtattgaaatctttatcttcaatattattattaccaactgtttctgtgtaagcatctaaattgtccctagatgtttcaggagatttctggttgaccggacttataaggtaacgaccatctccttctgttttgattcttagaattttcttttgtgataaaaggaagggaagaaaccttttatatccataatagtctttacttaaattcatgccgcatttcgccaacttatcacgaagctctgtaattgagagtcctccaggatgtaagttcactatctgatgaatctgcttctgaactcccctgggaactggatgaggcttatcatctgtactgggctccagaactgcctttggagctggaagaggcttatcatttttactgggaaccggatgtggcttatcgtctgtacagggtgccaggactgcctttggaactgaatgaggcttatcgtctatactgatttcagatgattcctcaatttgtaaacacccacgttgctcaagatctgaataaggatcaagaagtggcactttatagtgtccgtaccaagaaccataaggaccatctggtggctggttaaagtattttcctgtaaggttctcaccgcgaagcaaatcatgccaatgccacatgatacttgcagcactacaaagaacactaggagcatgtcctggactggccagaagtatattgtagttattcattcttaaccggtgtaaaatgctagcaaaatccctgtcaccagatattaagaaaagatgtgctggaggaggattttgagaaacccaatacataagatttaaaagaagagatctatcagcactattcttcccacctgcactgaatagaagattaatgagaaccataaaaacaaagaacaccgtggctttgtagttgctcttcctgatccatataaagtaaaaatgatcatatctatttggttcaaatgttttaacaagaaccaattctgtttcaccagctacagtttgataactagagtattgccttacacaatgaagaacccaacaacagcaaacatagcctgcttagtcaaagaagctgaatctgcttaaaccatccggaggtataaaacattcggcaatgtagaataatcaaaatattatacttaagattctcacataatgcccgtaacatttgaatactcctacagcacagcataatatcattactcaatttccattgtttgtccatcccatataacatttaattccattcatatcaatgcaataacagtttacacagctctatatcttggtcagttaaattccaagggttctccctcagcgtaggcatactaaattcatatcaacacaaacaaagcaatatgacgatatggtagtctagtcatctgcatttcccacccggcatatctctcacactcgaaacaaacaacaatcggttcgtgattttgagaatagaaactaaccctgaggaatgtgagcgagattgatgccggtggctgaaagggcctcctgtttaagtctcgagagctgcaccatatccccaaaggcggtgatctcaatgggacccttaatcccactggctctgatagccgcagtgatgttgcgagagactttgaagacattaactcccgaagggacattgcaattctcgaagtcccaccagaccgagactctgacgtttcgggactcttcctcctgacgccttgaaaatggagtagaagacgaagaggaatagtagttggagagaagaaaaaaagtgggacgcgaagcagagcaagtagaagaagagaagagaaagagggttttgggggagaggagtctcatagcagaggagaggagagtgagttggggttgaggttgaggaggggaatttttgggttggaaattagacgagtagtgtcatttccgaaggaatgcagtgctcttcacctgaggaacacaggtttaagagaaagaagtcaaggttgtgcttaaaccctagttgaaaatatatttcattttttgcataattaaaaaaaatgtagagtacataaataattaactttaattccggttgtaaataagttgttaagtttaattttttgcataataatatttaagttataattttaaaatttctgtaaattgtcacgcgacaatctttgattggtccaggttattgaattttttattttttttaaaaaaaaatattaatttaaatttgtaataaaaaaaatgacatgtgcataataacttgacatttaatggtaagtacttacggaagtttcaaaattataacttaggtattaccgctaaaaattaaacttatgtatttatttgtaacggagagttaaacttaggtatttatgccgcaaattactcttatatattgttatcccaaattttatccacttaacgtgtcatgtccatgtaagccaagacagagtaggaatatagccttgtcaaaagcaagacaaagtctccttacaaggcatggcaaacccgtcaagcaacaagcgaaagaagttaagcgagctgtcaaggatttgcaccaccatgtctggccagccaaggggagtctataggctggccaggatgagcttattgttggaaattattttaccaggatcttagatctactcacaagtatgttc

SEQ ID NO: 26980 - DNA, 3866 bp, Cannabis sativa
ttttttttttttttttttaatatcggtaaacaatttggagcttaggtgatatcagaagaaactagaaaggtctagggctttatatttcgtaacatgttgtaataataataataataagctatacacagttgtaaatggaattcatatatattatatataaatatcacaaacacaaaagtagtgattaacaataacaataacaggtacagagtattgaagcataagattttccaggctgaaagccactcagtactactcactctatatatagatatacttagtacttttctttagcttcttcttatacgtatccaactaaaccttttctttttaagctaatagaaatctcccaaaatctcattttattattatatatatagttctggataaggaaatcattgaagctggatatgtttttggtttttagctttttgatattatctataacaagcttctatatatattatattaaataatttcagtttagtctttagatataatctaatcaaatgcgattccaccaacaaaataatatataataaattagatgattatttttgtagatatcatgataattatgtatcaaggacattaatataattaatattataacacttgtatcaaaatcatgttaaagttgggtattaaaagagagaataatagaactttcttaatttatattttttttattgttatactaaactatatataatcaaggttaattaggtatgccaaactcaagttcccttatacgtataatactaattattaattaatgatcaaagaaaaaaaataaaaatttatagataccttaaaggtagacagctaattgcttgtaagttctattttatttatttattttttaatttctttcaaattttctcttttactgctccaataatcaggtaccacagcaattaaaaaaattgaaaatttgaactactttacatgtgaattctcttcctttttggtatacatgaaccaaatatattaaagaaatttgctatattatacatacatatatatatatatagtacattcacttttgactatagctaccatctttgcttcttagactatcccactttttttttaatacgtatatataaaattatgtatacatggagaatatatatatatatgtatgttgtccaatttttaattgtggtgaaaaaacaaaaggaattagctttgaatatcaattaataatatatatacttgttttttttattactaggcaagaatcatcaatgaaaacatgtttctagtgttctaattaatcacttgttaattaaattgaaaaatataccgtaaaacccacgctagaaactcctctcctaacctataatttagtaatctataatgctctaccatcccatatatgcctcttagctcaattaaaaatactatttttttagtttgtttttaaccaataatcataagcattgcactaaaatatctcaattcccaaccaaacttatagcttaaaaaaaagctctaaatggtgattttctttcatccacactataataataaggaaaagtattggaaaatttgttaagaagaatcaaataccaaaaaaaggtatagaaggaagtattggctacctacacatattgaagctctttgccttgaaattactaaaaggaataaaaaatgaagagagacccaataatgtttttccaacaaatccatctccaccttacataatcttcaaagaatctcaacccttggatcattccaacacaatgataccctttgtctataaatactcacacagagctttctttagctataacagagagctagtaattaatcaatacataaactctccactcaccacattactcaaaactaaatcccaaggcttaattttgcatatagtgaaaatgggaggcaacagtagacagaggaaaagtaattctacctcttctttctcaatttttaacatgttcaaatctaagagaaagatcatcatcatcatcatcagatgattattatcatcatcatcaagaggaagtggctagtgcaaggtcaagagtttggcctagtgatgaggacagaggtaggtgggtggctgatcctgctataaacagaaaagcagaagattttattgccaaaattcatagaaacattgcaacagattttgagcccaagacatacaccatttctagtactacaactactactgttaattgattgttcattgttgagaaaaatgcattaatctgcttaatgggttcaaaatccattatattattaattagctagaagagtattccaattaatccttctctattgtaatgtgttcataacttagtttcttttcatatttgcttctctgtatcatataataaataataaatactttattaattgaagattttcttctttgttatactttactattttgttatttctctctgttgccatattaatttaattatttttattttggtttaattttgaaaaaagcaacaagcattctgaccatttacactaataatattgaaaaaaaattagtgaaattgtagagccaaatgcaatattaagaggcaactgtaattgttaagcattttgagccattgtaatgggtaataattaatcttcagggccatctttgaataatttggcttggtttttctaaagctgctttgtttaaattataaaatcatataatggtttttaattttttttttttgaaaaaaatcgtctattaattgaaaaaattggaccttatcttcattacagaataagtttttcggtaagtaagaaataggtaagcaattaaaccggttgtgaatgaaaacttacttaatattatgggcaacaaaattacaggtactggtaatacaagaaaaaatacaattaaacttaatgaatggttttgaaccttaatgaatgggttgaccaattaagcttaaagaataaaattagtaggattattttcttaaaaatgattgatttactaaagttactatgtgagtgtcttctatgttatatcaagatactagacatgcattattacattttggaatcaatatgaaaatttatatatattccttgaagaagggttgaggttttttctggacacataattgtacatcatgaagataccaagtacaaaacacaggtgcattattattattattacactagctttgctagacttttgctctcaacctataattatcttttagctttatgtctaagttttcaacaaaattcttctttctctcctttcttctaggaaaattctattccttttcttcaccatatatttacaacacccacaccacaaaattaaattttaatggaataaaagaaagaaaaaaataatgggggagaaaatatttaaaaagttacccttatatcaagaaggttaaactatataaaactatacatacttttgagcaaaatctcatagaatattgtacttgtgttatataatatgaattaccttgttactaatttggtctaaatgtagagttaaaaaggaaaaattaaaaaattatgggactctactttgggggaaattgagctctactttggcaatattctcttctttgtactaatttgattagttcaacattgtcccattgtttaaagtacaagatgctcgaccaaagccatgctattgcttgttttgtttcagtgtctttgtctttatgatgcacttggaggtgctttcataaccactttatatgaccatctacattccttgtcctccactcctatttttccaattcatataaatataggctaattaggaatttttccctccgaactttttgacatgcactaaattatgccccctgaacttttaaggttgttagaaattccctatgaactattgagattgttag

SEQ ID NO: 26981 - DNA, 4408 bp, Cannabis sativa
tagattctatattatgatttatcatatcgaatagagtattgttattaggtatcagtagtgtttagcattatcttgaagtaacgtcttgcaaatgcttagtgatattctacaataattattaaattaaattatgtgggactcaatacttaattatactaataacaatataacactttaagtggtgcgtaagcttataccatttagcatttctttgatgaatacttagagtctatacactatcataaaatataccatgttacttacttactcattaaattacaatcatatattgaagaattctcatatatagggatgtaactttgcctctacttagagtattattgtttttcggtaggaaaaataaataattatttttttatgatggtatatagttatattataattataaaagtcatctcactaatatttgaaaagttttcaaataatatttcaatttttttatactaacgtaaaataaattgtttgaaggaattctttaaaaattggtggaatacttacaatgactaaaatgtcattgaaatagattcacctcatgtttgatatgaattgtatataggtggagatgagcccaatttggcagcagaagaaattaagggagttttgtaatgagaaaggtattcatataacagcttactctccattgggtgcctttgggactcaatggggagacaatagtgtcatagagtgtgatgtcctccaagaaattgccaactccaagggaaagactactgctcagatcgcattgagatgggtgtacgagcaaggggttagcttagtagcaaaaagttacaacaaggaaagaatgagaacaaacttggacatctttgattggtctttgacccatgaagaatcacataagattgctcagattccccaaagaaagacagttactttcgcatctatcctagggccacacgaccttgtacttgatattgatcaacaattatgatcattaattcattaatttaaatcattatatatgtattcggattcatccacactataatatactttgtagtttccaagagatcattgagtgagtgccaagattactctcttcatttcttttcttgtattatgaaatttttatactttttgattaatgtatcaaatgctttgtgcttctaacatctatttgtataagatttactaaaatacagtgactttcattataagaccagtagtactatatgtttgacttaaattttacaattattctctaaaaaaaccaacgtaaatagaaaaaattatgaaataaaaaatataatatttattatgtaataaaattagcacatgttatattttgtatcaaatcagtaagtcacaatttctagaattggtacacttttttctttctagtccaaatgaggaattttataagggagatagatagtgaaaatgtaccacacacatacatcataataaccaattcttgattgaaataattaaatttggtagctgtgtaactgaaaatcatacatacacacgaaaaggtggtataacaaacttagtgtaaaagattttttagctataataacatattatattatatattgaaagcaactctttaaattctcttatttttttttctctccataattaaaataatctctccatggtgggaaaataattggtgtaaagagataaaaatagagggtcactttttgctaacatggaaaatatcgttttagagagtaaggtaaaaatgtggttatacaatctcttccccacatcaacattgtaaatacatacagtcaacataagtagagcccaatatatccctaaaccctgttggagcaaacgcagagtagaattcctaaaagaccaaatccacctaacaaaaatcacagaccttcctccatttgatgatgatgcagcagaagaagaaaccagcacagattttacccagagcagcagcatcgagccaacaatgcttactcacacttgatcgatctgtaaatatggcgaacaaagagcagtgcagcacggaaacccaccatcccgagcatcaggaagaaaccatagcagatgcatgccatgtacccgaagaagaatgaggtttgcatgaaaccagacatatctgatcgggcgtagtagtaatacaaacagtatgcgtagataaacagaccagttgatccaccgcataggaaagacctgcaacaaaatcaacatagaatattcatcactttacaccaaaagtgaaaaaactgactaccaacctgtagaaaactatcaaacgaatattaaccccacaaaaattgaagaaagaatattccacaaacttatatatacctacaaccccaatacactatttccctgcccaatctatacgcaaatggctagagaagtcaagtacaatgattcctgtttgatttcacaatgtccaaccagccacaacaacttactcagatactttagtcaactggttgcattgagccagtggacccagcaatgaaaactctaccaaaagagagtaaaaataggctattatttccaagaaaataataaatgcaagcctccctccctctaggctccctgtataacttctttttctaaaattttatggctactataatattaagttaaaagagatagataaatttctccctctcctccttgaacttatttatttatttattttttcttgccattacaataatattcagttaaactaccattaaactgtattaaataaatgtgagaggttacctccaccaccattcatgatcttcagcagcaagttggaagtatgtcaaagccacagtgatgaatgcagtgacaatcaagaggatgatgaaaacaataaacagaatgctgtagatggtgtagatcctgtgaccccaaacacttgcaaatatgtagtaaagctcaatgtaaatggcactgaaaggaaggaacccagccattgccatctgaggaagtgtactcctgtaccaaggcaaaggtggaatttctctgggatattttgtggtgcgacaaggagcttggaattcagctttgctattcttcccagcaataccacccaacacaagcaatggtgaggttactaatgtccatataaggacaatgactacaatagtgccaaaaggaagggctgcggttgcactataagcaattgcaacagtgttaaggaagcagaatgtgaggaacaggggcccacaaaacaggcaccctgtaagcaacagatttctcacctgtcaatataaacacaaaatagaataagttaatttacaacagcattttcacaaatcgaatcgatattcattgcagggagaatcttagatatatttacccagttcgttccttcaagctgacaatagaaagcagttgctgtgtatcccgcgataccagatgtgagtgcataaatgaccaccaaagcagtgaataaagcacctcggttgtatgggtaaaatacaccaaccaatgcaagcatgaaaatgaatatagtgctggatatgcatagaagtgtgtcagggtaccatggttagtgagagtaaacaaatcccaaatttagagaaacaaataaatgcatagaaagattctcacagagtgaacaactgtgtgccggaaccaagggcagcagcaaacactgatttgtactttgggaaccgaaaaacatcaccatggatatacttccatcctgtctcttcttgatcatcagctgcttcctcatcttgtgcatacctttcaagtaattaaataattttattaagtaggtaaaaagaacatgaagagtcataggccctcataagaaattctttcagtaaattcacaaataaaaccttacttcatgaaatcatttttcaaaacccgcatgaggattgttgcaaggaaaccagtcaaaagaagcactgttacacatgaatttatgattgagaaccagtgaatttccaagtgatggggtagtgaagaagattgtgaatacttgtccattctcttctcaaaaggaatatcagtttctgtccattttacagtgtatgtgaaatcggcatcagcctctttgtcctctgtcaagtctacaactgatgaaggatcggtcttagcactgatttcaatcacacgatctttattgtagagtacagcaaaatggatatgcttgtaaagagaatatttatattcgcttgggtcagattttccatctttatcaacctttcctataaaaccccagattggcaagtcatcgtagtacatttgaaagtagtaatcctttttcacagcttccctaaacttagcaacatcttccttggtcagcttttttgagcaggcaacctcagattccttctcttttctaaactcaagtttataaggagcactaacaaggcgatctccattcagtacctctccaagagcttctttcttctccttcacatcacctaccattaacatt

SEQ ID NO: 26982 - DNA, 1736 bp, Cannabis sativa
  modified_base (554)..(559): a, c, t, g, unknown or other
aaaaacaacggtttttttagatatgatgtcaaacatgcagttagtttcccgaatataatttaagataattttataataccgacaccttctaaattttagatcactttttattattttgacatataggagagtttttttttaatctaatattgtttcatgattatgtatgttgtagttataaaagactacttataactttttagaaaattctaaataaattttattttcaacatcataaactattcataattttttaaaaatttacaaatacaaatataaaattataacgtacataataataataactaaaaagttctcctaaattacaaaatagacagaaaatatagataaacaaccttttaggcactataaattttccctataacttattattaaaaaaacttaaacctgatccgtgtatattattggaaaaatctatttgtaaaacccccgaggaagaaaaaaagtaacaaaacgtaaataaattaaagaagggatgatctcttgccagatataaagtgtgtgtgcttccatatttatttatttatttattnnnnnnttttttttttgaaggaattttatgatgtagcctttaatttaactagtaattaagtatgaacatgtagtaggaaagtctagcacacacgcacatattctgtatacatatataatgactactattagttggtttcaagtggcctcttgattctttgctcgaccaaatgagttttcaattaattcatttcagatctaataaattcctttactttcggtattcagaagccaaagttgcgaaagctgaatccaaccatcaaatattctttccaacctaataaaaacaataaatctacttttaaccttttgcttatagaacaagtatatatataattggttcattttcctaacatatccttatggtactattattttattatgtacagttagctttgccaacatatatttaattcttcttcattctacttctaatgaaaataatagataaagcctgccgtttcataccttcgtatcaaacccacctaaaatcaatgtctttcttggatgatatgcataaaaattattatcacacgcaaaccttacccaattatttaaacctaaaaatattaaattttcacttgtcttcccctttttaacttttaaatatactagaacactcaactcaaccgtgtcaatatatttcctccaaaaataactttttccatatatatttagggatacgattttgtcccgtgatgtaattttacagaatgtatttcgcggtgtacgacagccgttagatgggagagttatttgatttgagagttggggttgatctaggggtaattagggttaaaaaatggtaacgtaccccgagactcatgtaatgtaccctgagactcatctaatgtacaacagaatacattccgtgaaagtacatcacatgacaaaatcgtgtgcctatatatttatatgttaagtttctcgcacaaattatatgtatatatatgggtgcatttttaatggatattacccatgaattggtaatagtagaattatgattaatttttctatttaattagaaaaaaaattctcatttttatatttatgggctaaggttccgttgttctatcagcttaaaaaaatcggcaaaaaaaatgataaaagaaacttgagtttaacttaaatatttttcatataaatatatttttgatataatgttaatattagaatatttttat

SEQ ID NO: 26983 - DNA, 1402 bp, Cannabis sativa
tttggaatattaagattaggcggggttgtagtattttattattttacccctaaaccttaagattacttaagtgtgaagtaaaggtaaaatagtaaattggccttaagagttggttttgtcctttagtaaattagtagaggattcttagggctttctagctgattagctaaggataaaacaaagaaaagattatatcaagttttattcattttatcaaaatagaaaaaaaaaaaaaaaaaaacatacacacatgcacacttatctctatagaactctctccctctttcaaccctaaagagaaccaataagaatagagtaattcttcatcatttctccaagaactcagtttgaattcaaggagaattgaaagactagacttaaggtaagaaccctagctccatattccctatgttttatgagttttgagttggtttaagcatgcagttgggagaaataggttctgtttgaaccctagatatttgtgggttattttttgagttagattagagttatttgagcttagtttggttgggttttgttggctatgagaagagttgaacaagtttgagtttatgaactcaaatttggctcaacaataatgtttttcaatcctgtgagtaatagttgctactattgattgaaatatgtttattgggatatttttaggtgttctggagagttatgtgaaatttggggttgatttgtgtgagattcaaagttctttgggattctgtagaaaaataatttgctgtttttctagaaatggtaaaccgttttcctagtcaagatcccaaaaaatagtttactgtttggaattttggtggaccggttggggtggtttttaagaatccatattttttcgatatttagggtattgtcatgctatttatttataggaaaacttctgattttaagtttaaatccccaaaaatgttttaggaagttgcttactcatttgacataaatgttacatatggcctccattcagcaagcaatattttctttcaggttgactggcacacttgaatctagaaacgaggtaagattagtataagatatatatatacatatgtgtgtgtgcgcgcgcgcatgtgatatacatgtttaagtttactacaatgtatgaattggtatcatagtggtacgactatagtctcgggttagcagtacgagcatagtactagttttgagtcttttgactgatatttaattctataaagtattaattgatgctatcacaacggtacgagcatagtaccgggttagaagtacgagcatagtactggttaagagtgatattatggtcaattatacttttgggtatagattgatgctatcatagtggtacaagcatagtgataggtccacagtacggtgatagtgctagttgagactgatatta

SEQ ID NO: 26984 - DNA, 12412 bp, Cannabis sativa
  modified_base (3594)..(3600): a, c, t, g, unknown or other
ttttgaaataaaccttaactaaaagaaaactactcagaactagacattataatgataatcataataaatagtaagagtttctctctctaattcgtaacttttttttagacttctctcgtttgtagtctaagaggtcttatttatagtaatgggaaagttagataaatcctattagaattaggagtctatttatagtggatagataaattccattagaattaagattctatatttatcatagtattaggaaatatctcactaaaatgaaaagataactcattttttaaacaaaagataaaaaatcgcaactcttctttaaaatttatcttttttttcttcggtatctttttttagaaattcttgctgcaatggttgatagtattttggccataactctctcgatattactcaaaattagacgattcaagatgttctgaaaagttaacaacgagatctaaaactttcatgttgagctctaagtccaattctgcatctaaggtcgtatttgcagttaagtcttgcctcgtacaattgaactgccgacttccactattttccaccaaaatatgctaaaatccgtctaaaagactctaaatgcatgaatagtctttcaaatggcctaacagattaaaatacactaatcaataatttaaaaaatcaattgaagaatattaatacataaattgatcatatttgtaagataaatatggactcatcaatagtattgtcgtatgaatgttctaaactcagtaccgtgttgcacacagggatagggttatggttgggtgtatgggtgcctcattatgttatcatttatgcttttcatattgagtctgtcaactcacatatattgtttgcatgtgtaggtatgggcagagctaagggtgagcagccgtgagagcgagcggatggagattgtacatgtcgtggcagttagacctagagcgtacaatctttgggacaactggttatattttgtctagtcgctaggcgacaacttttgtattacggactatgtaattttgtaaatattttgtaacgggatcccagttatatatatatatgctattttgggtatatataactatttaagtaaagttttaattaatcacgtgttttaataatgtcattaattagcacagacctacacagctagtataaaataacaataacacgcctaacctagtagggtgtgacaatttagtatcagagttgccaagttttcttctgaagatcgtcacgacatgtacaatcatcaacagcggtaaccttgactgacagtttagtaagcctttattactttagtagtttatttaattagtatgttagaagaaaagtttgataggaagcatgttagtagcctgatagttgaataggcgcatgttttaatttccaaaataagttgtaattagtaaattattcttgatcgcgatctgaccaggctagctctttgttttgcaggctattctaatagaatggatgtcagataacacgaggagcaagggtaactcggtcggatctagtggcagtcagggagttcagattccctcgaacataagaggctgaggcagaggccctagaggtagggcacgcggtcggggagatgttaacccaccgtaggctgcctaggaattggaaaataggtttgtagcaatgcaagccaagataattgagcaagacaaagaaattggattcctgaggcagcaaggtgctcatgcaatgcctgctccaaaaatgcaggtggctcctgcgcttgctgtgcaggtagggctaactgctgcagtgaatcagatggaaccaatgtacgataggttctgcaagcaggcacctctagtctttctaggagttcccgatgtgatgaaagctaagcaatggctgacaattattataagaatcttgaattttattggtgtctctggtaatgatagagtggcctattccacattccaatttctaaagaatgccctggtttggtcggacatggtgtccctgactcaagatgttaccactgttacttgggaagagttccaggtgttttttaatgccaagtactacaatgaggcaatcgaaagtgcaaagaggaaagaatttacccagctcacctagaaagagaatatgagcgttactgaatacacaactcaatttgatcgattgtctaggttggcctcaagaattgtgccaaccaacttcatcaagaaagaaaagtacctaggcagattgaatccaaaaataaaacacgaccttttgattgccactgatgacaacatcacctatgttgatatggtgggaaaggcactacaaatggagggcacagttgagttcacccaggagtcctgaggcactcaggttgttggtggagcccctagtcttcctacctctagttatggtaggggtggtagtgactcgaccactgaccagaacagaatggcaccatctacacctggtggcttcaatcagaataacgagggaaccaaggtcaaggcaacctttagggtggtttcaaaacctgatatacctacccagaaggtcccagttgtaagaagcatcatctgggtgagtgtagaggttgaggatgtttccactgtgggttgcctggacactataagagagactgtccacaactcaagaaagaagaacaaaagacagcagcaaaactcgctccagtaagggtgtttgctttaacttagactgatgcagaagctagcacttcagttgttacaggttaactctgggtcaaaaactcttacttctttgtattatttgactctggggccactcattcttatgtggcagccagcatttttgataagttgggtagaccgtatgatagttatgagaaagggttaagaaccctactacttcgcggagaattagttatctctaaaaggtgggttaggtctatgctgatcagaattgaggatatggagttgagtgctgatttggtagaattgggtttagtagattttgacatcatagttggaatggatttcttgtccaagtactcagctagtattgattgtaaacggaagatggtgatcttccaacttgagggcgatgaactgtttgtatttgtgggatcagtccagggatcctgaattccaataatctcggtactgaaagctagagaattattacaagaaaggtgcttagggtttctggcagtggtattggataccgcacgacctgaggtaattcggccaaaggatatctgggtggttcaagaatttttagatgtttttcctgatgaacttctgggtttaccactgcaaagggaaataaatttcgttattgatttagcacctggagcagaaccgatttctaaggcatcgtatagaatcgctttggaaaaccttaaagaattgaagattcaacttcaagggttgcttgacctagggttttgatgacctaatgtgtcacctggggagctcccgtattatttgttaagaagcaagatggatccttacacatgtgtattgactatcgggaattaaataaactgactgtcaagaacaaatatccgttacctaggatcgatgagttattcgatcagcttcagggaaagacggtcatctcaaagattgatctccgatcggnnnnnnntcagttgagaatccgagaggaggaaattgcaaagacttctttctgcactaggtatgggcactatgaattcctagttatgtcttttggactaaccaacgcttcgacaacttttatggatctgatgaatagggtattcaaggatttcctcgatatctatgttattgtatttattgacgacatccttgtgtactctcagtcagaaacagaacatgagcaacatcttcagatggttttacaacgagtacgggaacataaactatatgccaagttcaaaaagtgtgagtttttgttatctcaggtgtcttttatgtaacacgttgttagtaaagatgggatcaaggttgatccaggaaatattgaatccatcagggattggccaagaccaaagacagttacagaagttcgaagtttcctgggtttggctggttattatttttggtttgttgagggattttttaggatcaccacacccttaactgaactcactaagaagaattagtagtttttgtggacagataagtgtgaagcaagcttccaatagttgaaacaaagattgattacagctccaatattagccctcccatctgataaagaaaagtttgtggtttactacgatgcatcgcttatgcgtcccattagctaaaggaatatgaacaatgatacccaacacatgatctagaacttactgcgatagtttttactttgaagatttggtggcaatacctttacggagagaagtgtgagatttataccgaccataagagcctcaaataattattttatcagaaagatttgaatatgaggcagagatgttggttggagctggttaaggattatgactatgaaatcctttaccatcctagtaaggccaatgtggtggcagatgccttgagcaagaagggtcccaggtaggtaactagtatgatcaagatttcacttcaattagcagatgacatggtcagattaggaattgagttttttgtaggtagactacataatttatcattgcaatctgatttgttagatagaattaaagtcgctcagttaactgatcatgaactggtaaagatccgagaaaaggttttagctagacaagctaaagattttacagtgtcaagtaacgggatgctgttatacaggacgagagtttgtgtttcaagtagtgcagaacttagaaatgagattctcgaggaagctcatagcactccatattaactgcatcgtggcactactaagatgtatcaagatttaagaccctcaggatgaagaaagatgtggttgaatttgtatctcagtgtttaacttgtccgcagataaggctgaacattagagacctacaggattattgtagccaatgacacttcctgagtggaagcgggcggatatcaccatggatttcgtggttgggttacctagaaccacaggaatgtatgattctatttgggttgtggtagatcgatttataaagtctgcccattttctaccaataaaaataacttttacaagtggatcagtacgcagagctatacatgaaagaagtagtaagattacatggggctctgaagtctattatatcgaatagagatccgaagttcaccttgaaattttggcagagtctccaacgagccatgggtaccaaattaaagttcagtacaacgttccatcctcagactgatggacagtccgaaaggacaatccacatactaaaagatttgttatgtgtctgtttgttggattttgaaggctcttggagcaagtacctgccactgatagagtttccatacaacaacagttatcagagcactatagggatggctccctacgagatgttgtatggtaggaaaagtagatctccagttctttgggatgaaactgtagaaaggaaatacctaggtctggaatcagtgcaacgaaatattgaagctatagaaaagatcaagcccagaaagcttgcctctcagagtaagcaaaaaagttatatagatccgaaacgtagacatgtagagtgtcaagtaggagatcatgtattcctacgagtgtcttcgatgaatgggatcaggcatttttggaaaaagggcaagttatggcctaggtttatagggcctttcgagattcttgagaaggttagactggtggcttattgcctggccttatctccaggactttcagcagttcacaacgtattctatgtctctatgttacggaaatatgttttagatctcactcatgtgctgagttatgagaaccttgaacttcagccagatctatcgtacaaagaacaactagttcagattttagataggaaagaaaaagttcttcagaacaataccatagttttggtcaaggtattctggagaaacagtaaggtggaggaagccacctggtagttggagtctaacatgagggctcaatatctagagtggttcaagttagattttgaggaggaaatctttttaagggggagataattgtaaaaactgcttaattttcttggttcaaaattagcagataattagggcttaattatgaaactagattattaattatgatttatgattatacgaagatttatttgaattcaggatgtattattgatgccatatatgaaattttacttttttcatgttttgtgcccagtaacattggaacgtggcctttggacaatagaattacattttagtattttagttttagcgaggaaatatagttagacattggaaatgtcaagaatatttgaggttttagaaataactaaatacccctaggtggtaagtggccttttgttatagtcaaggggcaaaatggtctttctccattttattattttgtcctttagttgaatatgttagaaatagtttagtgttgttgtaattatctatgattaagctagataatactaagtttatttccttttagccaaaattagagaaaaatcaaggaaaccttcttctctctttctttctttctcgagcatttaagcaactagctagggttggaatattttcaactgaattctaagtattttagcaagattagagtgtgtccaactcaaggggcttgtaaatcgtcgagtagcagttcaactcagattggccgacacacctgaaagtgaggtaagattaatataatggtatgcatatgtgtttacatgtttagcgtacatttttattaagcctgttagattacatcgatagcggtatcagtatacgtagagttatattgagtaccaatagatgtatgtttggttcagatactgatcgatgctatctcatcggtactgctaggggaatgactagcattctgagtatgggctaatgttatggtcgatagtattgtcgtatgaacattctagaatcagtaccgttttagacacggggataggattatggttgggtgtatgggcacctggttattatccaggttatagttatgttattatgtatccttttcttactgagtttgtcgactcacagatattatttacatgtgtaggtaagggcatggctaaggttgagcagcagtgagattgagtggatggagattgtacgtggcagtagggttagacctggagggttagacctggagcatacaatctttgggatagctagttgtattttttctagtcgctaggcgacaacttttgtattacgcactatgtaacatttgtaaatattttgtaacgggatctcggtcatatatatgctatttttgtatttatgagtatttaagtaaagttttaagtaatcatgtttttcaataaacttattgattagaaacgagctgcacaactagtataaaatcacaataacacgcctaaactagtagggtgttacaagacgtgttgaacttgaccaatcggttcaacccccatagttgccagtaaggcccaatgactaggccacaatcacaatcccaagtcgatcaatgcctttgatcgacttggaaggcgaaaagagcctacataaaatcatcaacaggaagtggccagctgatacacacatcaccacacatgatgtgtgtagggctgaatttgacacccttgctgctttggttaagggtatcactactctgaagccaacaaagtacgagttagattgagagcagtttttccactctcagattgaatcaaggctttggagatctcctcaaagtttagaaatctagtgtggtatccatacactggaaaagaaaatcctctctctcacatgcacaactttgacgtactgactgacctgcaaggcatttgagacgattctcgttgttaaatatttccatccacattatcaaaagtagcacaatagtggtatctcaagctttgttgaagatctatcggttattgggaaacactcaagtaagcattcaatcaaaatttctccccattaaggcaaagaccagtgattagccctccatgtgttggttcgtaattagtttttatcaaattaccattttaccttctgattacttctatatcctttagtaccattattatacccaaaatttagctagcactttagaggaggacacgtgtcaaactcagaagaatacgaatcaacaaatatactgataattatatttgaaaatggaataactcattaaatgtggaagtgacagagtatatttacaacttgctgactataaggtcttacgcgagattcagatatacaaattgttgtctcgtgaattaacgaaagaccatacgacattggatgtgcaaggcgaggcatcaacctcgttacgcttgaagagacgtaggcgagatataatgactgttaagacacttagcgtataatacacagtatacaaacctagtataacagtcaggtaaacccaaacaactaatagtgaggcatccatcttgctataggatgtcacgctcgtggtaccttcactaatcaactccagacatctttcagtgagattcacagttccgtcgagtcagctctcttggatagaagctgacattcaaatgatgttggttgttaaagttcaccttgtcgccaagaactacgattgtcagatgaagtgttatgtcttcaagctcagaagcgacaagatttaaattattaacatcagaaagatgtgggaaaagctctagctcgctaccaggctaagttcccagcgagatgtcccagaatgatacgatttgcaatgtatttaatacacgtttacattgacccagtaaaagcagaccaatcacagttgtgtgatttttagatcttaactgcacttattttacgtgggatataatcaaatcccacaatttcaagggatacttgttgtaaaatatcattcaacactgtaattaactgcccgcctatgtaattataaatagggcaagttaattggaaaagggacgaaaagatcatcaaagaaaaatgtttgagagttgtatcagaaatctaaaaggtttgagagttgtatcagaaaaaggttggactatgcacaattttaactacaaaaccacgtaaaaaaaaaccttttttgttcttatcttttctttaccagattttaatttctgtgcaagtttattactacttaggctcaaatatagttaacgaaaatctgcgttaacagtttggtgctttcattgagagccttcgtgaaaatagctcagaaaaaaccctcattacattaagaaaacaatttctccatgaccgacaatagagaaaacattgacacacctcatgaagaaaccacttaccgtcctagaaaagagccaatggggtcccggaggcctttcaactcacaatctgaatggacaacttatctcaggataaccttgaatcttggaacaaagcatgaagaacctacgatgaacattggtagacctcttcctgatccagttggtcaggacgacgcctatgatccaacaaaatacataccaattgttgagttggaaaatcgccaactcagacgccgcctagaggaggcaaactgtcggaatgctaagttggagcgtgaggtagccactaccaggacaacataggaaaataatactcaaaataaccctgaccctggagagagaagaccacgtgacaaacctcgcgactcacgaactagggtgcaggagacagctcaggggaatccctagaacactcaagaaagacaacctggggaaattgatgctccccctaaaaatgagcagcctgataatcatccagaaccatctcatagaaatcagaatagaaggcaaccagaaaccagggaacgggtaattcttcgtagaaacaaggaaaatcctaggacacaacctagagcgtgtaggtcgtcactgaggaatcactgatattcttcttaaacccatagggaaggggttcgtacaaaccccagtgggagaaacatgatgagccacgcccaatggggaagaacaagtcgtgaagagacaaatgttagctcggggcacacatgaactcatagtcaatcagttcaaggaggagaaaacactcgtcgtgacaatgatcaaggaggcacaggaatgagtaaacctacaggccactcaagcacgagatccatgagtaggacacagtctatgggtagaacgaggtccgccagccatcatagccaaccggatctatgagaacaattgaaccagaaaaaacttgatcttcgccaacaacttggttcaaagcgaggggatccgatccaatcgcgcatagatgagttggaggataagttcaggaggcatcaagttggggagcaaggaaaacaatcggggtgtgattcagatggagagctcgagccaggggcttctagctcaaaaaggaaagacgactctaaggggtcatccaaagataagaaataaaagaaacatgacaaatatgggccagtttacactatctatactgagcttaatgaaacttgggagagtatctacctcgcgcatgagcacaatgttgcttttagtaaactgaagcccatgagggatgcgagacgggaaagggatccaactagatactgtaagtagcatagagatatttggcataaaatagtagagtgtcgtcaattgaaagatgagatagagagtctcatcgtgcgaggacacttcaagcaatatgtaaaagggtagggaaatgtacataactggcctaatccacttaacaacctaagaaactcaggactacaacctccttctattgaaggaaaggataccatggttatcttgggaggatcgcctattgcaagagaagaacaataatgcccaaaagaagaacgtgagaaagtaaaaagtaaagagcctccgattatatttttggaaaaagatgaagaaatcctgagatactctctcgttgacccgtggtgatcaccatccagctcgccaaccaagaaacactaaagaaggtggggctcgaggcagccaaattgaaacctagtatgataaatcttcacggatgtattggcgactatgtcgccagtcaaggaataatcaagctcaaatttacccttaacggggtacctttgtccgcaaagatcactagagactttttggttgtcaacctgccatcagcctataacaaactgttaggtcgcctagcattaatcagactaggggtaatcagttcgatcaagcacttttccctaaatttttaaacaccagtgggtgtaggagtagtgcgaggtgatcagatgctggcttgcggttgctatcgcacagagctacaacagaggaaagccggtcatcagctgatagcagtcttgatagaagaaggatgaactactgaaaccaggataagttcacctggagccatggggatatggaatggattgacccttcatatcaaaacccattttatcaaaaccagatgcttctggaaaattgataaaatgatcaattgaactgggaagttccttacgtgattgaaatgatagttaagattggcggttaaggagattgctgataaagaattactggaatatggaattacgatcttacttccagtaaattaatgattgtaactcacatcactgatgtaatattttgaacttcagttgtgaataaagttaatcatttctttaagtaattataaagcgttaccctttaaaatttcttaaggggaatatgtgtatgattaactacaatttatctagaaatacatgatataatgcaaatcaccactttaaaattttttgaaaatttttgaagttaatgatcaaacctttttgacgagaaacggatcaaactgttataactttctgattaaaaacctatctgacgagaaaggaaaatgaaaagtcataaatgatatataactcgtaaatagcgtgtgaagctgaatactaacactgacatggaaatgaatgcctcgtagagaaaatttccaaacacctggtactagtagtagacttccaggcgaaaccagtaatgctagaggaaccattgacagtataggtgctaataatgctaaagagaccaacgatgctagtggtcctagagatgctacaaggaccaatgtgactggatttagcgatccattttcttcttcgacaagctacagtaaattcaaggagaaattgtatacaagagaagacatcgaggaacatagtcattatatttctatgggtggtaaaccaggcggggagttacatgtaggaaagtattttagagtcaaagagcatttaaagatggttgttggcttgtatgcaatgaagaaagggtttgactactctgttaggaagtctggtactgttatttggtacatcacatgtaagaatatagattgtgggtggagattaagagcgaagaagaacatactttctaacatgtttgaggtgagtacatttcataatgtacatacatgttcccttgatcttcgag

SEQ ID NO: 26985 - DNA, 1835 bp, Cannabis sativa
atttgcacttgtgcagattggatgttgattgacatgtaaaagtaaccaatccaatccaattcacacatatttataaaattgttcaataagtatatacacaattaatatgtcaatgtaaataaaataataatttgaaaatataatgcattattagacttaagtggataagttagttatgttagttataggtagttagttaggtcgtttgttagttagttggttagttgtcctaaccagctctacactgcctatatataatgctagtgctgccattgtaatcgattgactcataattcaatatcaataaaatcaattttactttcttctctaaagaactaatatggtatcagatgtaaattattgaagcttcaagatacttcatcttccaccttcaagaactcatcaatggcgcaaactcggactactacctctactactaccgctgatcttccttctcctccagtggtcgatgccaatttagctccaccaccacaccaaacttctgttgaacctcaaaatcaaattgatgtcccagttccaatttctcgatctactctcattgatcgccctacttacgaagacgtgcgatcaccataccatctcaacaatgttgatcaccctggactcatcttggcctctcatgtgctaacagattgtaatttttagccatagaaatgtgatttcaagcttcccattggcgcctaaaacaagactaccttccttgatggcaccttacctcaacctcctccaaacaattctcttcacaactcttggatttcacgcaattagatggtgatgtcgtggatattacactctattttgccagaaatcaagagtagcatcatgaattcggacattgctgtagaaatgtggtttgtcctcaataatcgcttcaaccaaggtaatggaccacgaatctttgagctttatgaatccctcatttatcttcaccaaggagatgaatttgttagtgcctatttcactaaactcatagccatgtcggataagatcaatcaacttaggccaagaataccctacacttgtgatgctgctgcacaaaatcaagatcaccttaaccatgatcaagtcttgctgtttctcaaaggtctcaatgagtcttatcatgccattcgacatcaaatcttactccttgatccctgtccatctctgaacaaagtcttttccatggtgatccatcaagaaagacaaagaacattggggaatcggaatgctccacccatagttgctactgcagccacaacacctgttgctaatacggatccagcagccaaccaaacttcaaaaagtaaaagacctcgtcctcattgcgcacaatgccaaaaaccggggcactataaggacaaatgctactttctccatggtttcctacctggttatggtaaaacaaggtcaagtgatacaacaacccaacaaaatagaaaactagattctggctctacatctctaccacagactcttcaagtctcactccccacaattgattctcaattgacactagctccatgtcaataattaatttctatgctgagtcgacaattgcatctttcaactgatgcatctacattagacactcctgcaataaacaaccttacgggtaatatcgacccctttctcctacttcttggattttagacagaggtgccactcaccatatttgttgtcacattcaatgtttctcttccttcactaaactaatcaacaacatacaggtcacattacctagtgacacatctgttaaaatagaaaaattcggaaccataatcataaatcataatatcaaactacacaatgtcttattgttggaaattatttta

SEQ ID NO: 26986 - DNA, 1711 bp, Cannabis sativa
attaattaattaattaattgcataatatttatcaactcatcatcgttcgaaatcatgatatagtacactaaaaaaagagttatgtttaatgataataaataatgccttttttttataatataattccttacttttttatatttatacacaataatctatctcataaagttaaggattgaactacatgggtagtattattagtaccttaccttaatttataattaatatgaatatataagtaattaggttttttgaataagattttgatagccaaaattgcatgcatggctgtatattgaatgacatgacatacgtacgtacgtacctctttcaatggaaattgtctatgaaccgcagcgaaagcaacggtaacagcgggattcatgtgtgcaccggagatgtggccaacggtgtagatcatgacggtgacaatgaggccaccggccactgatgctcccagctgcgacactttctgtgggttacttccattgattgcagccgcaccacaagtaacaaacaccaacagatacgttgctatgacctccgccaacacctaccatgtccatacatttctgattatttcttttatatatatagattataaaaattatgaaaattctacaatgcatgtactcactaaaaagactgcagatgcacccttatttatttcggtgtgggaaaggatttttagtcttatttttttttacagtcatatatgttataattatttaagatatcttatgtacttttgagaaatttaaaaaaattaaatacgttgagaatatgatttaaatgtttattatacgattttttattttatacgcgtaaaaaatagactaaatattttaaatagctataacatatataattataaaatacaaataaagttgcattcatgatacactcattttagaaattacattgtcaaagcacccaaacattatatattactccaaaagaagaaaaaaataatctattttagttataactgcaccattacaaatttcactacagcaaattaacaaaagacatacatataaagacaaacaaactaaacaaataactaattatataaatatgtatatatatataaaaaccaaccactgcaaagattattgctttctattatatacaataaccattttattaatactcacaatgcaacgtttttcttactaaatatatcatgtgttaataatttaaatatcataattttttttatttttttgattagaaatttttttatcatcatatatgagaaagttatgatacattttacattggtaattaatacttttccaatgaaacaagtaatatataattgattcattccactcattatttatcctagtatagatacacattatcaattagtaagtatatgtatataagctataatttaacaagagagaatattgtacgtagatgtatatatatatatgtatatatatatagcatcagtgatattatttagatgtaggtaccttacgatgtacaccagatttttggtagtgttccttgagaacccaaaggggagatggtggggtgagattttgaggactctgagcaattggaaccactactgcattattattattattattattattattacgatcactactactcgattccctcgttactactgctgctgcttctattctgtccatttcttcttccttaattttcagaatatatattattttggtgc

SEQ ID NO: 26987 - DNA, 1749 bp, Cannabis sativa
attcttctttccatagccgccacatatgattatgagatgtggaaaatggacatcaagactactttctaaatggcaatcttgatgaaaccatatatatggaacagaccagaagggtatgtgttaccatggaatgatcaaaaggtgtgcaagttacttaaatctgtttatggattgaagcaagcctctagatcatggaatatcacctttaattaaactattaaagtgtatggcttcaaactaaacaaagaagaagcatgtgtatacaaatacattaaaggtaatgtagtggtattcttagttctttatgttgatgatattttacttattggaaataatgtagaaagattattagatgtaagaaagcggttagctgacaaatttcaaatgaaggatttggaagaaacaagttatgttcttaaaatcaaaatctattagtataataaaagattgaagacttagagaaattcgccttctctcctgaaatagtttcacatttcagaagaatttcttgaatctttaaagcttcaaccttagtggccttgcaatacaaataactatcatcaacgaatgaatgtgagatattctagggggctccattttctaccttacaaccatggagccaacctcttcgttgatactttcaaagtaacactgataaaacttcagcacacaaactaaacaagtatggagagagtagatcaccctagaaaatttcttgagatggaattattgattccatttcttggccaccatgagttaccatatagcaagttgacataacacaagttaataacagttgaacccaaccttcattgaacccggaattctgaagtatagcctctaaaaaattccattcaattttgtcgtataccttgctcatatccaacttcaattccatataaccatctttgccttttcatttccttttcaaataggaaactagaattttaccaaaaattagtctacctgggatgaaggtactttgagattcagaaataataaataagtctattaattttcacttttatttgtcacaaaattaatttttttgtattatatataatagttgaataaaatatttttattattcaatctaatcttgcataattagttataattttttatatattattttatcaaaatttttgtattaagaaaagaatatattataaaataataactgtaaaaaaaactactattcacaacatggtatttgacaccagtaaaaaaaaaatctcacatatttagagtgaatttgtttgcacttaatacttctgtaaatcttaattagtcagattttactccattaagttcatttgtttattaattttttaaaatactttttggcacttttttaccacttattcggttagacctatcaaagactcttaaaagttttaagacctcaattatattttatttatatttttattttacggtctaatcaaatctttttttaagtacatgcaaagtgttcactttctaatacgtatgtatataaaatatatatgatttgatataatatattatttcttttaaaaataataacaataatttgaaattatttacttaacttattaaataataaagacgtttgctttatacatatatatacatgatagtttttttttctaaaaaataatattatatatgtgatctataataataaaaatattggtagtgaggttattttgatagattttctcttcattttggcatctaagagatttttctaattcaatgatcgca

SEQ ID NO: 26988 - DNA, 2700 bp, Cannabis sativa
aaaaaaaacaacaacaacaataatattaataataataataaagctatgcacaaaatgtgtagaagacgttaccgccatagccgcgttttggtactccttaaataatgaaacggacggaaacatgccggacaagctgtgctgccctgaacactccctgtcttgactcctcccactaataccgggtgaacattctgaggaagtgaaccttccgatctccggcgacatatacttttccggagtggaataggctgtcgtggtaggcgtgcgctgcacattcctaactacggcgagagggcttgtctcgctaacttcggaagagcaggtcctctggatcttcctcggcgggcagaaaacccaaggttcctcctccaatacctcaccctcagtgcagaacttggacttggaagcaggtttagtgcagtaagggtttgcagtggtcttggtgagcattaatggaggagatgcgtttgaacgaaaattgggattaagactaggatatttgatagcgataggcttgcgagatttggaggaagccgaggcggccacggctgagtcaattacagcccacaacgcggcgtcgtcgagatccttgtcctccagaccagaataagccattggagaagccatctttgagttcagacttcagagcagctacgattttcaaacgctatttgaatttaaactaacactccctaattttaattaaggacaatgtaattgaatttgtgtgtaatttcaggtaattatacaatttagtatgtttgtttgactatgtaattatactgtatataattggaagtaattgaagagttacaattacactcttcaattctcatggcccctcatgagaattgaatgtaattactgtgtaattacaaaaaatattattttcctatataattactaactattttgccaaacaagatattaggaattcatatgcaattaccagctcatatccaaacatacattgcattttacaatatattgtaattactaccctagtaattatcctagtagtaattacacagttacttccaaacacactctaaatgaaggctaattaggatttttgtcctgaacttttacatgtaccaaatgatgcccctaaacttttaaggtccttaaaaatgtcctttgaactaggggtgagcatgggttggaaatgggccaactcaacccgaaatgggtcgaaacatggccatttttttatgggccgaaatacgtatgggttgagaaagatccaacccgctcctattgggttgatttcggcctaggggttttctaacccaatgaacccaaaccgaaccggccaaacccagcccaagtaaaaaaaatatacatatacacatttataattcattctatcaggtcgaaatcaaaaccttaaacctaataaccctcattttatttttctcttccgtgttctctcaccgtgccgcatcagccaccaccacactcaaccactctcagtctcacgcacggtcgcacgtcagccattgctcgtctcacgctcatctcgcaccagtataccattcagatctctagccgtgccagccatccaatccgcagcaggaaccaccaccgaccgtccaactgagctttccacacgccagccgcaccttctaagttttcattttcaacttgtaagactttttttttctcattgctctgttgaaatagaaataatttttttttcattgtcttgctagatggaaatgaaactaatttgaatcttgtttgggtatacgatgtttgtttttttttttataaaaaggtagtctatataaattttttattttaattttgctactgtctactatttatttatttatttatgatttggttagtttttgtattattatttttttgctataatcttgagcatatagcaattagcatacaaaattttattagttgcaaataaatatattataatcttttctactgattttttatttgtgatttcatggatttgattatttttcataatgttaattttattacgacatttagtatatagtaaacaaaatttttggtagttgctattattattataatctgatttttttccttatgagggagcttatgattttcttgtaggtaatacgattttctagatgaatattgaatgttttgttattatgtttttatttatttatttataataatttgactaactagtaactatgtttttataattgcagaacaaaaatttaaggttaatgaatcatcaccaaaagcaaagacaattgacgttgagattcttaagtgagaccgatatcgaaactgattctgattttctttaagtttgttatggacaatcttaatagtttttaaaactttagatgaccataatatttgatcttgaatgatttgtaagtttgggtggatatgtttatgtcagaatatttaatttgttttaaatttttgtatgattttgataatattcaaatctgatttttttttttaattatagaaagggttataacccaacccaacccaaaccaaaccaacccaacccgcaaaaagaaaaaatgggttgggttataaaaaaatttaagatgtgaatgggttaaaaatctctaggccgatgtcattgggtttggtcattaaaattagggctgagcatcggtcggttaggtcgatttttttctatataaaaatccaaaattcggttttcgatttggattggtgcaa

SEQ ID NO: 26989 - DNA, 2300 bp, Cannabis sativa
  modified_base (247)..(248): a, c, t, g, unknown or other
gtaaattcgtatgaatctagagccccgtacatcgaaatatggttctagttttttatcttgcattatagctgcattaaatacaagttttgctaacgctgttaaacttaacatattaatgattacaaactgataacgtaatgatagtatttatcaaatttgcaggtgtttaatattgttagtgcatttaaagaaacttttataacattgttagttatatgaatatattcaattggttgatatttaagtnngtttacagatgtctaagagttgtttctccatatattgctattaatgtacaaggaaaccttcattttgagtacataaaaaatacccccatatcaaattttagacccttttattaatttatacaaaataatgctaatattctcaaattatacctaaaatatccctcacatttaattttccctctctctctgtctctccctcttcctcgcatgccaaaagatttcccacacaggaccgataacctccccaaccctaaagactccgccagatcctctctctatctctatctctctctcttgctctcaaattcgacccaaagccaacccaaatttgacccaaaccaaacccgatccaaattcgacctcctccagtgcaaagaccacctcatgcgcacctaacccaaattcgatctctttcggcgtagagattacctcaagcgcaaagacccaattttgtcctccaccaccacgattcaaacagtcgtcgccaccaccaccaccaagctcagtcaaaaggtaagtttttttttaaataaaaattagatttttatagatttagatgctaatttttgtatattcttaagattaattgaatttgtgtggattttgtgctcttgctgatgataaattgatgttttagatatatttgagtagcgtgtgtgtgtcttatagtgttatcgatggaatatccataggatatcaaaagaatattgaccaaaagtcaaaaagggagttgattgtttgagtaaactggttacagttttattgatgaaatgtcgatagtttatcgaccaaaaatgacaatggatagttaattgtttgagcataactattttttattttttactatatatcaatagaatatcgacatgttatctatgatttaccgataattttgattagtatatatttttcagaatttattgaatatgttgatatgttatcgatgaaatatcgataatttattgatagtaattgattgttatttgagcataactgagtttttaaatttttttaaatgtatatcaatataatatcgatagattatcaatggtttatcgataatttttgttaatatatattcttttagaatatattatgtatgtcgatcgaatgtcgaccatttgtcgacaacttttatgcattatttgatttataaaattgacaatttttcaacatgttgttgatttttttttaaaaaaaaaattattgtattttgttattttttaattgagataatattgacagaatgttgatacgatgtcgatattttgttgacaattttctatgagagggcatctttgatttattaaagaatttttatttggcaatggtttatctatattttgcccattattttttgatggtgtgcttaacgtatgcttttgttatatattttttcaaatggtttcatgactcatagttctagcatctgatcatttcattggccacgtgacatatagaggctttggtatttttgtaaaaattaagatgcagtatgaggagtacaatttgaatgagacaataaaagcaagcagtttcggtcatttttggaatgtcatacccctcacattttctttggtgttatttcaccaagtaatgttgcacaagataaaggttgatgttgagaaggcaaaagagatgcaattttacattgcccagaaggagctcagatttggagtggttgagtttgtacttattacaagcctaaacttcacctcagggccaacaaaagaggagaagactacgcaggttgcctgctcggagtcagaccaattgatcaataaatatttcaactggtctgatagtatgaagatagaaacactccaagagatgttttcaaattgttagaacccggaagacgtgtacatgcttggcttatgcatgtttattgaggtagtgctaatgggtcatgaggctaacacttaaattacgctcgacatatttagatatgttaaagatctcaagtttttcttctagatttcttgggagaagtacacattcactagacttatgcaatcctttcaaaaagacatgttataacagaaggcaaac

SEQ ID NO: 26990 - DNA, 4680 bp, Cannabis sativa
  modified_base (3520)..(3531): a, c, t, g, unknown or other
  modified_base (4518)..(4523): a, c, t, g, unknown or other
catgcgatcgcacgcatgaacattgggctacggcgacacacccaccatttgaaagacctaaccggtattcctacacaaaaatacatagagagtataaagaaagccctaagttctaaacaatgggtcggaatgaccaaatctccagaattcctaaggaagtatacatgcgagtattcaagatgttcatctcaatactcgcaagtatttaaaatagcaagtaaaaagatgcgaatattcaaagtgttctccctagaattcacgcttatacaaattgaggtctattttctgataattacccagttctaacagaagaataaggccctgtgtgtattccctacgaataaacatgcattttgtattccccaaaatctcgaaaatacagagtgtttctcaaaatcagaaaccaaatttgaaagtagtttcgaaaactaaccttgagatttgacgattcccccgtgtgaatagttccaatcatttcagaagccttaaagattcaagaggggaaagtagaaatcaatctgagagagggtttttatctttgaagtttcggagtggaggaaaaggagaaaacaaaaatgagagggaaaataagggaatcatttcgtatcagaaggcttaaataccaatagccctcataaattgggatcgtgacacatggcaataggaatgcctaaggtcatcccatccaacggttaaccatgggcacgcctacacggaaaccgaagagtttcgtgacgtggcaccataggcaggataaaatgtaataattacagccatcattttttgaaaccctcgatgggacaacaaaaggtcaccacctcgtgacatctcttcgcctgcctctcaattatagtttccctcatgaccgcatctgtcagtcgcgaaactaggggcgtgtgttatagtgagatttttctcacctagaaactcgagaccagactcctatttaaaggacacgcgtattcaatttccccaaggaaagttgagctgtcaatgagagactcctcgagtatagacctcgcctgagccaaactcagtgagatgatacgaatatgaccgagtctaatcgcattcgaatgactcgcattatgtaggaccaaggaacgactatagcccgcatatatcaagatatatgcgagtatcctcgtgatcctcctgcaaaaacagagagatcgattctctatattgcaagctggtctcgatgacccaacagcctcgataaaccgatatcgactcgcatgtcttggttctatcagcccgttatatgatatccacaaaagggtctttacaaagacgtagacatcttagatccgactagtctcaaatgtatcctaagcctggaagcatatgtaggaatataaacagctaacccgcactagagaagtcgcatacgttaatgtatttagtagattaaactggaaattattcttcatttattatgtttacattttttagcttaatcattgtaaatcaatgtataaacggattgacaatgaatgcaatccttgtgtaaatgataggacacttgctttgtatataaaggagtgatccggcgtgaaatgaaaaatgaaagaatctttgcaacagtggactaagcagaagtgatctgactgaaccactatacttctctcgtgtttaatatttttccagtcttatattaagtatttgtgttcccggttcgagtactcgccattctgggttgaatactcgcacttgttcatcattttgttttttatcaagaaggaacaacttcattaatcaactaacaattacaaacaaatctcagctgaaggaagcaaaaccagatgcaagtcaactaatttcacagtatagttgctctatgaagttcctctcatatctattcaagctcccttgtttttgctattgataatctgtaaaacataatttttttaatatcctgtacaatagatgtaattgtgctagagaaaccattaaaaacacagttgtttctgttcaaccacagcctgtataccgtggctgccatgacagtagtacaaattctgctattcttgtttttgttgttgatcaccaacctatttttccaagcctggaactccttcgaccagaccccaactcccagccaattttgcatctgatctgcaacattgtaggagagactacactcaaagaaaagatgctgaattgattcagcaacttcagcacaaaccgggcactcaacattgtccagcaagacccgaaattgcagcattttgttccttgttagcaattgatcattaacaacttgccacaagataaacctatgcttcgggacatttattgaactccacacacccctgctgtaaatgaatggaatctgaggcagtttactgttgtacaaaagatgaggtttgaactgacccgaagcccctgcagtttgaatgtccaacttatcaaatttgtctctcacatggcaaagctttcgccaataccaactcgagtcaatctttagttcatatgtccaaatctttacttgttcatcatttttattattattataatttagtttttggtgtaataaaattccttcaacaacaagaaatgaatacttaacttattattaagctaagtcagtaggtcagcttaggaggtcccatatatggaatgtaaagacaaaattattaattaggtattgtggaatcttatgatttttactgaatagtaacggttggacgtaccgagttaatatgttatctatcagtatagataatttatacaataaataaggatatggaattcatatgaaggaataatctaatcttgtaaaattctaagattgatatctttggctatgatgttaagaattaaagaaggttattgagaactatggagattaaagcaaaaatagtatgatgttttattcttgaaaggttggtaaccagagaagatcaatagaatattagaaacatgtcatgggtatatttgataaaggttagattatcttagaataatctcttcctttgacaaagtgtttgtctaaaagtgataattaaatgtactattagttaggtacttcaataagtgtggtacaagagaaatattagataattgttactgaggtaaataagctagttagcctataagctaaccttaactcatgtgttgtccgaagtatataatgtgtttcatgtctccatgttgagaaaatatgtatcagactcaacccatattctttattgtgacgatgttaaagttcacacaaatttattatatgaaaaaaaaaaaacatcttgtctaggttttggactagaaaaaagaaatactatgaaatgagacaattccactagctaagaaagtgttgtagaaaaaaaaaacagcaagatagaaatagcaatttgagagatagaatcataaatatgggaataatatccttaattgtttaaataaattttgagtacgaaatttttataaggaggggatgaatgtaatatcccgataagtttaatggtaaataattaggatttatatgtatattatgtgttaatcaggtaataagtgggannnnnnnnnnnntaatctatttcagcataaaatttaaatttttctataagtgagtaaataagcataatttataaataatggagatttatatagcaggtgtgaatgtaatatgagctatatgtagaataaaaatattttcaggtccggcgatcctgaagatctgataagtggataaataagcgtaatttgttaattacagagatttatttgaaatacgtggatataatatgagtaatttgtgaaataaaaatattttcaggtttgacgaccctagagacccgattggaggccaaaaatgtcacaacgattttagttaaaaatattgattggattattaagataaattgattttaaaaataccgaagtattttaggatactcgaaattcgccaaatactctaaaagcagaagttttttaatggctaaaaaatattaagataactattaataataatgtttttattaatattattaatatattattataatattatttttaaaaaaacttatcgtactgtacgataagtttatatatataaatatatatatattgtaatttatatcagtaaacagtttaacgaaagaacgaatgaaaccttcttcctcctcctttgataaaaatttttcttcttctatctattttctttgattttcaacctcaaacctagtgatctaagctctagtaattgcgaaatagcaaattcttgaaaaggaaaaacttaaggtatgatttaattatgttttaagcaaaaaacgattggttttatataggggtttcgtgaattagaatagttatggagattctgacttcgtagaattattctttagtacctatgggactagtatcaatgtttacttgttgaattagaggtgattttgagttattaattgagttttgaactttttaaagcctagtctgaacgttaatggcatttttcatttatgggctcaattctaatttctgttatgcaaggatggtaatatttatggtatagatgcnnnnnntgaagttcggagtgatttggataagtttttgtagtgtttcgctaagtgagaaaattgggattttcgagtttcatagttcttagaaattcctaggagatcagaaaacgtatttttgtcataactttttactcgagtgtccgttttgaacgttttatat

SEQ ID NO: 26991 - DNA, 4550 bp, Cannabis sativa
  modified_base (2365)..(2366): a, c, t, g, unknown or other
  modified_base (2949)..(2951): a, c, t, g, unknown or other
gaatagatatatatatatatatgcttgataattaagataatgaccgcccactgctcagtccttataatataagtaacaattgcaaatatagcactattgaacattgctaattaatttgctatttaataattttatagtactgaatacttaccctataatattactattatattatatactacggcatttttttatgtatatatcaaaatgacaaatattatacaaatatggtgggtcggccgtataaatatttatataacttatgcagtcacacgaatcactttctttaacaacaatagctttcaacaaccaaaccagtaggccaactgaaaaaaaaccaaactaaacggagaatcaccataaactctgacgatcgacttttgagaagaagaccgtaagaaatccaaacacatacaatttggatttatgcaaaatcagacataaaaactggttcaaaactaaaatttaatcctgaattacgattaaatcgaagaaaactaatccttctaatattaatttttagattcataaaatttatatttgtctgaaatagatctagagttcatgatcaatatccaaatcaagtataaactaaaaaaaatgtatcaatacactagctaatgtttctctcattgcattaacgttgtttttcaaatttttaatagtggatttattcataccaaattacgaataacatagaaaatttgaatttatttagagccacgtacataaaaatattgttctactttttatgtttctatgttgttgcattgcggttgcataacaatattttacaaatgctttgaaactagatatatcaataattataaactgataacgatacaatagtttttatgatatttgcaggtgtttcatatcgacaatctaaaacaaaactctttaaaaaagtaatatatagcatggttatttttattaatatattcatttggttgttataaagttagtttgcagaattttaacagttgtttctccacataatattattaaagtacaattgattgttaatcagtgacaaaaaatactgacaaatattttcatgacgatgcacattcaaagtttttatttatagttgcatttaagttatacattagttgaataatagttatgttactataatattattatatattaaaaaaatagggcttagaattggcaatacatgactcgtactagagaaaattcaattgtggtaaattttgtttgtattacataggggcatacatatgggcattattagctgttttaagatttaatattagttgtctcacagtaaatataactgttgcattacaatttcataacagttatctcatagttgacttacattgcttaaatttttatactgtcaagaaaaagacacaagtccctttctcatatttggcaacgaatagtttgatcaaggaataaattatgtaaattacgaagctactggccaatacattttaatagatttgaatgcaaccaatactcaactgtaattgaaataccaagtgaaagaaggaaacaagccattgaggatatatgacgatccaagcttattcttctaaatacaactaaaattaaaagaaccttacttcacaagttattcattgtgtatgaacatgattagcaacacaacaacaatcaacatcacctcatttgcaatgagcaactcattagttgcacaacaattgttttaatgttgtatgctatatcctaaatattaataaaaacttaaagcatatcaatatcatatttgacacattaatgtgaagttccaaaaaaattcttattatattgactattctgttgaatcttcaaaaatttcttattactaaaatagcacaatttttaaggtccaaaataagtgttaccatgggaactcaaactctcaagaacaaccaaatgagaaattttatgtaaaatattccaaccaactacaccacacactcgatagtataattaattagtcatttaaaaaataaaaaataatcaatacttttgtatatatataaaaattataatagtaaatatatatacatatcttataccaacaatagtttaaaattataaatttcaagaaataataaaattttcttatgatattactaatatatgtaaaatctacattttttgaaatagaatttcatgtctattcattctcttcaggaaatgatatttgaatattctaaatatacaataaatttacaattaaaatatgtgtacaattcacattctattcaatagtcaaatataactttaccttgactataagtgtgtccattttataggtacgtgctgtggtattttcaacacgcaagtatacatatcattaacaagttatagactcacaaagagtgaggtnnatcccacaaggattgtagttaagtactttaaaattaaacatttacttctatttgattatataaaattttaagagaaaattaaaactagaaaataataacaacagtaaaaataagaagcatgtaaattaataaggaaattaacgataaataaaagttagggctttctatgcaatagcaggtttactaaggtaatatatagtcttctcaaatatataaacctcaattacatgcaaattttctactttcgtgataaattaaacatgtaaaaggcattaataaacataaaaaccttataagttatccaaaccatataggtactctcgtcctatatcaaaatttaaatttattttactagagcataattgacacccacttatgattttatataaaaatcataaacaattattaatgatcagacaattaaaaaaaattaattacgaatgaaataaaatatatagaaattgaggggaaattaaatcatattaaaaacaaaaattaatgtcaaacaatatctatctaaacccgacctgatgagttgtttagctactcatgttcatcgtagcaatttcacacatattaattnnnaatagaagaagaaaatagagaagaaaagaatgttgaataccctcgtgagaaagccttcaatatcaattttgctctccaaaatttgtactccttgattgcctattaaaaactattaaagtccacttcttttatagccaaaaaatgataaaaaaaataaaagacgctgaaaacttctttttttcaagattaggaggggcggaccgcggtatgggatttccatgcctaggcatgaccgcgtttatttgggcagtgagcttttttttttgcataaactgatagtattttggtcataactctctcgatattgctcagaattagacaattcaagatgtttcggaaagataaaagagagatctaaaacttttatgttttgacttattctaaaatctgatcaaaacatagttgaattcaggcttgaagttttagctttatttccttggacaattttctttattttttagatcatctttttgtgagatttgaccaatttatcaattccaagtgtcgaaacatgaaattaacgaaaacaagcacaattttattccaaaaagtgataataaagaagaaaattaactctaaaaataacataaataataggctaaaaatatcctaataaattccctaaaactaaatccttactcgccctcgagtaactaacaactaaaaataacacaacctaaatgaaacaactgaaatatgagcaattttcaagtaagataaataacatggttatgaacaaaaattttacctataataatctagaatttcatttcaatcacacttttgatccacctcaatcttttattcagttcatgaaaccataattagcacttaactaatagttgaaacaatttatgcatgccaattacaaccaccaatccactaactcaaaatattccataagcttgcaatactaactattctccactaatataaatcaatgcacaaccaagtgtcaaaaggtctttctaggcttaggtacgtgtagacataatggtcatttaggctcacctataccataatccaatcaattcaccccataactttcacaaatgcacccggtatccctttttttttttctaattacatgagatttttttttaacaatattgcaacaactttatttttattttttttcgtcttttttttttatgaattttttttcttcaaatttgacacttattgtcagattttttttttttctatttcaagttgttgccaatcaatttttttttcatattctctcaatttttaccttttcccacatacatacaacaaacttcccatccaaattcccccaaactaaagatccacttatggtataattatgattaaatttttaatattaatgggtttatcttatttaggctcaatattaatgggtttatcttatttaggctcaaaatgtgtagaaataaagaataggttaaggctcaaaaatcgtaactataataaattatagggatgacttgaaaggcacaatcaatccaaaaaatgcctaaattactttcttagtcatgcataatttattattttgcctcaaatagcaagcaagcaagttctagaatttttcaaacaactttccacatttcacaatta

SEQ ID NO: 26992 - DNA, 1789 bp, Cannabis sativa
atacaaaaaacccccattttcaaccctcttctcaggaaaaagagaaacagtgcgtgcacaacgaaagtagtagataaaataaagtatatggtgacaaaagacacaagtcatcggacccccatcgaagggggcgtcacaccaacagtgatcatggtcgtcatttcaaaaaaaatcaagcaaatcagataaatacacactttattatcactacttgccctaacaaatgaaagaaatgtataaatagaaaacttacacaaagacagcaaggcagaggtcgaagacgcctggtggtggtaatactttgcctaacaatggcggaggaatagtagaagaaaaccaggggcgtctggaattcggttgagtgggtttgaaaatctggaaactaaagggaagtagaaatgacctagttggggaaagtgttggcttttatagcccatttaagttgcgaggcagtgtcgatcaaatacatcgtacgatgagggttcacaacagttcagattcctcaatccaacggatgggatgaacgagtatgatgaagagaaaggacggttgaaacgcttgagtacctctctgacaccggcattgatggaaaggagtgtcaataggagggaatcaaattgttgcctgcaaaagaaagaaaggccattgatgatgataataaatattgcccatgtgcctgaggcacgtgtcattgcatttattggtggcggaggtgactcacgagtctcatttacctacgactaaataagacttgggggtaaatgttgctttagtttattcccaatatacgtggccgtcgttgtgtgtgacatgtgactgacatagacacatcacccaaagatgagttgaagacttatctaaaccactttaagaaagagagtacgattcaaactactagctcccggacatgagcaaaaggcctatctccttctccgggagctaaggtacggatgggcttctcttggccagtaatgctggagttgaacagtcacttttcatttaatgcggtatggagaaaatgtctgggaattcccataacaagacgtgtcagacgtcataaacccgatttggggggattacacgataatcaagggagctagtgatgactctattatgaagaatcatatcaatcaagaagggatgaagactaatctcacctaacacctacgcggcctactacgcaagttgtgcatgccctatttgtactttttggaaacttgtgcatgcccatagttggcacttaaagacaagttactcattttcttcttctcaccaatcgctataaatacccctcataaaaattaggagggggataaaaaaaacacaaaaatattctctgtaagaaatactctctcattaataacagagactcgtgtactgcggctcattaatgtctgaaccacgtaaaaattacctgtattaattatccctaagctctcattattacattatttatttggttgccaaaattctcggtcaacacttatgtatttctaaaataatccatatgtaaaaaactaaattaaattaattctatctaatacttttataaaatttttgtgataaatttttttaaaatatttttatatgaaagtaactttgtggtacatttggaaaaaataaaaaggagcaaatgacattaaaaaaaaattatttacaaaattagaacaaaagaataatactattagttggtcaatacaaaatataattcaagtttaaattatattaaatatattttttttattgttgtacaaaatgaccctattaaaatagagaaatgtaagtaaat

SEQ ID NO: 26993 - DNA, 2414 bp, Cannabis sativa
taatgtgtttacaaaggatttgccttcgatcttaaggtggagagtcgaaaggcgagttaaaggagaggaagtcgaggttcagatcggatcccctgccttgtgtgtcttcgagggtttttataggtcgattccctcgcaaagatcgtcgttgatggaatttcataaggatgaagcctcaccgttggattggtaggtggcatattttccatgtggcctttatcgatgttagatcgtactggttgtactgacggtgctttggacgtgtgtcactccggggctgttcttatttaaattacccttattcctagccgttggatcatcttgcacggtacacaaggacacgcatacttttccaagtagcgtggtgtgggagataatatttgacatcgtacatacaaaagctccaccattgggtccgtaacctaacacgcgtgggggagaatctctgcgggtcaaaggcgtaccctgaactagcgtattctggtggaaggtccatatcgtcattcgcgggagcaaagggtcccgtctcctagaaggaaaaaagctgctaatttgtggacatctttctcgaagatcacattcaggggaatctctctcgcggaggcctaagaggtctggtccacaaggttagagccttaatccttcgggggcacggagtgaggcccttgggcaactttaatgatttctcgcttttccttaaatattgtccacatgtcgtgctagttaaaatgcggataatatttaccccccaagctttcgggatgtgtcatggtctgagagcttgcagtattttcttttaaaaaatttccagcgcacgtggcatttatgacgagccctttaatgtattgcgtcattagccgtcaaattgtagcatcactatgtaggagatatgatttctcccacttttttggtgtgtgttcctgggaagcgcgaaatggcgacgattggacttgggcaatctctaattttcatcctccttgattgcttgttaaaaactattgaagtccacttcttatatagccaaaaatagtaaaaagaaaaaagataaaaacgctaaaaaaaaaacctatttgcttaggattagaaggggcgggccgcggcccatgatttccatgcctaggcgcacccccctttatttgggcagtgagtttcctgctgcatcgactgtattttggtcataactctctcgatatttcttgaaattgaacgattcaagatgttccggaaagatgaaagagagatctagaacttttatgtttcaactttttccaaaatctagtcagaacatagtcgaattcaggcctgaagttttaactttatttttttacataattttctctattttataaattatctttttccgagatttttttatttttttttccatcttattcttttgatattttctaatctttttctattttaaatctacaaaaataaaaaataaaaagcataaaattgctccaaacaagagtagaactaaattaacaacgcactaaaaattaacttgaaaataatactaaacacaacctaatattatcctagttcgaggaggttacggtgcgatttttgaatatctgcatcgtaattcataagtgattctaatcactacattaaataataataataataataataatacataattaaatgttatagcaagattacaattattgatgacatctttttcaaaaaaaaaaaaatctattgatgacaataattgatagtaataaattgtgcatatagtacgtggctttttttttgtcctttctattttatacttaattattagaaatatttaatatttagccatttgtcagccgacactataactttataatttatttttttttttgaaagtaactttataatttatttagtaattaagaaattgatcctatgttatctattaaggtttaatctatgttaaaaactgttcgaacttaatattattaaattaggtagctaggttgttgatatataaatgttattttaattaaagaattgactcaagatttaaaagtttaattaaatttaagttatacatataatatatgttattcaaaatatatatgggtgactactcaatagtttacccataatagtaggttatcaataggtaaaaattctatttttataattaaattagtcatatttaataattttcttaaaataattaattttaatttaaatatttaataagactttttttagcaatgaatatttataaataattttatttttatatttaagtccctattataatatttttaacattaaaaccatttaaatataatatttacaataaaattttaattttttttacaaagtttagacttccaccccttctaaaattaatttttgaatacataattaatttttaaaaatcacatctaattattattttgcaacaa

SEQ ID NO: 26994 - DNA, 2574 bp, Cannabis sativa
atgggtacttttagtctagtgttaatagaaaacaaaacagagttgttttggttaagcatttagtcatagttatggattttggtgttgtgatttttcagtattcctctacctccatgggtgcttgaagagatcagcaagaacccagatattgtttacacagacaggtcaggaaggagaaacccagagtacatctctttaggctgtgatgcagtgcctattctcagaggaagaaccccaattcaagtctactcagatttcatgaggagtttccgcgacagattcagtaaatatttgggcgatgttgttgtggtaagaactttctcaacccatcccaacagctcttctgtttgattaaatctaaagagatattttcaacaatataaaaatctaaagaggaattttcaaaccatttatgggcaacccaaaaacagaaaaaacttccttatcaagctataagattagatttatagtagtggagaaaacacttttgaggctcacaatcaaacatagctaggagacaaaataaaaacaaaacaggttaaaggatatgaggaaaatctttccaaataaattactaattacccaggtcaagtcataaggagtaatgatggtcaattcatttctaaaccccataaaaaaacaaagaaattatttctcctaagcttcatgaacctaatcttggaatttatttatattttacaggaagttcaagtaggaatgggtccatgtggggagctcagatacccatcttatccagaaatagatggaacttggaggtttcctggaataggagaattccaatgctatgacaaggtattgagccctttccttttatcataatgtcataaccaaatagtcttagatgcatttatgttcaatcctaaacacattttcttttcttcttcatgtctcatgcagtatatgagagcttcattgcaatcatcagcattggctattgggaagaaagactggggaaaaagtggacctcatgattctgccaagtacagccaatttccagaagaatctgagtttttcaggagagatggaacttggaataccgattacggtcagttcttccttgaatggtactctaaaaagctgttggttcatggtgatgatatcctggcagctgcacaaggagtattccgtggaactggaacgaaactatctgggaaaatagcaggaatccactggcattacaatacaagatctcatgcagctgaattgactgcgggatactacaacaccagacatcaagatggttaccttccaatagcacagatgtttggtagacatgatgctgtgtttaacttcacctgcatggaaatgaaagatggagaacaacccgaacatgcaaattgctcaccagaaggcttagtacgacaagtaaaaatggctactaaattagctagagttgagcttgctggtgagaatgcattggagaggtacgatcccagtgcatttggacaagttttggacacaagcaggtccgattcaggtaatgcgttatgtgcatttacatatctaagaatgaacaagagattatttgaaccagagaactggaggaacttggtggaatttgtgagaaccatgactgaaggtggtcggaacaaaagaatttgcgaggagtttgactttagtggaagtgagctttatgtcggattagtcaaagccaacaatatcaacaaagcaaaggaggctgctcttgtgtagattatgtacatgtgtttgttcatgtataacagagagcatagtttagtgtactttatataatagagaataaagcagtatgaaacacagaacagaaatactactggtgtatgagatacagagcagaaattggaaatttgtatttatatctttcttttagtaatggacagcttgtgttcatttgaaattccaaaccaatagctcaggaaatttctttccttagtttcctagaagcaatgctactgtaataaattacattttatctggtcaaaatctatttatttttcatttgattgaatattctcaaggtcagactgaattgggaacttgttttatccattataagttcttattttattctctatttaatcaggccaacaacaaatattccccatcaacttttatctatttaaggtcattcctcataagtctaacataacatcacattttgcattttccccacagttcatcaatgtcttgtctctcatgtgaagttaacatccttcaagaatcagtatctaatattatcttatatacatgtcatttgtttaaacaactagtgaacagaatgaaagatgaaatgtttcccttccatatgaatatgatcatctaatagatgattttctagaataagacagttttataaagtttaacctgattttatttgaatgatacgatcacctaatctaagtatattagtgggcagtgtacaaaatggatgagagagcatagaccatgaacaatacatatatgtgaaaaagcaaataaagtttcaagaaaagtctgcctaagtttatatatttatagagatattgaggatgcacatatcttgtttgtaacttttttgctcatatttatgtaata

SEQ ID NO: 26995 - DNA, 2683 bp, Cannabis sativa
cgattgatacggttaattgagactggcaacgggtcttgcgtatgatcatgagttaacttgtttctaactctccatatttcttcaaacacggcagcggcccctcccaagaaaaggtgtaagtgcattcgattaggacgtttgtcttcatctgagaaccacatcaaccaatcttcccagcttgtagccgtgagaatattagtatgcacttgccacaaacagccaaaccataaagctctcgcaaattcatagctccagagcaagtggagtgaattttcttcatccatgttccagagaggacagagaacattgtccatgtcgaataccataccaagtctagctctggtgagaagactgttagacagtattttccaccatatcatcttaaggcggttgtgaatcctcgcaccccaaatagttctccatttagcatattcaggcctatttatatcaatattcaaggacagtctataggctgactttatagagaaatcaccattcgactctggcaactagagctaggaatccttcgactggttgtttggaagtgagatgattaggatccttctggagtcatcatagttaaaccattgtctaactaaggtatgatcccattcgttgtttcggatgaagttacttaccattctgattctgcctgtggcatcaagccgaagtattggttggaggcgccccccgggcacccaaggatcgaaccaaatggatgtgcttctaccatctccaatcctcctacagaggccttccatgagtagagagcgctccctgagaatggccttccacatcactgaatccgtgcttttgatttccaagtcccaaaagctttggttttggatgtatttgtccttcattagttgcccccacaggctgctcccatccatcagaattttccaagcccattttagaagaaacgtcttattagtagcgagagttgatcgaaatccaagacccccagccaccttgggtgtgcacagtttcgcccaagacacagtgtgaagtgttcgcttatcatccgtatctccccaccagaagtccctaacgattctatcaattttgtttgtcgttgacaccgggataacatctgaggaagtcacataatttgatagcgttgatcccactgatttgattaagcatgtcttgccggcgctagaaaggagcctagccttccagccttgaacacgcttgagtactctctccactaagtgattcgtatcctcagttcttttaatcgatcgaaataggggcagaccgagatacattgctttgttgttcattcttttcattcccaacagctgagagatagcttgagcttttcttggggtgacaccctttgaaaagaaaattgaagacttaagcccgttgactgcctggcccgaccaattgcaatacgtgtttaggcaattaaggaatgatcttgcttctttgatggtaacttgcccgaatagaataatgtcatccgcgaacatgagatgagtaatggccgaacctcttctcgatagtttaaaccctttcaggagaccaaccttttctttagagaacagcaatcttgataaagtttcagctgcacaagtatgaagagggaaggggggggagagcgggtctccttgtctcaaaccttgttcaggtgaaaattttcccacgatggacccattgagcaaaactttaatttttgataccgaattgcaggtcttaatccactccatgaacgtgtttgggaagcccaacagaccgagaactttgatgacaaactcccagcccattctatcacagaccttctccaagtcgattttgatgagcatgtatcccccttttcctttcctcttcttcatagagtgaacaatttcccgagcaatcatagtgttctcagcaatgtgtcgccctttaacaaaggccgcttgattgggtgagataatcctttgaagaaaagggcgcaatcgggtggcaataatctttgatattaccctataagttgtgttgcacaaagcaattggccgataatccgtgacaagagtgggggaatggaagtatcattgatgtagctcggcaattccttatggttgacaaaatgggagatcacttggaaaagatcagaatggaccatggtccaatggtgattgtagaagctcggtgggaatccatctgaacccgaggctttatctttccccatttctgagaatgcctcttccatctcagttacggaaggaatagagcatagcatattcccctcctccatagtgattactctttggaataggtccgtaggaattgaggcaggtccatttcttgggttcctaaagccttctctgaactcctcgaggaagcaattggctatttgctgctggtctctaatccaatccccgtctggggagtctttgatgcattgaacatagttcctccgacgacgaactatggttgaggacataaagaatttagagcacatgtccccctcttgtagccatttcacccttgacttttgtttccaatgtatttcttccctaagaagggctttgttaagctgcatttttgcttgttctatcgcagttccattaatcggatcttccagttcaatcttttgcagaaaatcgtttgcaacttggacttgtttcttaacttccttgaattggagtttattccatgacttaagcttgtcacgggtagcttttagtttcct

SEQ ID NO: 26996 - DNA, 3652 bp, Cannabis sativa
  modified_base (900)..(905): a, c, t, g, unknown or other
  modified_base (2330)..(2332): a, c, t, g, unknown or other
  modified_base (2363)..(2371): a, c, t, g, unknown or other
tatgacttgaataggtggtctggaaggtttgaattgatttggagtcaatttgaataatttagaaggttttttggggtccctacactgaatcggtctaccagttcagtttggacctgtaggaatcaaagttctggttcatcccaagcagacccctcagaattggttttctggttggggaaccggtctaccagttgggacagtttagggtacccttaattttcatgtttttacaatgtttagggtactgccatgttatccatcgaatgggaaacttttagttttgattttaagtccctagaaagtggttaagtgtatcacttataagttttacgtatgttgtgacttaggggcctgtaaattgtcgagcaatagtttccactcagggtttttgacatacttgcattcgaaattaaggtaagattagtagaattatttgcatatacgtatacatgtttagcgtacatgttaattgccatcagaataacatatcagggtaccactgaggtgtacgtagagttgcaccgaggtaccaataaatatatgttaggaaaatcagtggccattagattagcatatcaaggtatccgtgaagtgtacatagagtttcacacagattccatatgctaggcctccaggtagtatgaattaactgctactttatcagtatgaccagagtactaagtataggctagattcgtagttagtcatactttgtcgagaatgttcctgacgcatttatcagatcgtgattagctgtatgggtgcctagttacggtctagatatatgtttatagttatgattatacttttcttactgtgtgtggtgactcatagataatacatgtatgtgcaggtaaaagctagaactgaaccattgtgagtctaaagctaaggatgaannnnnnacatatcaagacggttagacctggagcattcagggtcttcgggacgatgttggctcactttgctaatcgctagatgaccacttttgaagtttaaatattttgtaacttttaaaatgggatcctagtttatgtaaattattatgtttaattattaaagtaaaattatttaataaagttttaattactcacgattttaaataaactcgttgattagcaacgagctacatagtaaatataaaattatgataacacgcctaaactagtagggtgttacaaaaatactaaaataactaaaaacaaataaaattataataaaaaaaattaacactaaaaataaaaagtttatgaaaaaataactaacactaaaaattatatccagcaaccagtaacattaaagattatatctagtaactagtaacactaaaataactaactttaaagattatatctagtaactagtaacactaaaataactaactttaaagattatgtctagtaactaataatactaagtatatttttgttattttttctttatgtcatcattatttccatcatcattgagaattatttggtttgttcttctttttttgttgataatatcacaataatcttgatcaaagtcttccaaatgattttcttgatcttttttgttttctttctttctttaattcatgttctggtttttatttctcattcgggtaaaaaaaattgacacagtaaaattttcaagcccttatttcaaattgtactcattttacttcagcttgtaaataaaattgttcccacaaaacctttgaatctctataagaacgttaatatttggagacaacttgttaaccaatttatttgttgatgtgtctagtaatatttcagctacttcattaaataagaccaaagttgttttaacagttttgtcattgacttcgatatgtattttgaacctacataaaaaagtagagaagaaaaaaagagcaaaaattagagataacacaaataaaataataattattattttgagaaaaccaaatataaatttcttacttcacaataagatattcagatattttttttttttttttgcaagggccacaccaataaatatcatatttaggtacagctattctcaagcaagatttgcataagatataatatcatccaaatatattattgatgcttataatttttgctctcatagtaacaatatattcttacaacaaaacaattatcataaagtaaaattataggtattgaaacttttaaggttcgtttggtatgcgtattacaccatattgtattctatagtattgtattaaattgtattttatacaatatttttatgtaaaactatattcggtattgacttttatgggtacctaaatgtataatattttagtataaattaaaatttaacatagtattatnnnataatatgatatataatccaattcaatatannnnnnnnnaatacgacctaatacaacgtaccaaacgagcccttaaataatagtactaataatagcaaagtaattttctttaaaaaaaatccttcacttgaatatcactccaattagcctctaacaatttttaaatagacatcttgttaaaaaaatatgtcttcttcaagagttgtcttcttaacattataactctaacttacacgctctcagagttggtggaatttttttggattaataatgctacataatctatttgaatattaatgtagaatttggttgcccttatagaagagaagttaatttcatacattattgaatattcatcaaatatgaaatggtagaatataaataaataattaggtcaaaaaattttaatggtagtagaaattactattacaataaattttttaatgtgacggaactattcataaaatcaacataacttaataataaataaaaacaaaaataaaaaaagtaagatgtatataaaaaaaaattgcaacacttactaatatgttataactttgatgtctttttttataacaacttttaacaatttcaatatcaccgataccacgtaaacattcaataatatctatataatataaaaataataaaaaaatgttggaatattgtaatgatgaataattaaataaatttattaaagatgaagaaaatttaataaatgaataaatacctgagagtcttgtattatcattaacacataaatcagtcaaatttggagttatgaattgaaacacattgatcagaatgttaactatttttttttctagtctctccactgaagttgtaattaaaaataaaattttatagtcattcgaaagtggtatgtactcacctgtagttaccacacaatttttaaattttgcagacagtacaaaaaaccttcactcaataacttcttaaacttagaaactagtttttttctttttgttgcatacattagctaggttttcctgtataggataaatggtagacacattgagtatttaataattgataaaaataaataacagaggaaaaatatgaataaaaataataattaccttcttattaataaaaatcatatcgagacttattaattctctattgttcttagtattaggagactctcatattttataatctctaattttaaaattaagtagtaaattgaattataaaattaatagaaatagtttaggctatatataaagttaagtgatagaaaaaaaaaatgatcatttttaaatatttagtttcaataaaaaaaaaaaaagagagaga

SEQ ID NO: 26997 - DNA, 3430 bp, Cannabis sativa
  modified_base (2954)..(2954): a, c, t, g, unknown or other
tattttaaagtgtaaaaatagaaagactaattttattttttttttatcaagaattcattgtgttaaaaaaaagagaaattaccccatatagtatttttattttttattttcaaatttatggtttggatttctaaggtggtttctctctggtgatttttatgtgtgttgttatacggatttttgttgcaattcaagttgcttcgttagttgcaataggagtttctatgtagaattctataaaaatgaaaagaaaaaaaaaaaactattttaaaatgtaaaaataaaaaagcttcaaaaaaaaaaaaaaatcattaatcaataaacattacaaatcaactagggttgtcacctcatgatacaaagatcacactttacaattgatctaataatctcataactaatctatccctcttagcaaattccacttatttataattgcaactcttgctttaatatacaactttatcaattgtaatctgaatcgagattacttgcacagaataacgggcattagtaaatcacactagcaaccattgattaaaggttcctaaactttactatgttgttgactgttttattcatgggtacgtgattttaattctccgtacaactacaagtcacaatctcatatatgaataaagaatttttttgatatttatatataaattattcaatattagatattaataatttaatattcatgcatatgtcaagatattcaactcttgttaataatcaaaaatgtctttacaagattttcagggcataaaccctaacacgttctgccttcatataattccatttgtggcattctgaaattttctagcaaggatgcttctattattcttttagtatgcggtttcaaatcctcctcttccgaatctgacacggctttgctttgtttccaggcttaacattctatgagcttagtcaatgcggtaatttgataatccagccgcctagtatgttcgtccgggtattcgcgataccagatttcatggttgatactattcctgagatcgcctctacaaggattttctttcttgcctttggattgatctctttttgcattcaagctttcctggaggtctgctattgacatactatcttcagggaaaatttctttcattctttcactctgcttaacaaaatcaccagggtagttttttctgctgtgcaactctaccttgtggatcaatcgggtgaccttgccctagagtatcgacaaccttctttttttgtgtaggttggttggatacgttcttgttgaaccttggagaatttagagcagtcttttttgcaggttccttcataaaaccttttcctttgtcccttgtgggatcagaagttccaggatctgtaagattagccttttttgtagtgttattttctagagtaggctcctcaagatcattttcttcaagatcttcatcttcgagcttgatctgggtttgcaatttgtatttgacgagaaaatacctactgggctgccaatttttatttagtctcaagaagctccttagccatccgaattacttcgagatctcgctcgtaataatattagtcctcatttttattattaccatcatatttaggatcaccatgatggtcttcctgatcatcctcgtcaataggatcacttgcttctcccactgctgattctttgtggcaggacgactgtccactttagacgtttctctatccctagctacacccttcttggcatgtgtggtagaggtgatcaacatcatccatggtcgaagttgcaccatgagcagtcgatttagagacggtggttctggtgactaccattgttatagtgtggaacgttggtatcaaatctttcttcagtctcaatgaaagcatcaaaatatttaccgagattttgaaaaacaaatataaaatataataaaactaaagaaaataaataaaatataaagatttagacgaggattttaacgtgattcgagtattaacgagctctagttcactagtcaatattatttagctagaaaagcctttgagtattacacaagtatttgttcacgttttatgaaccctatttcttgccttaacttgtaagaaataaattttcaaccgtttgcatgaaggattatcattatatttattggcttaggatatctatataaatgtggcccactgatggagtaaatacaaattatataaatgacatttaggtcgatttgatgaggcctagcacatgaggctattgttatatgcttacgtgtaatttacttgacaacaggtggaaaacgtgagtcatttccacgtataataaatgtaatttgatgactgtttgataatcaccatatttccttgtatggaatgcttgatttttggaattaactttcgaaacaaagtcctgatatgatgggattctttattaattgagcactgaattaaccttgacatctagaggctatttatcatctttctggaagcatcactagtgggtattcggatgctctctttgttggactcttcttgtcatctagacgagatatctttccagaacctagatggcccgacttaataaattcaatccattatctttattgggattataaattgggcctttgttaattgaattttggtcttggaagtacatgtgtgtctcttctagaaacacgaataataggaatgttaagttatatcataataacttaatttaagaacactttacattttcatacaaagtgatgatatatctttaaggtactaaagattatatttatagatactttattgaaataattgatattttggaaatttagttaaccacttaaattatgacttcactcattatattgattcacataaatcaatatttaattacattcttaagattaccattaggttgtatcgaggagaaccttaattttctttccactatagaagtcagattcatttattgttttgaggatacatctcgnatgatgtattatagagtttcatactaggcctagagttcagaattatatttttcaagcctgttatagtgagatttctctcacctagaaacttgagaccaaacacctgtttagaggacacgtgtactcagatttccaatgaaagctgagatgtccatgagagtctcttcgaagttttaaacctcgcccaagatagaatcagcgagatatagcaagcatgaccaaagtctgatcgcacgatcataactcgtgttatatgggacaagagaataactcgcatatatcgaactatgtgcgagtaccctctctatatccttatataaacacgaagaccgactttctataatacgcgttggtcccaaagaccctgtcgcctcgataaaccaatatagactcgcatgtctaggttctgtcagctcgtcatgcgatgtccacaaaggcgactatctaagaacgcagacatcctaaacgtaatgata

SEQ ID NO: 26998 - DNA, 2107 bp, Cannabis sativa
aatgcttttagtaggattagaacctttatcttctaacttaacttaaatgctaagtagcttaatcataagaccaaagttaatattatgcttgtaaatatcatcttttattacaaatatatattgtaactaattaaaatacatatatttttttcctatttttttagaggagcgactgctctacctcgcttatacatgggtccgcccctaatcacgtctatacagagacaattctaattaatatttaacagtataatttaattacactttaatttgaggaaattacattgtatacccactttactttatttgtttcaatttttacctcaattttcatatattttttttttaaatatactcacttttgtagatgatgtccctattagaccccttaaattatgttcattatatgctggacttaagtaaaaactaatggtatattaagcaatccacttaaaaaaaataggtatattttaataaaaaaaataataaaaaaatatttttaattaataaatagagaaaaaaaatatttttctacttatctcttcaaatttgtaaataaaaataataatactttatgagataagatattaatactttgttttgttgttggggtttatgaatttgggcaatattatggttcttataccattggctggctcccatgagaataaatcttgtggctttgctgtatataataataataataataaaatgacacatctttttagataatatttttcatttcactaataacttgttccatacattatttttggtttatgccataataatattcttccaaaaattgcattgaagtcatccaattgtcccctttttttttattttttttacaacataagaagttataattatatatatatttttcataaactttagtactaaggatggaggattattgttgctaagaaaataaaaatgagaataccgatttgtcaaaaataaaatttccaagaccaacttatggattgagataattttattttaataataatagaaaaattatagtagtgtacaagtatattttaataataataattaatgataaaacttcaaattatgttttaaaaaaatatatgatgattaaattagacaattttgtacaattatagaaaaaaaaaattggactcaaatatctatatcaaacttctatccaaaaatatttttaattttggactcactacaaaatttatgaaaaaagtatatttttgccttgaatttcgtagaatattgaaagaaataatttgtgaatctcgataattattttaattaattaagaacatatttatatcaaacattgaagctataaagttggataggttaatattttgtaactaggattaaattaagaacatttaaagataaacttttatgaataaaaatgatttctactctaactatttcataaaaaaacaactttagttgaaaagtttttcaagtagttactcaaagcccctaaatgtcatgttagacattatttttgcctaataacaaatgttattagtagatctaagttgtatctaacacgactatatattaagaataattacatataagatatatttttttttttgtaaaaaatttatatttttatatttaaagtttttttatatatatttttacattgttttataaaaataaaacaaaaagaataaaaaaattacataaaagtaactggaaaataacataaaaaagtaataacatacgaataacaaaaaattaacagcaaattaataagagtacaatataaaaatatatcaatagactgtatattttgtaaataaaattataaaaattgtaaaaatatttaaaattatatacatttatatttttgtaatttttttttgtttttgtatatttgtgaaataattctaatatattattataaggttactattttggaccttgtattttgtaaaatttattgattgaactatctattttattaaatgatacaataaaccatgtattttctaaaactgtaaaaataggatcatgaactcaatttttaacaatttttaaaatataactagcttgtagacaattcctaatatgaacagatacagaaaatgtagtcaattttgtcata

SEQ ID NO: 26999 - DNA, 2387 bp, Cannabis sativa
ttttggttttcttattatgatctcctactatttatagaataggttgaagagaagctttgaacaagtgtgggtcttcaggagaagacttttccaagtctcatttcgggaggaagtgggcatatatctctgggagaagatttgtttaagtctaattacttcgggacgaagtaagtacacattcaatagctgaagggagttcactacttggtgtgtttcagagatcatattagcgaggtggattacagagggttgctgcaaatcactacagggagtctaaatttgtttaaatcatctgcttttgtaaactttgatgcttttctagttgatttcattctttaggtgtgaccccgtggactagtagtgtttgaaagaacactgatgccacatacaattctcttgtgtcaagtttttatattctgcactatttatttttggtttgtttttgaaaaattgtgctctgtagtgacagaataacattctactgctgtaaactgttacatcagtgtttttactgatatttactataattattggcatttgtaaaaattcgatttttcaaaagttcttccaaccaaatacattctgaatctaacataagagcacacttaggcaacgaatgggcttcattattaacagatctaaagacatgagagaatcgtttcacacttaactcgtggaaaattgattactagaagattaatatcattaagtatagcatgagaagcaaaaaattattaagttgaagtctttaatccttgaattaccaaaagcaaattcatttcaataaattcaatagatggttgaagagagaacagtaatttaaaaccctaagcgacaactaaagcttccatttattcaagtagttgaaatttttttataggcccgtaaattaagtagttttataatcacttttttacactgtgaattatttaaaattttacaaaagtcaaatactttctgtttgaagattgatttttgtgagaaaagaaataaagtaagaaaatgtaggaaataaaccaaaaaaataaaaaataataaattctcatgttatttgctatagaaataaaaattgtatggaaaaatacttaactcaataaaatttttcatataaaatttaaaaaattaattgatattgtcttaaataatttgaactcggttgtatgaaaaaattaaggcggcgtttaattaggaggactgaaacatagaaataagaaagagaatacgaacatgaatatgattggaatagaataaaattaaattgataaaaaaattattaaattttttcttatcatgtattagaatggtctttccttccattttaaaattgaaatagtcattccactaaaatagtaaaaaaatcatttcactgaaataatatttcaatattttaatatacaaccaaataaaacaatgtaacgaagattatttcctttcaatttaattatatttaacttcattattttcaaccaaacgtgacgtaaattataatttttagtcatgtaaaagtaaaaggctcctatcacagccaaaggcatgcccaccatataatcaatgccttatatctatatcttttgctagacttggaaaggatttaaaagtaggaaaataagaatgcatgtgattgttgtgaactgatgctctccttggtcaattacagaatcaaaatctcgtcacaatggcgctaaggagtggagcactcgactactgctactttatattagcttaaagcatttatcgtgaagatgtgaataagtggtaaaaagttaaaatatagctcatttaataaaaattgtactctaataatgtgtcaaaaagtaatataaatttagtaaatagtaaattttgtgccaaatttaatacaatattcactattatgtaatatttgataccacaataaatgtactaattttttatttacatgattacatctatattatttgtattattttattattatatttaactatgacattaaattataaaacatttatattatttttttattgtcttacatattaaaataataataaaattgataaaaaagtcactactacaaaccaagccttcagaggcactttttttagcataatattaaagaaccgacggcatagggttaggaagtttaggaagggattttgacgccacttatggcatcgtttttttagaaataaccgacgccataccctatggcgtcggttatttcctaaaaaccgacgccaaaagggtttataaccctagcccagcccatcgtcttcttcattcgtctagccaacccaaaaacccctaaacaaggaaaccccaaaccctttccgccaaccaccacggaaaatcactcccatttcacaattttttcaccattttagctcatttttgtttctaaatcttct

SEQ ID NO: 27000 - DNA, 5778 bp, Cannabis sativa
tgatccatgcaacataaaatgatttctgatcttttattaattagtaaatttaattatattgaaatggtttttatttagggtataaaatcctaacaattatgttgtttctatttttaaaatgaataaaatatcaattataaaagtataaataaaaatatcccattaatttttggttgtatgtatataattttgttaatatggtatatataatttttttaaaataatattatattatattattttattatttattgtaggtatatatgttttgttgtatgatatacatttttctatcattcatttaagatgatgtttagtttctattttattatgtataaatttttggtatggtatacatattttaatactggtatatatgattttattagcatgatatatatattttttgagtattaatatacaaagtctagtattgttataatttttttgtggtatataattttattagtacgatatactaattttaagtgatacgatatatcaaatactgttgtatatatttaatgatctaatatatttatttgtttttttgtttcaatatattaatatgcaatactaagaaatttataaaacttaatttagtttttatataattttttaaaaaattattatgtttaaatttatttttataatttttattagctaatttattatatttgattattttgctatatttttgaaaaaaatacatttactaatttaatttttaaatttagggccattttgcacctcattcgtgcacaaaatgacactaggcatggaaaaaagatccatttattcagattgggtcggagctccgatccgacagattagttctgatatgaaatattcgaatcacttatcggatctaagccgcttttccttgcctaatttttttttggatcgaattcgacccaatttggtttcaatatattctaaaaaaaatcccattctgctgttgagtcaaatccctaatccaaagcaacgatctcagtatccatagcagagttccaacgaggatcgatactagcttcttggaaacttgagggttcaacgggagtacctgaaataacaccataaaacacacggggctttcttatgcccgatttagctatagtaatcatgggatgcacattagtggaggcaatagtagtctcatgaggattatgcaagtttaccatcaaaggatcaatgtggtgagatgaagaggatggggctgatgtagaagatgccgtggtaggagtaggtgatatgggaataatgggagatgatagtgatggagaaggatgggataaagcaggttgaggagacactggagaaagagatgagggtggtgattgtggttgaggaacaagtggaggagtacgtatggaggaggaggcagagaaaggtaaagcagtaagtattgtttgttgtttgttaggaggtagagaggggagtgaagagtaggcgaaaggaaaagaagattcattgaagataacatgacgagtgataaagatgcgacttgaggtagagtgaaggcacaaataccctttatgtttgctgctgtaccctaagaatgtgcaaggagatgaacgaaactcaagtttgtgactgttgtaaggacgaagaaaggggaaacactggcagccaaagactcgaaaaagagagtaattaggaggtttgtgatagagtagttggtaagggctggaattgtgaagggtacgggtgggaagacggttgattaaataaactgccgtggagaaggcataaggccaatattctaaaggcatatgggcatgtgccaagagagtgagaccagtttccactacatggcgatttttacgttcgacccgaccattttgttggggagtgtggggacaggatagatcatgtcgaatgccatgttgagtaaaatgttttgagagagatcgatattctcctccccaatcggtacgaacagattgtattttaccgttaaattgagtggaaactaaattctgaaaaataaggaaagtattgaaagcttcatcttttgtgttgagtagatagaaccaagaaaagcgggtaaaatcatcaataaagagccaaaaatatttaacaccagtaattgcagtaatcggggcaggtccccatatatcagaatgtattaattcaaagggtttggaagcccgtgatacagagtttggaaaaataagatgatgagatttttctaattgacaagcggtacaaaacgatagacaatctcttttcggaaatgaaaaattacaaacagaagaaacacgagaaataacatcttgagtgggatgacctagacgagagtgccatagatcaacagaggacttggatgagaagagcagctgaggtgaagcagaggagtgcgaactgctggaaggaggtgtgactcgatagagaccttgatcaagaaggcctttgaggaggatttgatggttgtcctgatttttaacatagagaaaatatggatgaaattaaacatatgcattattatcaagacataactatgatacactgagaagatttttagaaatggttggagaatggtaaacctgacataatttaagaagaggaacagtagatgatggtaaaaaggcattacccacatgagaaataggagcgagcttaccattgcccacagtaatgtgatcctggccatgatggagttgccgattccaacaaattcagatcgggagtaaagtgatgagatgctccggagtccatgtaccaagcaggatcattaatgggtgaagaagaggaggggttgggtaacaggggaggagtagaagtaggttgttgttgtgtgaaataggcattaaagggacggggggatgatggaattggttggtattggagattagttcgatgatagcaatatgcagctgtatggccaactttaaagcaaatttggcatttgaattttcgattgtttgggcgaggagaagaaggaagccatggagcaggggcacggggtgaagaattgtaatgaggtcgaggttgatggaattgaggattagatggtggtcgaggtgggttgtggtgagggtatcggggaggtatttgggatggtggtgaaggggtttttgggcgttgtttgagataagataggttggctatattggcttgaagggagctgatggaagcggctgccgtttgtcgatccaagcgagcttcgtaacagagtaaaagagcatgaacttcctccactgctggcttgattggtctggctaatattgtggtgacaaaagcattgtattctggccccaatccatttagtaagtatcccagatggtcttgagaagaaatcggctcacccacagaagcaagtgtgttgcagagtgagttgagtttctgcaagtatgctgatgccgagagtcctaatttcttcaaattttgcagtgttgttcgaacgtcggagcttcgtgcaaatgaggcagcggtgtaggttcgttcaagtgagacccagatttcggtagccatattaaaactcacaatttgcccaagcatagaatcagaaatagaggcgtatagccagctcatgagaagacggttgaagcgatgccaagctgtgaagtttgggttcgtctgtgtggtgtttgaatcaatgaactgtggtggacaaaccaccgtgccatatcaatgtatccttcaaaaggccattagcaataattatattctgcatttgcattctccatactagatagttggaatcatcaagcttcacagaaatggttggatttagagatggtattattggatgtagaggagttgagagagaagaagaagttgcaggggtgagattagggttaagggcggcggctgttgtggggtttgcttggttaatgatattagggttttgtgtgttttcatcctctcttggtagggtagagtttgtactcactagtgatgccatgggagccaaatcggctctgataccatgtacgaaggatagggtaaaagtgttttctattccttaaagagaagttatacaaattacaatgtatatttatactgccctttgggaaagtaaagaaaaaggatataggacacatgtcctgaatatagaagaccacaaacaaacactaaaataaagaaaatacattaagaaaataatcattgtttaacacaagctaaatgcttgagttcgattgaaaagatgttgctcaagattcgaacttggagttcaaggcatatttcatttgcagggagaactacactcatcaactctgttttaatagcaattcattcctactgggcactaattgtgatattagtgcagggccttcctttggaaaggcacaactgaatataatggaccaggttatataacttggtttggattatgtaaggttcaaaagcaagggtgattgggatgtagaaatctgttactatggaacaaagcagctgttggtaaatacgcttgggcagtagccacaaagcaagataacatgtgggtcaaatgggtttatagtgtatacataaaaggaagcaattggtgggattataggagtttcacccaaaacagcaagtactggcggcaaattatgcatattaaagaagagattaaacgaagaatcaacatgcaacaatttatactacaaaggtaattaattcaacaaggatactctctgattgttcagaaatatgaatttcaaaaagttaggatggcaaggtttgggaaagatttttgattcccaaacatcgattctttaattggcttgctactcttaatcagctacaaacaaaggataggttatctcatttcaacatagtcacagatgggaggtgcttgatttgtgatcaaggggatgaaagcaacttacacctattctttgactcccatttcagtaggaaatgccttgaagccactgtaaactggcttggatggagaattacaagaactcctttagtttaactcctgagagtactcaaaaagagcaaagaagtctagatttcaatagtaggtctgtgctacatctcttgctgctacagtttaccacatcagaagaagtagaaacgatgtactttggtgccaaaagttgagcacaattcagtcagtaatcttgtagattcaacaggatgtaaagatgtgaattacaacgattttgccaaaaaaaataaggggaattgacattgaatggtttgatcaattgtaattaatatgtgtaaaaattacatattcaggcttttaaaaataaaagtggtacttgcttttaaagttttgaaagtttgaagcaatacaactttctgattttctcaaaaaaaaaaaaaataataacaataagaaattgagattctagagagagaaagctcgcattgagagaacgattatgagcctaagggtggatttttattgaggaaaaaagaaaagaaaaatcaatatatatatatatataaaggaaggtttttagagaagtgatgtggcatgtttaagcttcatattatctctaatactcatttttcccttttcttaatttttttaatttttttttccaaattgtttaatgttgtaagttatgattttaattaatatttcagtttacgttttgtaattaattgtagtttctcaatgtgtcccttcatgtgaagattatatcacatataaagtgtattgatgattaattcaaaatcaattataatctttaattatgtggaggaagatcaaaagataaaaaatgcaatatatactgtatagtttttttacctacaattgcacatatctaacacattctttccaccatcactctttgcaatctcaattttatttttaacatttaaagcaaa

SEQ ID NO: 27001 - DNA, 3998 bp, Cannabis sativa
agtaaataaaccaaatgacataatctaattagttattaattaagagtttcattggatttatgaaattattttcactatttttcttaccatacactactacaaatatggggtttagtgacacacttttaaagactctaaaaacttttagtgacacttcagtgtagtgacacttcagtgcatgtcactaaattattttagactctctcattacaggtcagtatatgtatttgcgcgtcactgtatgtatttttttatttatttttcaaataatacaaacactcaatgagcgtcactaaatcatgcttttattttatttttttaaaaaataatatgtattatatattaatttttttttatttttatttttaacagaaattaatatgtattatatattaaatcacgataataggtgtatatataaatttatattcaactaacaaaaattaatttacaaaaaaaattaaataaataaacaaatatagaatacattacactgaaaaatattcctttgatgaatataatataaaagaagtaaagttcagcaaagctaaaattcaatagtggatatgaattgaaacccataaactcagaaatagaatgaacattacaacaaaataaaactaaaagaatatcaacaccaagttgcagtcttgacgaccacgaacccagaagccaagttcaacacgcattacagaaaagagagaaatagagaaaaaaaaagttgaagagatgtcgaatcttagatccgcggtcagagtggatgtgctaggcggagaggctttgggatttttggggcttcaaggtctgtcgtccgccgatggaggtcgctttggccttcgaaggccggcgacggcggtggtctttgaaaggtgtttgaacagggagtcatcagatgtgaagatagaatttttttgatctaaatagatggagttgagagatcatatctcaaaagaaaggaaaaaaaaaaagagaaaggaaggaggcaagagagcgccgctggtttcctttctaactgtataatgtagggtttgctaaatgaaacccatatttatcttttttctttatttacttattaattatatttattaaaggtaataaggttatttgaaaaaaaaaaacaataagacaataaattatgggtacattcatttaacaaaaaagtataggtacatataaaataatggtacctataaaagtaattaaatatacattattttgctgaaaagttctctttcatggatatgatatagtgacgcgctaggcgtgttgggacatatttatatagtcgcgcctagaacgtcactataagtcaatattttttttactaaaaaaaataaaataaattgtaagaattagtttttagtgacacttcttatttttagtgacccaaattataggacactaacaatgaattttagagtctttttgtgcatgtcactaaaactcatttctagtcttttagtgacccacacttttgcgtgtgtcactaaagagtgtcactaaaaccctattttgtagtagtgataattttggtaagagttattattaatatgagatatttgtttaatcataaaattattgagatatttcatactactcttatgcttttgtgatttatctcattgttcaactcacttttttaatagtaaattaacagaagcaaaaatcaaccttaatgagtttacaaaaatatatcaaccttccattctttagttcacaaaaatcatcatcactatgaaaatcccaattgaaatctttgtatacgaaatattatctagaacttccctagaaacagtagcatgttgtcgaatggtttcaaagaaaataaatgaagccacttacgaaactaagttcacacaacttttctacaaacgagccaatatagcttccggtgttcgtattctaagtctatgattgatgatttagtgttttttgcactaactatatctccacaccacactcttccacaaaactatcgttgagaaattttcttccttgtaatattagaatcgcagcagccaccaaatgaggtcttctcctctgcatcgagggttatgacttgccaaaatacattgtttgtaaaccaacaacgcaacaatggcgaactattccaaaacccaagactcgtttttgcactaaaaaaatcatgatgcttactcgagggttatgacttaccttttattattcagtgtttttacctttatttaattcatatatatataatacaagtttattatttgtgaattaatttctttcctttattatcataaaaaagctattttttaactagtaacttgatgaccacgaaaaaacaataaatacttcttaaagttattatttcttttaccatattaaaactattactctatttttctcaccattattttggtagagttattattgtttttttgttcaattcaaaattacatttaatgcttcttcactcgaggagagccatatatattacattctgggaactcatatacacaaccttgatgaaatcatacaaatcaaaacaacccatcaaaatatacaaacctcgaaaaaatgataaaaatgaaagtaaaacaaatcaaaacaaagatatgaggttaaaacaatatgaaggcagaatcacaatgtaagactacttttactttctatggttgaagagaacccaagccttcgcatatagttagttatcgctctcactctcactcgatcctttcgattgtttccaatctcgtttttctcttccaacctttcattgtggcaaccaagtttaccagtcctatgatttggttttttgtgtattcctacaatatatgtattattaagaaaaaggtttacaattcattcatatgagcttggtgaaaagagttcacaagtataaaatgtaagctaattaattagaatttttacccctgaactatgtataacaaattatacccgctgaacttttcaggtcattaaaaatttcttccgaactattgagattgttggattcaaagacacttgttcaactttttactaacgaaagcctgacgtggataaaaattcacgaggcacgatttggtaaatgaacaattatcgtgttagtaaaattgaacggaatcgaataaaagtccttgaatctaacactctctataatttgggacaaaaattttgaatgcctaaaaaattgagaggcatgatttggtataggtcaaaattcgagaacaaaagtattaattagcctaaaatgtaaacatttacaagaatataatttctttcttaccgggtgagcgcgtgaccagtgcacatattcggtttcgggaaggtagtaagcctatttcaaaattggtaagagaagcaaacatcaaaatattatgtgtgcttgtaaataatcacatgagagttggtttttgagaagttaccttaataaaggtttcgactatatgaaacttgggcttcacatttaccgggacgatatgttggagtccgttgattaagacctgaaaggaaacgaacaaaaaaatgaaagcttaatactatgttgtaaacaaggaacttgaaaagatatatgtggttttaatgaatgacacctgaagatccaatgacattagagctcgtccttgatcagtacatctcttcactcgtgatagaccttcaactagtgtttcagcgattatttcaattccatattctgaaaggaggtcttgaagctacatttgcagaaacagttattcgataagcttttgctatatgcgcttttgtgtagagatgaagtcgttgggcgattggaaaaaaccatttcatttcttaatgcataaatatcacatgagaagccaaatctaaaaattcgtgtatcaatatgacatgcccaatctaattcagcataagatattacctccttgcgaattccgccatgagtgagcctcgtcttatagtgcttaaactctcccaacagcaaatcaacatacctatttagtcaaaaactaatgtcagacaacttgaaaaattgtgcgtacagaaattca

SEQ ID NO: 27002 - DNA, 2134 bp, Cannabis sativa
aaatctagatttttaataaaatttaaaaaatttatattaattaaagctgaaaaaaaattataggaaacccttatggagtcggttattttataaaaactgactccatagggtccctatggcgtcaattatttcagaataaccgacgtcatagggtccttatggcgacggttatttcatacccctttagcgtcacccggatcaacgtcggtagcgaatttcgccaaaactgacactgaacggccttaaaaaccgcctctaaagcccatatttgtagtatatttttatcaattacatttaagtaagaacagtgtaatacctgttcttattaaagtgtatcatctgctatgctgttaaaatgtaagcctgtgatttttttctatcataatgtacgaataaaataacacaaaaatatatatataatatgtaaggttacgtttggtgtttgatgtataatggagactgtactggaatcaaaaccgctattataatcttcgtttttcttttaaaagtgatgcatgtaatgaaattacaacgtaatggtgattacattatgtaatggaatctttattacattggagaagctatgtaatgagaattatatcataaatattgaataaaataaaagtaaaatgaatcaaataccttttttttatataagaataaaaattaaaatatagataattttgtgaatttatcacttattctaatatttattccaacaaaaaataaacatcgtaattaatttttattatcagacttattataattttctacactattatttactaataaaaaaataagaaaaaaaaattagcaaacaaaattaaaaaaaccaaagagaaaaaagataggtaaaaaaatgtacaaatgattaaaaaaatatatatttttttacaaaaaaaaaatagtacatgagatgatagagattttttattaaaaagaaaagaaaaaaaattaaaaaaaaaatggtcaacaaaattgaaaagaacaaacacatgaccaaaaagataggtaaaaaagtacacaaaaaactaaaaaaacaatatttcttctagaaaagatagagtacacaaaaacttaaaaaaaatgtgaatttttttaagaaaaagatttatattgcttggaggtgatatcatctaaataagtatcacaattttcataaagtgaagtatttcagttttgtttagatgttattttgataaacattcaacatctcagagcaagaaccttgtagctacccgcaatgtaattaaggaccttgtagctactcatagtataaagattttgcattatctcatattacacaacagtgatgaatcatctcatataacacaacactgatgaatcacttcgtaagaaacagtagtgatgaatcacctcataatgtacaacagtgataaatcacctcgtaatacacatcagtaataaaatattctaacatactttttatcctattttttatttttctcgagtataaaaagtgggataaaatgtctcatttcttgtaatttggagaccaaattttcgatggtagaagtacgttgccattaaaagtgagaactgtaaaaagtgtgagacaagatcaggagaagatattttgtaaattgttaatagttataagtataaaagtttacatacaggtgtaaatgtattttgataataaaagttagctttttatatatttttaatataaaatattcagaaatatatacaatattttgttttaaggatatataattccaaaccttgtatttcgattaattattaacttaaacactacaatattttaaattaattatgttggacttaatgttttatataagaaattaagattagaacttttagataaatacttaaatgtaaccaaggtacctttacttaattttgaaacacaaacagtccttataattgtttgggagagagcaaattattaagcaacaactggagataaagtgggcaaagtgaaaaatgtgaaagtattttaacatttacacattacatatatattttttgaataaagttttttaatatattgataaaattgaattatatatataaagggaaatttttaatttcgttgttgttttggtaaaactttacaaaatataacatttttttgaaaaaaaaaatatat

SEQ ID NO: 27003 - DNA, 2187 bp, Cannabis sativa
cattaataattaaaagaagaagaaaaaaaggactatagaatattaaataaataaatatatgtatgttggggtgtaaactttggacaatgtgttttaaatgtatatattgttaaagaaaaattgtatataaatttatcattacaaagcataccaattagggagcacagctcattaagcaatcttttttagctttgtacagataagtctaatcaagtgattgtttaggaaagaaaggaccaaaataaaaatagtcaatgttgcattcctaattcctactactttttataaatgcaaacttgttttattaatatataataaaaaaaagcttgtttaattaaaggatcaaaataatttttttttaataatttataatgttgaaaataattatttattattagtgtaataaaatatttaaatattattttagatgttgtaaattattcaaaaaaaattagtaaatttactaataattctatacaactataacatacttaattataaaaaaaaaatagactaaaaaaatcacataaatatcaaactgcagtctatatataggatatttttcattaaattatagttcatttattacttcggttcttttcccatatcattacttataataagcttttggagtacatcgtttatttattttaacattcaaaaaaaaaatggtctattttttaattattatatatgttgtagttatttgtaattatttataaaaaaaaaaaaaaaaattctgaatgatttattcttttttctcttatacatttggtaaataattacttgaatttattttatatattacaacttacttataattttttttgaatatttatgagttatattaaataattacaatatacagaattacgaatttaattgaaagactcaagtaaatactgaaacttgcaagtgattacttttttttaaaaaaaaataaataaaccgtgtataaaataagagagttaggcctctcggtcattacaaaagataaggtcaggtaaagaggagggctccactatactcgaaacattctgaaaagcccacttaaccacattatgagccgtaaaattacaacatctgtaaataaatgagaaattacagcataaaaaataattagagagttgattacaaaaattattataattatcaatgttccgaatggagtagattcctttcaacgctttgataaccttcttcgaatcactctcaaccaaaacaaagcagtgctttatcgaactagctgattccaaacctaactaacacgtcgcagcttcgccaattagtggattcgagaagttgagcatgttagctactatccacaaaactgttcccgtgtgatccctagccaacgtcgctacgcacatggactcgctaccaaccttaacatcacagttgattttgatccaatcttcaggaggaagggaccaagcaggagacaccataaccaacgccggtgcaaataagcaagttgcataatcagtataacataaagagatggaatcaatatcaagtttaatgttacccgaggagtaattgtgaactttttcattttgggtcttccaaattgtgtctactacgatcgaggcataaaggaacaacttttcataatccacccctttcgacttcaagttccatagaaaggttacccaatcccaaactcgacctcctgaatcaagaatcggaataactccccaaggggaagactgccaaagatggcacgcaaagttgcaataaagaaaaatgtgctccattgattcctcaccttccccacaaaaggggtacaacacctcttcaattctaattctctgagctatgagggcacggacaagcagagcatcagaaaaaatgctccaccaaaggaccttatgtctctccaaaatgtttgagtccagagtttgttccacagggctggagcaacaacgcatgtcggggcactttttaaagcttggaccagataaacagacttagtcgtgaataaaccatttggctctttcgtccaaatccacctgtccctcctaaaaccactgggtttccctcctttaatgatgttactaattgtttccgaggtaaacaatgcctggagtttaggaatgtcccaatccccattatctaggagtaactctgcaactttagtcaccctctcaggtctgggggtaatgggcttcggatagaaatcttatc

SEQ ID NO: 27004 - DNA, 2922 bp, Cannabis sativa
tttatatagaatagatattaaatttttaaacataaatttactaaaattagaaaaataggtacactttcaattcataccaattatgcccttttctctcttttctcttttaacttcaccgtctatactccccattactgatggtggtccgataaaagtccgatggtggtccaataaaagtccgatgtccgatggtgacccaatgctatctatttttttttatatttttgtacataaaaaaaggagtaccaggcaaccatcagaccaccatcggaccctgactgggtttaggtctaagtttgggtcggaatctgagtctaggtctgggtcaaggtcctgggttcgggtctgggtctcggtccggctctaggttcaggtctcggtccgggtcggggtccaagtcccagttcgagtttgggtcctagtcctagtttcggggttctgggtctgggtctaggtcgggtctgggtccagggtcccaggtcccgggttcgggtcagggtccgggtccaggtcgcgagtcagggtccgggtctcggtcctgggtcccaatcccggtcttgggtcccaggttcgggtcgtgggtctcgggtcccagtctaggtctaggtctgggtctaggtccgagtccaggtcataagggatccgagtctagggtccgagtcttgaattaagtttttttttttcaaataaattgaaatcggtcggatgagatccgatttagaaaaaaattaggcggggcagagcggatctgatccaagatccaataagtatccaaatatttcggatggtgatccgtcggatcggagctccaacccgctccaactttgacatgcatataatttagttttagtcacaataagtattgtgactaaaaatacatttagtcacaataaattttaatttttgtgactaatacctttagccgcgaactttttagtcaccacataggaataataatatataattagtcacaatttttttttacttttagtcacaaattttgttgtggctaaaagtaatattttttgtagtgacatcaagtaagtttttatttataaaaaaattaaacctttaattgagtcaacaaaagtattagcatatttaatataaattatgtttatattataaactacatatacatatatagaatatgtttatggtaagaattattatttcgtccctatttgtgaaaatatttttataaccatagatagatctaaaagtaaaaaataattaagttcatgataataatttatttctaagatttagcttctctgctttggtttttttttttttttttcagcatttgcttttttgctttgctctactttttttagcatttgctttttgcttgctctatttattttgagcattcactttttgcgtcactcttctttttgtttgtgcttttgctttgcgatttttttaggttgcaatgagtaacaaccttttgcctcatctaaaaggaagtcttgtccttagttaaagagacaatttacaatttactttttgaaattgatgagagtctatttggatctcttcgaattgtatcattttttcaatcactactacaaaatggacttttaccattgacttacaattgtcatttatactatttcccaacggttcttaaaaccgttggctatgtgggtgtcataaaaatgtgtaactttaaatgacggtttataacagttgcaaaaagactttaaatgacggttaagaactgttagaaaaaagtcactttaaataacggtttataactgttgggaaagactttcatcgagtagtaactgataaaaaaaatctctttaaatgacggtttacaaccattgagaaaaatcactttaattaaatgacagtttacaactattgggaaagactttagtcaaactacaactaacaaaatacactacttaaaatgatagttataattcgatggataatatgaagtaagggagaaattacaaatattattgcgattctccccctgcatttttattatttagatttccaatatacaatgatgaaaaaacataatagcaattataatatttttataataaaatttatacatttgtcaagttagagtatatatcatatgtgaagctatctaaactaacaattgaattttcaagtatttgtaaaaatggttttactaaattctcatttcatttctccctgcaaatgctcttttaaatgtgatcaataaaatgctcttttagagtagagattacaagataaattttttcaaaaagcccattctctcatgaaagagggtcctatttattgtagtactattggccccaggttacaattggtcctaaaggctaaaacatacacttatttgtacctacaaaataagcactgcaggtgggtagtggaggtagtgatggttgggtgttagtttgtactaatacatgtggatttggtctccactatcctttgtacatccactacttcccaggctttgcataggggtggaggatcttttaggtagtccttatcatgtacgttatacgaaagactttatactttacagcttcgtgcttttgcatcctaaagttcgttatgcagcaaagggtgcatacctcattatggaacccctagtgaggagctaatagagggagatgaggctcttcttcattcatttgcgatataattgttacatattgaacgagattctttggtcaatggggtcctcgcataatgggacccctcgtgcaagggaggcctttactaagctgtggagtacgaggcgaggaggccttcgctgggtcacagtgcatgagatgagggagggcagaccttattagaggccatggtttgcgaggcaaagaggccctcgctgggctaaggtgaacgagacaagggggacccattgggccaaggtgcacaaacggagggaggccctccctgaaccaa

SEQ ID NO: 27005 - DNA, 3451 bp, Cannabis sativa
tttttttttttttgaaatcaaaatgaccttatttattatcacaaaaaacaaccccatatcattttttacttttttttttttaagaattttacataaattactaaaaatttaatgaaatgttacatttatacagctacaaataaattcttttccttattttacttttatattattttaaattttaataattataaatatactcttatcatattctcatttattttaatcactctgttcactttcattctttatatgtttagtttattgtaatagaaattagaattattattaccattacattgtttgcttttatttttaaaattttgtaatggctttacattgtaatggtcattatattatgtatggtaattctcattacattacaaaaccaatataatgatgattacattgttaaaaatatctacttaacccttttttgttacttttatttgattacaatgtatattatagtgtcaaaccaaatatcataatattactcctattataattcttattccatcacattactattcatattacaattaccattttcattacattagattacatcaaaacaaacatcacctagagtctctcagatcacttacaccctcccactgtcccacagcaactacactctctcatctaaactactttttatgggctctttcaggttttatttatttatttttctttttttttttcaacatataattagtctcattttctttatttttcactttccttattcttcacgttttcttttttctttctcacgttttcttctttttctccatttttcttttcattattccacaacctaaaactatttttaattgttccatttacatgttttctcttacacacgaaagacgagataatggtgtggtcagactttcagtagtcgtcgaaatatggctcattctggcagagctgcacaaaggagaaagaatgaggttagatatctgcgagagaaagaaaaagatagattaatgtgatagtttatcatgaccgctataattagatacgaaatttgtggtaattaattaaaattatgataaagtataagtataatatgcgcataattaaaatagtttttttttttttctgagaagaaggcgttcatagatagaaaaacaaaatataaaagtgttagacatcacggttattacataaaatattatccggtattgcggactgatccaccatgtaacattttcaaaaaaagcccttcttagcacattatgggctgcaaaattataagttcttgaaataaaaacaaaattacaactaactcaaacgtttagagagagttcttcattgttgttcatagttatcaattttccaagaagaagaagctccctttagtgacttgataactatctccgagtcactctctattaccgcaaaatgatgattcaatgaggtaactatctccaaggctaaaagacatgccaccaattctctaatgaggggattagaaaagtttagcatgttagacaccacccacaaaactgtcccaaactgatcccgagccaaagtcactgcacacatagaacattcactaactttaacatcacagttgactttgatccaatcgtccggcggggggaccaaccagagggcacaacagtcttcattgaagggaacacacacgacccataatctgcgtaacaaatagagatagagtcaatataatgcttaatgttactcagagagttattgtgtaccttatcattatgggctcgccaaattgtatcaaccataatggaagcgtaaaggaataacttctcaacatccactcctttcgaatccagattccaaagaaacttaacccaatcccagacacgggcctacgaatccaagactggcataataccccacggggatgacctataaagatgataagcaaagttacagtagaggaagagatgctccgtagattcctcaccctcaccacaaaacggacaagtgacctcatctatatgcattctttttgcaagtaaggctcgaatagacaaagcattagagaggatgctccaccaaagaaccttatatcgctccaagactttcgagttacaaagtttgttctacaaggcaggagcaacattgcataaaggagcatgatcaagggcttaaactaggtaggcagatttagaagagaacaacccactcagctccttagtccaaatccatctatcactaccctgaccgctaggtttgcaactttttagaatattcttaatcgtctgaaatagtttcttttgatgttagtcaactcccatgggttcgaccttgcacttacatgaacattatattttgaaacgattcgtgcacttacgagtataaatattaaaacactcacttttgggtacaacaggttagcactaaccgaccaaattagtgcaggcttccatcctttaagatctcatggttggacggtagacatatacaagaaaagtgtggagacttacaagatctacatcttcaaggttctaaagaaagttcatcttgatattagaattaccagtaaagacagagatatacaagcattggcaagaccttggtcgggcctttagatggtcgactaggggagatagccccatgcattgggtaaccctcaaatatggttggccaaccaagcatacatgtcacgttataacacttatgtcttttcccacaagccttccaaatcgtccccaatcctcttacgacttcggaacagttcaaactgcccacaattctaggaattcaacaccaaaatgtaacagcccaattcttaaagaatattttccatcttttatgtattttcaaataacaactttgtaaaccctaatactatataaatggtcataaccctacgtgaaagggacgatgctaaacaagctcaaaagcactaaggcatagaactctctctcttttctttacaagtcttctcactcgccacacacattcttatcattgtaataataaagagagtcatagttagaaattataaggttttagcctgtaatctgcatggtattatctcaagagtaaatacaactaaaggggagtaggtcattatctgaacaaaggggctgaacctctataaatctttgtgtgtttatatttattatcattttgcacatgatagtcataagtaaaatttgtacctagtcagactccgcgtcggttggctaaattcacagtcaacactgacgatgatgacaactccaatgaattttctgatgacttttctagtgacaataaatttttcggcgattgtgaatttttcggtgtctatttcgacgacttttccagtgatatttgttattataaattttatcaactttatttatgattttttgtttggtctaccatattttaaactttgtttattttttaagggtaaatactattttggaccctgtattttacaaaagttaccaattggaccctctgttttgtt

SEQ ID NO: 27006 - DNA, 1112 bp, Cannabis sativa
accaatattattaagtatgtatttagagaaaaaattttaagattttctaagtataaaaaatcaaatttcccatttattataccttccatcttcattattttaggttcaagtctctgactctcagtttaataatgttggataacaatatccagattgaactttataattctacatgatattaaaaattagtaagatttcgatctatatctatccaaatagtaaaattatctacatgaaatctgtattgtacaaagaaacttgaaattcgaataaaacaataagcaagcaagcaaatgacactagtgataaggtattttaaaattggaaagagaaaaaaaaatcactatcttaaaagtgaatattaaacaatattattctaaattaattaatttgaagataaaatctctgtactaataaagccaattaatactaaggtaactaggtaaatactgataaaatcgattaaggtaggtactaagtagtactccaagttttcaatgctgctccaaattttaattatactatatatatacgtaactgtatggaaaatagattacaaatatgcattataaagttgtctttatgtatttctaaacgttttgacagaataggtatatatgtttgtttgctgatttagtttttcttttcttttttaagtagggtttataaacagtgaattaagctcatggttgaaactacaaaacctactccatcatttctataacgtctctaaaaacaagccatgcatccttgccacaaatgcatgcatttcatttacatgaatatataatatatgatttcattgcatgcttaattcatgacaatcaatattcaagctaaaattgacgactcttccatctcggaattctcttcagacagctccaatttggtccattgtgtacgcatcgttatcaccatgagtgttattgcttggcacgacagaccacatatcataccaatccacaagccctgtaccaagcagaaacagagattactggactaactcatcactatagtctatatatatatatatgcatttgatgtcagactttttatttgggcttacattaagttttattggttttattaaaagggaaatttacaccctatac

SEQ ID NO: 27007 - DNA, 2280 bp, Cannabis sativa
  modified_base (1128)..(1128): a, c, t, g, unknown or other
ggctgcccattgtgttgctagggcgtcttatttatcgtcaggttgtacttttaatgagctaaatgctccgctttctttgtgtgacattgttaaggctgatgcgtgttaatctttaatgaaattcctttattcaaaaaaaaaatcataaatatctattataattaaatatatatacctaattatattcctaaaaatgtataatcttaaactaaattatttttgtaagttcctctcttttttttcctccttttgtgttccttaatatgatcagcatatattagtttaagttttgattatacatatatttttagcaacaataattaaatttttatatgcatattagtttatgtattgattagtatttatattattttgttatctattattaatccaatatcaaattatatattgcctgaaaagaaacctctattttttttttggcaagatataatgatacattatacatatatataaaagaagtgtggattattattattattagtactttaaatagaggtcataattttgtagacatataaattctcttggaaaatgaacaatctatagtaagagtcttttatttgtttcattaactttcttttagtgggtccatatcaatcaatatatcaatatataaaagagagatataagatagtgatatggcgctttagaatcactccaaatatctctatttattttctccttaattctctcaccttttaattttttaataaatttataaatattaattatctaaaataataataaaaatctcttcaaaattactaatattagtatcataataaagtctaaatcctactattaaaataatatttcctatctatatatctatctatctatatatctatatatctatataaaggagaagtatgagtgatggggcggtctaaaaatgtttcaaaatcatcttttcttttttctccttaattctcttaattttttaattagctaattaatctcatatttcttttctaattttttagtactattattaattttttaactatttaaccatattaattaaatattaacattaactaacctcaaaaaaaaaaaaaaacaaaaaactcaagatacatcacgtaaattttttttattattattatntttttttttttttgaaaaatgataatccaaatatcaacaataccatatgaaaaaaaatctaatattaattaatccaataattaatctaaactcaacctaaatatcactttttttcttcatttttttaaccatattaaatattaactaacctaaaaaaaaaactcaaaatatgaatctacatcacgttatttttttttttattattattattattattattatttaaaatgataacccaaatattactttttaaataataccatattaagaaaaaaatctaaattcccctcaaaatatctaacaactatctatctatatattaatttgtctataaaactcataaccctaacctaaatcagagcttatcactactcaaataataaccacataatcataatatcatctctaatattggtttctttgaggttttgctgcaactaaatatttttgtaatggtctctataattgttgtttttttttatttttttttctctattaaagaatttcatttttgcatactataagaacagtatagacaactttaaactttcaatttttatagaaatatgtgagtgttttatcaattacaatgtattttttggtatagtgtactgtgtgcatgtatcactttatatctaaattatcttatatattttatatatttcttattaattagtgggcataattttataatggttgagttgctaagattttatattgaattaagtttatttctgaagacaaattggcactactgctctcctattcatatcgttccatccaagccaaaagcataaacactatcaatgtttcttcttaccaatgttgaaccaagtgctgggtatggtgtttgaggtgatctttccaattgtttttttttaattattattatatatttgagtgataattttttcataataacctaaatataagataaatatatattttaaataataatataagttatgtacaatgaacacttaaaaagtacaaagtgtatatataatttattaaattattatttttaattttttttatttcttcaacttttttaattattttattattatttcttaagtatttattatccaagcttatctttcaaaaccaaaatattttttctaactttgattaattataaaaaaaaaaaaa

SEQ ID NO: 27008 - DNA, 1924 bp, Cannabis sativa
cctaacaatattccataccccgttatttatatgataggtagtcttgacaattccactattcccctagaaatgaaattttctgtggtaccgctttcaatgagaaccgtaatcaaaagctccatgatctttcttgcaagcttcatggtgtgggtcaatgatatctcaacaagggagtttcaagatagcatagccaaggtctccttagtagccgctaggcggggattcaacatcaagttggggttcatcttcatcaacaaacaacatctcttaaaggaacttttggtcacacacatgacaccaatgttatttcttctcacacagaaagcaaacacctttgagatgcttatcttgacactgtgattttgacatcctccaaaaggttaagagttttcctgtggaactgtcttgagttggtgcaaatgaagtggagttggttactagtaagtgtttgggatatttttggtatgggtgagaggctgtatttgggttctattggctttggttagttggatcagttgacccgaaggaaataggtgatggccctcctccactcttggggacgtttccatgatttatgcaaatcccatgggttgcaaaatgtgcaaagctccttttatttcatctttcaacctttttacaaaactaccttccaagatgtgctccataatgcttggaacactcgatgtcggtgcttcctattgaaatcaatactcttgcacactggtggttttgtttagggacaagaactcttctaccaccgacccaatggggaccatatggaactgatggaaagaaagttgtttcaaagtatcccatgaagtaacaggtctcccttgactctcctactgaaacaacataagggcatctccgtccaagttgactatggatgtttcaagcatgagcggctctctcaaccgagaaatgaggaagtaccattcccctctatagatccatccttcaaggttgtcccttagaaaaatgggaatatccattattagaggtttggaatccatcgatggatgttggtgctgttagaatgagtggatctgtggctgaggatgatacgtcgtcgcactagaaatggagggaatcaaacctctaaacttgtcaaagctgcaaaagatgacccatcgtgacctacaacagtgtaagggcagtcctcgctaataattgacccatccaccagagcttttcccgatcccaagaatcacatccattgtgccatcatcatctttaacatcttttggatacctaatctcagagtgtgcacctttgtctgttctctgtcctgctatgcacgagtatctgcaatttctttgcctagctaatttcaaacctccgtgatggccctgcgtagtttagagttcatcgattctaatttctgccccagcaattccataataacatccttattaaatcccatgtctttgagctctgataccaatctgatagggattccgtataaaaattaattagaacagtaaaaataacagtagagaagatgagatagaaatgcctgaaagcctttcaatagtttctaggattttgagagcctagttctctccctcaatggttacaatagatactaaatattttcacaccaaaaaagaataactccccaaccttttattaaatcactattacaaattatactattcatgtcagtcaatgctacttttaattttcactactacaaggaaatgccttttatcccggtttttaaggctttttatcccggttttcgcgaaaataaaaactgggatgtatgccagtgggataaaaggtatttaaaaaactagaataaaaggggtactttttattccggttttttcataataaccgggataaaaagtacccattttatcccggtttttaaagagaagtgggataaaagggtactttttatcccacttttcatgaaaaa

SEQ ID NO: 27009 - DNA, 1212 bp, Cannabis sativa
cacatggagaagaggatgtgggcgaggaggaagaagaaggagtatctgatgaagacacacatttggatgagcctttttcctgcgtggacctcatctcaaagataaggcagtcagatttggtttcttttcagaaacttaattcaattcaaactggttgcacaaagtcagtgccaagacaacgaccacaccttcccttcgctaatcttgacataaaaaactgaggacgtggttctcttgattcctattctttgctgagaaatcgcggttcctttccaccacttcgtcaaatctattctgactcattatgacatcgcgccatttcaaataactccaaaaacctatagaatcattattggattctttgcgatgtataaggagtatgaccaaggaaagctcacaatcgaggactttagctatttctacaacattaagaatgtcagtaacgacaatggcttttagtgcttcagcaaatgggctaatacgaagacaacaaagtatttgtatcaataaatgctacttttcttgaacatgactatatgaaaggtctataaccatgaagtgaagtggttatcaaggaaatcagaaatgatagatttctgaaccatcaacttcagtaccattaattgaatgaccaacaactgtcaccactaatcttgaaaaggaaaccctggtacatcgtcgtattgagagagttgtgagacagcctatccgctatgaacatgaagcacatgttcttgtttcagacatagataaggacaatacattgacttataaggaagcaatagaagaccctaactcagacaagtggaacaatgccatggatcaagaaatatattccatgcgcaccaacaaagtctagaaatatgaaactctacctgaggatattacactcatagggtgtaagtaggttttcaagaagaatagaaatgttgaagggaaggtagagacctttaaagctaggattgtagccaaaggctacacaacacacaacgagaagacatcaattatgacgaaagtttctctcttgtggcaatgcttaaatctattcccattctttttttcatacatgtcatttatgattataagatatggcaaatgaacgtcaagactgcttttctaaatggcaatcttgatgaaattatttatatggaacaaaccaaagggtatgtgctatcaagggaagatcgaaaggtatgcaaattgcttaaatct

SEQ ID NO: 27010 - DNA, 7014 bp, Cannabis sativa
ggacctggacccgaacttgaaccccagaccccagcctcggtcctgaacaccagacccagacccacgatccaaacgcggacccgaaccttgaatctcgaaccccgacccctgaccctggtctcgaacatcagactcggacccgaacctttatacgacctaccaaacgggccttatatgacttcttttttatatattatatagatatatattttattttacaaacaaatgtaacaatgggttgagaccaagtcaataaatttggatagtagttcccttaatttgggttgtaggatggtcaagtgaatttgagtttttcgaattaagatgcttttatttgagtttatgctatgaaaagttgtaataaatattttgattttaaataagattaaatcatttgaaatatttttgaatattaaattatttgttaattccttttaactatattaattgacaaaaataatttataatcattatatatatcttggttgagttgtatattatttttcatattatattttatttgatttaattcattgaagaaatatttggtgttttagattttctagttctgaaaagtaagataaatatagtaagtatttaatgatgaaattaaatttttttagagttatttccttccaaccaagatgcatacattattctgatcttatattgatattttaagtgatttgatcagatattgaatgaaaatttaaatagaagtttctatttttatacaaaaaatttacacttattgctcacgattctgtatgtacagaacaagaaatttctgggttgattgaagatttcttttaggaatgttttctatgggctatggacgtgtctagtccatgtatgagcattccactatgagtatattatctataaatatttatattggctactagattttctatctctttcatctctttgtatttcattcttattttgtaagaaagagtatctttatcttgtagaggagagtgagttcgactctacctctatgtatatatctttgttatttttttgagtctataatcaacttaacaaaaaaaaaataactgtaatataccaaaaccctaattaggaataattaagatttattatatattatagattaattagagagtaatgagcaagattatgatcctactaatcgaatttagtataaattaggaaactttttactataggtgaataataagtataatttattatagattatttagaatatgtgggtataatatgagtttttttttgggtaagtcaaaactttgtattgcataatacttaaattacaacctatgcaacacctatcacgttggcatgctaattctaatacataaaattaaaccaaactctatcaatgaattgtatttttgttggcattatacctctaattttatactttacatcttgcttaattatttttgttaaaattgttgttgtataaattttttgaatccataatgcttcattttggcagttccacaaatgatacaccatcgctgctactgaagtcaccataacctgcttcctaaatttggttactttaagccatctcgacaatctcaagattgaagatgctaatgtgttccatctcaagattgttcaaaaaggccttactcagatggcatgcaaaaaaacaaataatctctggttttcttatgcataccacacaacaaacatatatcatatgatgctacaatgaatctgaataatgtctctttcaattgtagtctatgtaataccgaaagccacaaaataaattgatgctttggtattgttgttccataaaatacctctctatcctaaaattttttttattgttttgagcataatcttcggtatccttcgatgatttggtataatgtgagttatttgtggaataaaaatattttcaggtttggcgatcttggagacccaatcggaagccaaaaatatcacaacgtgttcagttagtaattttgatgggataattgagacaagtcaattttagaattataggggtattttggagtactcggggttgactaaatactctaggattagagatttcttagtagctaagaaatgataagataatcttttactaaatattatttttattattattgttatacccatatttcgagttgcaatatggtgttgacacgtgtaatgaagctggaatatgaaccagcccaaattatacaataataaatacattcagacaacttgtctcgaaaaatacacttggtagaaatattcgaactcaccttcttaaagacaacgatgagccatgaataataactactgactaatgagattagcgagatgaatgaaaaataaagatggtccatcatgggatacacagaatacacaatagaatgacaatatttagaaagggtagattatgaattattcaaattatgaattattcaaagagctcgcgactcattgacccacatactcgtgagtatgttgaaagaataaagacaaaattcccagcatggttcatctcacaattgtcttactatgataagtgtctcgtacatttatggaagaatgcgagaagtactacttaaagtaaacttaggcattgataatccatttttatgataaagtgtcttaaggagattggttgaattgtgagaagaataagacatagtcaacataacctcttatagataaatttaagagagcagttatgagaagttatttgtcattatcccatgtgatgtaaatgtgaaatgtgaagattgtctatgtttcacaaacaattacaagtgataagatcccaagaaaataattgtcactctaaactcctataaatagggacgaaacccaaagaacaagggatggccaatttgagaaaaagagagtatcataccagtcttatattgtattttgtatacaatttattaatcctagaataagatggactcgtggactatgaaaaattagcttcaaaaccatattaaaaatcttcttgtcattgattattattatttttgtcattattattattactgttcatttaattcttgagtacatttattacaaaaaggcttatttattagttaacgaaaaatctgtgttaacagtttggtgctttcattaagagccttgtaaaaacaactcagaaaatactctccttgaaatatattcaagctttccatccatggcagacgatactcctcgaaacaaaaagaatcaactggaagaaaacaactcagcgtccagggaaggaacataaaaattctcacaggacaagcaaaattgagactccttgcttttggagaggaaatggtggagaatttgagcaaattgaggatgaaatcctagaaagacgaagtgaggatgcctacgatcccataagatatgttccattagtggaactagaaaataggcaacttcgacagcgagtggctgagtcaaatcaaagaaatgctgaattagagcatgaggcggtggttgcaaggtctggacgcagtgatgcccctccaaagtaactcgagacaacagctagatgacctcagggaagacccaaaggctctaggaccagaagacatggggataccccaagagcaaataatcctagaaatccgacgaatactcaggatggtcaacttgggaacatgagagacatctagtggatgaagagaaccccctaaatccaagaaacactagaaacagagaaactcgacccaacgatccagaaacttcccgtggaaatgcaaactgtgggaatgtacaaccttaaaacccaaagtcatctcacatgaacgcggatgccagacaaacacgacctaaggatcaagaattcactcagcatgaggtgaaggctataggaaatcagccttggtcaagtcaaccaccgagacactcgtaaaggccaaaccaaaatgaaaaagaaaatgcgtatacctacttaagtaggggacatgtgtcaaatttgtttggaagacaaaggcaagtacaaaaaaaaccttaggaaatagggtcaagtacagatcctaacaggtcgagatcgaggactcatgggcagagaaaatagattagaacccgtgcatgtgaaagacaaacgcgagatggggaaggtacgtgtccccactatcaaggtgatcaagtaattttgagagttatcaatctgagagttattctgcaataaggtcggttagcaattacgaccaaagaaatgacatgcaacacgaccctaatctacgtgcacatttaaacctaaacaacctgacttgcacgagcacttgaattgtaacattctagatctctgagaccggttgaatcagaacacagatcgtgagcgacaagtcgagtagtaacccatggatacaattcaattaattgtaatacagttagaagacaagacagacctacttggaaattgcatgtagacgggtcagctacaaatcaactttctggtgcaggagttgccctcgtcacacctgcagggcaacatctgcacgaggcagtcaaatttaggtttaaagcctccaacaacagagcagagtatgaagccctcatttttggcttaaaatttgctcaggagttgcatgctgagtacattgaagtctatagtgattcacagctggtagtgaatcatgtttcagtagagtacgaggcccgtggagagagagtgatggcttatctaagcaagatacaagacatgctcacacaattcaagggttacaccctcaggcaaattccaagagaagaaaacacaactgctgatgctttagctcggcttacgagcagcacagtaacatataaggccaatctagtccctattcaattcttagaagagcccagtataaattgtgctgaagaaattaaaatgatagacacaacaccgaactggatgacactcatagtagcctaccttaatactagagaacttccaaataacagaaacaaagctcaaaaaatgatgaggaaagctgcactatatatcatagttgaaggtgtaatgtataaaagaagtttctccatgccattgcttagatgcgtcacaaaagaggaagttgcacgactcatgtccgaagtacatgatggattatgtggtaaccatgcagcgggccagagcctatcaaagaaaatactaaggcaaggatatttctggccaaccatgatggaagattcaaaggcctatgtaaagaaatgtgaaaagtggcagagattttcaaaaattccccgtgcaccgctcaacaatctaattcaaatgcaaagtccgtggtcttttgctatctggggaatagacttgatcggacaattgccaaaaggtaagggcggggtatagtatgcagtggtcacagtctattatttcacaaaatggatagaagtcaagcctttggcaataattacatctaaaaaagtattggactttatggtgaagaacataatatgtcggttcagactcccgcacaaaatcgtttcagaaaatggcaaatagtttgacaatcaattatttacagatttttacatgactcatggaatcataaaaagtgtctctatagtggcacaccctcaatccaatggtcaagtcaaagcagtcaataagacactcaaagacaccatggaaaaaagacttgaagaagttaaagagaactggttggaggaactaccagaactgttgtggtcataccgaacaacagaaaaaatagcaactggacaaacaccgttagcaatggcatatggttatgaagctatgttgcccatagaattagaacctccgtcccacagaagattaacctacaataaagaagataatcatgctcttctagcagaatcacttgacgaaattgaagaaaaatgagcctcaacaaacctaaagttagcaacacattaacagaaggtggctcgatactttaacaaggaagttagggtgaggaaattctttgtgggaaatatagtcctcataagagtgttcttgaacacaaaagacaacgcaattggcatgctcggacctaactgggacggaacatatcaggtggtcgaagttatagacttgggagcatataagctgggacgatatgacaaaaacatggagctcgttctggtaccaaggtattgaaatggggaatatttgaggaaatactaccagtaagtgtacatggtcggatgaccactttaagtacacaatgcaaaaacatttcttttaagtagatggccttctaggcggacctcgcttaaaggtttcgatgaaataactaagtacttaggtcaaattaccattttcaaaagtacaactttttctttacgtgcaatttttttatgtttaaatttagctaaaaagatcaattagatcatttacttgctctcattaatgtaagttcccatggtaacaaaattgttttgaccaataaatgaataaagatattaattattactctaattgtgtcagttatatttgtaagttatgaatttaccattaatgcatacagaaggtccgctcaatcctaaaagtttaacagacgaaaaccatacttgtgaaatgaatgtgaccaagagtcataagtctactcggtcacttgggggcaactataccgtacaaagcattagtaaataacaagctcgaaaaaaaacaacataacagtttgcacaattaataaaacaatggaaaatattcatttaaaatatgataaaagcacagtataagcccgggattaaaggctgcccggtcagctagtcgtctcaaaataaaatgaagtattaccaactttaaaaactgcttggccggtcataatatctttaataaaagcccatgggccgaacaaataaaaaaagagattcacaatgtaagattcccaggctccttgtatgaatcagtttggtctcattattctagtcggtaggggctagggtctccgtgttctggtcggtcgacgctgtggaatcggctgcctcaaggatttctttggctgcttaacccacatagtaattaagatatgcctctttggtatctctgaggaaatcaaagtttcctgtgttgggttttgtgccctaaataaaacccattac

SEQ ID NO: 27011 - DNA, 2030 bp, Cannabis sativa
gtgaagttgttggtggtgaaaataatattttagagaaggtatattagtgtttattatttgtttttgtttatgtttttgatttgcttgttttttgcattttaagttctatgcttccatttttgttttttttttaatattttttagggtggaaatatggattctgttgttaatgtcgatgaaagtggtggaggttttggtggtgatagtcgtgtaattgagaaggtatatatatattttacaattgtgttttattttatttttattttttctacaagtctgtttatattattaacatattttttatatatatattttagaatggaaatttggattcacatgttgagaatcagttcggtgatggagtttgtggtggtgagagtagtatgattaaaaatctacatcaaaaatatttaatatctgtgtatgtgttgtttgtttttgtgtttttgtatttgatagttttttttttattattttctttttttaaaattttcaaggaattgttggagatgttgacagaaatatagttcaggtgctgcaattttttgttattattgttctaaagtaattgtatatccgttttatttattagtgtattgggtcattttagtgttttttaggaatatttttgtttttttgctgtttggttgtatttttttatttgatcatcaaaaaaagctgtgaccttatcactactggggaagtagaactgtttagttgtttatttgttggttttataatgtcttgatttgtttggttgtatacattttttaataaatcagcagggtgatggagcttgtggtggtgagagtagtttcattgaaaaggtatatatgcaatttttaatagttgtgcatgttttgttttggatagtttttttttttaattttgttgtttaaatttttcaagaaattgttggagttgctgttaaaagcaatatagctcaagtgctgcaattttttgtatacatgtttatttattagtggtttggtcattttagtgtttttagaactatttttttagctgtttggttacatttttttatttaatcaacaaaaaaagctatgaacttatcactagtggggaagtagatctgtttagtaatttatttgttgttttgtttggttgtataaattttttacaacaataataaccaatcagttgttttattttgtttgattttttttttaattttttaggatgttgttcaagttaatgctgaagacaatttagttcaaatggtatatctatatttttttatattctgatatattttttttgtaatttttaaatgttattttttttataaatacatttttttgtagaattcaaatgattactgtccaagtttcaacttaatgaagataattaatgagcctcagttgtttaatgatgatgctcccatggagtttgatgatggtgggaaagttggtgacaagggtggagatgatgccggtattgcagataaaaaggctatgggtagccaggctactgacgatagcattacgccgtctgtgatggatattataaatgagaaaatggatgatatagaaaaggtgtgtgcatggttttaaattatttttttagagaactaatttattgtttgtttgtgtttttcattgttcaattaatttttgatttccttttctgttttttttttgttgcaattttttttcatgtttgtaggagaacaataatcaaaaggttagttcattcgatgttattttttattgtttattcacatatttgttgttataagtttcatggttgaacggattttcattttttttatcattttgttgtattgctttctctaatttttcaggacaaaagtaatgaaaaagataagattttggttgttgagcctatttgatcttttggtagcccttctgctggtgttagtaaggagatacgtgaaatcaaatggcagtttgtattttcttctggtttgatggatgtgcctttgtgtgtgcatcaagatgcgtaagtcttttattttttatttatattttttgtttatgtaattaatt

SEQ ID NO: 27012 - DNA, 2873 bp, Cannabis sativa
tgaagagtttgtggggttactacaagagctaccaactgagcttgtctatcctgttgctgattgttttcagcctgtggtggttgtcccatgtacccttcatcataccgattatcacacgatgtagaagagtgtccgaatttcccacaaacttgacaagtgggcttcaagttgccacggccaccagatatgcctctaccacgagtattgccaccatagttgttacctcctctaccaccagattgatttccttggtattagagttgcttccatagtttctgccagagtagttattatggctaccaccacgactcggatatcctcctctgtttggtgaacttgagggtttctgtgcaaaagcagctgaaggatttccaagatttttgctagtgggtgagacagcccccaactgttcaagttcattgtcgaaactgagtaagaaaccctgtaactcctgccaagtgagatcagtacggtgttcaagcaagagaacaatagataaatattcaatacctaacctagacaaaacattggatatcaagtgtttttctgggtatgggtctccagcaagagcaagagagttagcccacactctcttttgtctgagataatccaccattggttgagctcctttctgaacggttttcaatttggtgcgtaaatcatccatgtttgccttcgagtgtgctccataaagttcttctaaagctgtccacaaagcaccagtagatttacttcccattacctctgatgcaattccttctgacatagatccatacaaccaacccatcaaaagctggtcatggacaatccaagactcatagtctggatttagaaagtctctgttgtaacttcttcattctagtttgtctcgactgtgataaactcagatggacagagtttttgaccattaaggtacccttcaagtctgtgacctcgtattatggtgaacaccattgtttcccacaaaagaaaattactctgatccagcttaagagagaaaggttggcttagagtgttactgaaaggagcaaccaacataggagcagtagccattgttgagcttgactgtgccatggagcttgcttgcgagtttccagtagctgcttttgcaggtgagggttgagttgtttgactttactcagtcgacatggtggaaggccttgaaaaggctctgataccaagttaaatttggagagaaaagaaattggaaaactcaactcaatatgagtgagtgcagcagctttcattatataggcaattggtgaatacagggaaatattacaagccaataaagatacaccacgtggtgaataaaggggcacagaatacaatgcctaacaaaaagttgttacagaaaaggattacagaataaaccttgagattccctcattcactcggtcccacttctcctcagctactcctctgttgattcataagttgcatcatcaaattctttaacaacatggtaatcttctttcttaaagagaggtgtctcgagaagagtgtggttccaaagcattctttaagaagtaatttttttagcaagtagtcaaatatattctatatctaaggaggagagttgctttttttgaaggacaatttcgagcagcccttctctttagtttccttgttgattgatcaaatcagatcttatcatagttctgccaacattttctgaagtgtcatttcgagattgtcatgtgacgtcttttcttcattatgcgactaaatgagtcttatttaatttttcatctattgttttgtacatgtatatgcgatcagacacatttatataattgctcgaaaaatagatataacacatgctctaaaatattgttgtatattttaatatattaaaatataatatttaaatgatgtagaggataaaataaagaagtttatgtatagtataatatatatacgtgtgaggtaaaataaaaaaagttaaatttttatgatatattttaaaaaaatagagtagtgaaaatattaaaagtactctaataataatattcattgtttgtgtttttcctttttaataatacgtggaaaatatagattatattttccaatttatttttattttattttttcgtatacatctcattgtgaggatgtgaagcactttttggttgagtctcacatgattaaggcagttgttgattaattttaaaacaaaatatttttacctttaataagttcactttttcaattatgttgacattattactcattttggaaaaaaaatattaataataatatatgtgactttaggctatttgcccatgttagtgggtatgataataagttatatacaaaaagttttatggcttttttttttgccaactaaaaagagcattaaaactctgtctcaacactcttagttcatgtttgggttatgggaatgaagtttgtaatggaattaaagttgtcattgtttgctttttttttttttgaataaaagcgtttataattgtcattgtttgctttgtttatgaattccttgtaatacttttttatggtaatttttgtttaagtactttggaatagatcatacacccatgtgatgagttttacattattaaaaaaataataaatggaagtaaaatgacatttgtacgtattttcttaaaattaaaactattaattaattgataaatgaatatttttgtcaatatagggaatgatttcgtatattattttttaattttttttaaattcataatttgggttgctctagtagttgttccgaacttctggtagttttaatgtggattactatataaattttggttgtgatttaaattgattcgttaattgctatgtgaatttttgtaaaaataccaaaaaaaaaaactactttaaagtgtaaa

SEQ ID NO: 27013 - DNA, 2397 bp, Cannabis sativa
  modified_base (344)..(344): a, c, t, g, unknown or other
tatgttatgtatttcttaaacaggttaattcattttatatttgaatttaaatttgtaatttacctctcaatctatttttttttataattattaaattatatgtatattttatagttttaattatatttatataattttttaaccatattttataaataatcatataattaaaaaaattgttaatattaatggaatttgaatatttacttatgaatacttaaaatttttatatcaaccctataaataagttaatgtataattttagtttttcatatttcaatagttttaatcatataattataatatctaatatgatatataagttttattattattttaacttnttgataattgataaattcatatcttattaataatatataataataaattataataagaatttttaatatgtcatgtcctacttttcgagctagttagtctattcgtacttactgcttaaggacatatttttcgtactctgtcgtgacaatttgtagcatcgtaccatgtcgtacccatactcgtatttttttcgtgtctaatcatgcttgtatcggtttcatgccgtatcaaaaagcccagcctatatttaggatacttcatgtttaattataaggccaatacttattaggaaaaagagaaaccaatactaattcttcgtaattgaaaaaatgaaattgagccaattagctcaattaatcacttataaacaaagttaattgttttgtatgtaacttgagacttcattttttaaacagtatatacgatacaaataattggtttaagatgctgaattattaatgagttagacaaagaagcttggaaatatgaatgagattgcataaccaatgtagaaaacaggtgagtcctctatacacaaaatgtttctttgactacttattacgagatttgatgttttcttttgtacaacgcataaaatacatcacgcaaacaattttgacctatagtgcacatgttaccatgctttgaccaaaaaccgactaactatatatatagattaatcctctctctatgtaataaaatccctttctagaggtagacttttctttatcttatatttaatattttatatataaaaatataaatggaaggtactggatttgttatatggaagctgaaagacacaatactaataaagtattgttagttgttagaacatgtaagataatgaaatatttaatatgaaatgtctttgttatgtacgtataattttgctagattcctacttaattagacaccttcaagtatgacattgtatagtatgaatagtatatatacatacatatatacatatatctatattctatagtataagtatagacttttatagaatgaattgaaacctatcgcttgattgagaagcaacgattggggggtcaatcagtgagtcctactctctggctcccgccaaaacactcttattagttaaaaaaaatacatcattgctcacgtgcttggtgaaatggcctttgcttctttgccaagcattaaccaactctcaatctactttttctctttagagattttctatagttgtctacattcaaaccattccatgttaataatatcatccttttgtcacctaaaaaatcttttaattcataaaaaaatcaaaatgcgctttctttgtttctatcctacctagtattatattaacctcaaatattttatacgtatatatatatattcccaactattggacttggacgttctctagttctaaattaattgggatttttgccctgatatatattaaattgtgctttataaaaattttaggccattaattttttttttttgaactattgtgattgttaaatttaaaggggcacgattttaattatagcaaataaataatatttttgatacatgtcaaaatttaaaatacaatttaatatgtcaaatagttaaggaacatttagttgaaagaaaacaaaagaagaagaaagtttgagagaattaatctcagctaactttcttttatacacttttgattcagtttgaaagaaatcttagtgtgattaatgagctaagaacttcatttatacacttttgattcagtacaaaactgagaatttctgttataacaaaattcattatagttagcacaaatggacaactaatactaactaactacaaggcctagcctaaactaacttcctgaccagaatcaagttgttggttgtcatctcccctcaaacgaaaaggggtatttacaactttgagtttagatttgaggtacaaaaattaatctttaggcaagcacttggtaagaacatcaactacttggtcgattgatggcacaaaacgtagtgaaagtgcattagtcagaatttgatcacgaacaaaatgtcgatcaatcttgatatgctt

SEQ ID NO: 27014 - DNA, 5196 bp, Cannabis sativa
  modified_base (1508)..(1514): a, c, t, g, unknown or other
tattatttatgagagtatttattacagagaatgttcttggtggatttctctcctattttctctctttgattccttaaaaccaaattgttcgaccccttctcaaactgtgtgtggggtatttatagtgtttatctggggtgatccctaggaatggatcacttgcctttctatgctagcttcatagggccacatattcctagtagatacaaaataggaaatacatgacctataccgtaggtatcttaggagttaggtggatatgatcttttatcccctctagagttatgtgatttctcataaagtagccatcactagactcattgattatagtgtaatagccgtataaagggggttacgccatctgtcatgtcgtttatggagattttaatacaccttcccccatgcggcattaaatgcgaagtgactgttcaagggatctctatacctcccggaattgccttagcatgcctctggcctcccggagagtagagatatttcttatgctctcctccgggagacaccttccctgagatattcctcctttgcctaagacttatttgattttcataaatgatggctcttacagatccacgtgtcacctttatccgcgtccacgtatttagggaaaaatctagggcaacatttacccccaagcctcatttagtgaagggtaagtgaggcattcttggtgccttacgatcagcttattggtacaatggcacgtgctttaagcgcgtgagctgcatttatgatggtcatcattaatatttatttccttttgcaggtaacgattcgcttctcgtccattgagaaaccggcgcatttaatctgggtgtcaaaaaagtactcaaacgttttcaaccgccctggcgcccatttacctcaatcgttggatttatagaatgcgaatcgattacgattcccaccgtacgatggtgtctgatcacagctgccttgcaccctttctggtctataaaagccagcatttttccttcactgggttatcttcactatttctccatttcgccccaagaaacccctctaggaaaatctttagaaatcatagatttcctactgttgtttctccgtcgttgccaatctgcattctaccgtcgatcatcatcaacttccagctcacaacctttacgtaagtttcctgagcacttttttactttctgttctcttgcacgttagggtaaagcttttggtaaagtatttgatttttgtggaatgattttagcgaggaccgtcgcatggcgtatatatatatatctatttttttttttgtgtgttctgctgctttctttctcttccgttttgtgatccacctttttgctgagggactacttagagtatggaatggatttcatacttatgttctctttctcctgttttttctttctttttcctctgctttcgttacctttgagacatttgcacccgatgtttgcctaggagaatccctggattttctatttttggaaaacatccggagggggcctctttcnnnnnnntaggggacccccatttccctcttttcacaattaggattttggtttgggggctaattgctggattttccttttttagaatctcgctatcttcaagaaatgtctatctctacatccagagctaaatcttctgcaaaagatctactaccttggccaccttggaagaggtgatgaagggacccatagtcctggagaagtacatgtgccgatccataagctgggaggcggacgagttgcactcaaccttaacatgtgcccaccagttggaaaagatcgtaactgtggccgggatcaagccttccgcttcttgagtctttcaccgcctgccccgagatgaggaaacgcccaaccgtaactacgatggctttggggcttggagccagactcatctcatgtatggagtcatgctaccgcttcaagattacttcatcaactttttagtttttgtcggccttgcgccttaccaactcattccccaagcgtaccgcctgctgtcagacttgtttattttttatgtagccaaaggctgggcttcgcctagcccggctaaaaatttatatttttacgaacttgtgtctgtccccaagaagggagatagacttaaagacggttttttcacactccgggcccatcctgctaatgagggtctggttccttttaattttcaaaagaatgtcaaggagtatcgtcatcggcttttcttttctttcggtttccaagccgtcaagcacccggaactgcttacggagtgcgtcagggtaccgctgatgcatcgcaccgcccccacacagcttttcctccagcatgccaaggtcttctctacatatgacaaggatgggttgaaggttggggacttggtcacaactgcgaactgcaggagggccaagctaatcacaaagaaccaatcagtggatgacttcaatttatccaaggtcttttgtcccaacattcgcagtccggactccgagaaggcgctccgggcggaaataattgtctccacggaggaccggtatcaaaagtacatctttaggagggaacaagagttagcttaaatcaaggctcaagccgttgtcgatagggctcttcgggttgaagctagtaaagagcaggcgccttcccagcctaagctaccgttcccggttcccaacactggggctcctggcggcagtacttctggatccagtaagtctccattagttgttcatcatgtcccttctactcaagattattctcgatgtaggcctatagattttgataaaggtctccttaggtttaggatgccccctattcgatggggcgatcatgccaagagtttttatttttccaatctaggtcattttttaggccggtcccgaatggggtctgggcctctgacacatatccctttggatcattcggcctatttatcttccaactgatttttcccctcggacacctttcttggggacgacgacaccagtcttttaatgcatacttttgctagggcaaaattagattgtcagattaggactagttttattgcttttttctagcatgcaaaaattcttgatgatcctataatgcttttatttgtttcttttttaagcaacaaccaatggacgagctcctggacgacgcccttcttgcccagacctatagccctgaccccgctctgctgcctcaggcgcaagacctgacggtgacttccgggaaaccctcttctagcttccccttgggccaaatcattttgatcgataaggacggggaggtagaagaagaagaagagggcgagattctcacccctctagaccggaagcgcaagggaaaaatagtggagaccgaggctgctaagaagctcaggagagccgatactccggctcccagttctgatttagggatcccacccgaggcggaggagtacactgttcctccaattattgtcctaacccacgttcctgctgacgaggaaagaaaacaacttcaggattccaagcataactatgccactgcagagtatacgaaggggaacgaagaggtggaggctttgaaaaagattctaagggaggcccaggatagtttcacctgcagcgagtactctgggaacgcttgggatttgaatctggatcctgtgatcgactggttcaaacgctttattggacccaccctggctcctttcgcctcagaattaacaagccactttgtcgccaacctggttcagcttccaatgaagagatatgcagcttgtgcttccaccaccctctaccagatccaggacgtgagtgcggccatgaccgcggtaagtccctatctattagaggtgtttttaggctttttatctttttggtgcctcacaccgtgtattttctgtttgtcagattgctgcgaagacaggttgtctttcaaagactattatcgatcatgggtacaccacgtccgagtttgggggcatggaggaggccatgaagagtcttcgagacttggaggcacaaaggaaggctatctgggaggaagcccaacagaaggaggcccttatggagaggagccatcaagacgcgctaaaggcgagggtcaacgagctgaaggagaaggatgatgaactgaaggccagggatgcggttgtggtcactacgaggcgggagcttcgggatgctaaggagacagtgcaagaattgaccgccaagctgaagtctctgggagagctgcatcaagctgatttgcaaacgatagccaacttaactgttgaagtaaagggcttcgtgacttaagggagcaggctcaaaaggatgcggctaaggcgaagaaagatgccctcctggccccaatcacttgccaacactgcaagaagcgttttgatgatggagtcttcttggcctggcaggccaatggccagaatcttaacctcaatttttaccccaaacctgaagaggtccttgttcgcttctgggagaagaagaaaaggctagatgcaatgctggaggagtgcaggggccctcgtcttccacctcgggctgattgaaccattcgtctaccaccactattatcattatcctctctcttttctttagttacatattcaatccttccccctctttaagacaatttatttctttttctttaaggagagacatttatggccttatgtttgaatatatatatagattttaactttgttaaatttggtctgtttacatttgtctctgtgatatgccttactaccccctgagtgacatgaaaatcaatttttaagtcacttaggcttacaaaataaattagaggttgcatatattcgtctggtacaaatttactttacagaacataaactttatttttcaactattggtaatacttttggaggtgatcggcattccaggccctaggcaccaaggttctgtctattctttttagcttgtaggtctcggagccgatttcatcctcaatttcatatggtccttcccaatttggcccaagtacccccactccgggttcctgactggctgggaagacccttcttaagactagatcaccaatagtaaatttcctgtctttgaccttggagttgaaatgtttagccaccttcttttgataagctgccatttgtacttgagactcatcctggatttcgtcaatttgatccagcgcttcttgtaataaagccttgtttgttaccggatcataaatcgtcctcctgtgggatgggaacaaagtt

SEQ ID NO: 27015 - DNA, 2256 bp, Cannabis sativa
  modified_base (243)..(243): a, c, t, g, unknown or other
  modified_base (558)..(562): a, c, t, g, unknown or other
atttttcagttccataattaacacgtgaagggaactagcattcgatctgttaggaaagtcaagattctataattgtagatcatgttcccatccatccatattattagattcttgaaacagaagttgtgagaatcatcctctctgataaattttaacgagtgaaacaagaaactaataacatgaacaagagttcattgttactcaggatttaagcagagctactattgatcatcattatgatangaattaggtctttatagtaaacagtaagtttgataaagacagttttattcatattggtccttgtcatatataatctctattatatacaacaccctcacttaaatgtcatgctacatcaataatctgaatcgagattaattgcaccgaataacgggtatcaatgaaccgcgcaaccattgagattcctaaactttaatatgttgttgactattttcttcatgactaattgatcttaattttccgtacaatacaagtcatactctcatgtatgaataataaattttttgatatttatatatataaattattcaatannnnntattaataatttaatattcatgcatatatcaaaatattcaactcttattaataatcagaaaatatcttcataggcttttcaggacataaaccctaacatcaggacccatcaaataaaaggggcaggtagaagtagcagagacaccatgttgacttagatttgcataagtaggcaaccatttatgagagaccttacaaaaaaaaatatttgaccttctcaaggagatgtaattattaaactttattccataagtcaaatttaccattacaacgagaaccctgcctaatgccaagaatacgaataattttccagtacccactcctgtcagagtaaagatttgaactctcaaaatgccacacaaaagtatcatactatggaacatgatcctaaagtatggcaagaatagcactaacttcatgcatagagaaagagctattaattaacaatgcattccaccaaccattatgcagtaaaatatcatgcacaatagcatcatcagccagaaaatgaggagcagaagacttattaccatctatgctaagaatccaccggtcatgataaacagttgtcttggttccatcactaatgaaccaatgaccaccaacttcaaaaatcttcttaccccaaagaataaacatccaaataaaagaggatttcttggactcttcaaccaccaaaaaggaagaattaaggtagtaaatagccttcataactcttgccaccaaagaatcaggagcataatacaatctcgttgcttgcttagccaaaagaatctacaaaaaagaggtaagttccataccccaaaccatataattttatcaatcactattttatataaaattcaaaaactcaaataaacatttcacataaaaaatacttcggtaccattttaaaacattttacaaattaacacattgaaagaaaatatgaaaaagatacttcggcatataaatattacccttttaattttgtgaaaatttaataatagaccataatattgacatcattttagttattaaacatgtaattattattatattattacttttgctgatagtttgatatcttacaaacctcatttgaaacaatttatcgtttaaaatttaaaaattgatttgaaaattataaaaaaaaaaaaatgtatatctattttacttacttgtttcaatttttacttttattttcatattctttaagatatactcacttttatagatgatgtccctattatatcccttaagttaatatacattatgtgctagactttggagggtgagagtatattaagcaacccactcacaaaaattagtacattttagtgaaatataatatgagtatttttaattaatagatacaaaaaaagatattccttaacttatctcaaaaaaaattgctatttttttataggtatatttacaaaaataatggattttgagtaaagatttacatttatactgtcacacggcaaaaattatatttatactgtctttgccttttttttttttttcttttacattgtagatgccaaaaatcacatatcaagcctctatcttccatactcacagatagaactaccccagcaatacgagaacacctgaaaataactattaattcttgcaagatagaacaaaaatagagaaatcgatataaaataaataatcatggcaaaataactgtaaaacaacactaaaaca

SEQ ID NO: 27016 - DNA, 1396 bp, Cannabis sativa
  modified_base (1322)..(1347): a, c, t, g, unknown or other
ttttgtattgattattgtttttgttactactgctctcataaggacacactattgttggtttatttggtcctcaataatactagcaaagtgttaattgaataagaattattattctctttgattattaatatcaacattaatatattattggatattattctttctcattagatgtcattttgtaaaagtaatgagagtattatgtcatttgggattgtgcttattaacttttatgcctaaaataaaaagatgattgttatgaataatttgtagtattaattcttgtaaataaatactcaagtgtaattattgatagtaataatatttaagttataattttgtaacttctgtaggtacctaatagtaaatacgtgataatctttgattggttcaggtcattaatttttttaaaaaaataaattaatttaaatataatgatttgatatttaacatttaggtaattacggagttttattattactgttaaaaattatacttaattatttatttacaattgaaaattaaatttaagtatttatgttgtaaattattgattttgactcaaattttgccatctgaaattgaagattagtgcccccatgttatgtgtaaagtgtagtgtgtgtgttgtgggtaagttaggcacaaaaacagtagtaaaaacatcctaattaggcatgaaatgtagttgtggggtagagcttactagatagactaagatatttttgtcctttcctatgataacttacacattaatggtaattatatcttaatcaggagttaggaaatgataggtcctcactcacatttatctatttttatacttgatcataataagtcattctattcaatccaactataaatattttcttcttctgcaataacaatagatatttgtcagcaacagtaattaggggtaatgattcatgttcataggtcggggtcagatcttaagtattacaattaaatatcaaattcaaactatttataaagagatgagtttgatccatttatataaagaatcatatgcttaattttgagtaatttatctactcattatgtttctaataagtaacataattacaatcttgctacaacacacttatgtttatgttctatttaattaaaaaaatataatttatatgtaataaatttaatgtatttaaagagtatatactcttacatatgttatttttcagttaaacatgtcaaatttaaaataacttgtttaataaacgggttagccatatcaatctaaaaatgagccaaacttgtgcaccttacaatacctccactggtaatataataataataataataannnnnnnnnnnnnnnnnnnnnnnnnnataataataataataattttgtaataaaaagaaagggaaatttgaaatt

SEQ ID NO: 27017 - DNA, 2466 bp, Cannabis sativa
ttttttttttttttgtataatttggtttctgcttctttaatttttatcgattttatggataaatgtaacggataatgaaaatcgaattgagcattgctaaaaatatgctatttttagtaatttggcataagatagaacaaacccatttcttatttatgtctatctaaaccacggggcctctttctcaaaagaaaattatatgctatgaatacattgttaataatgtgtataaattttgttcgatttcatttaaagattttcttttttttttgttcattatattaatttatttataaatttgttgtaaaacagataaaggacacatttacacgagcaagcttgaatgagatagctgagagtcttgttcttgatgaagcagagaagcgaacatggacgccattatctgtactctttaagcctcattataataaattcactggaaactatgacgtaaatgttctaatagcggctctggaagggaaagggaagaatttgatctggcatgatcgtagaaaggaagcctcttccattgatctagatgagcctgaagaagaagctttaatggggattgtgctcaatattcctgttaaaagatttggtgggatttgtactaataggcattgggtaacactaagaaagattggtggtacatggtataatttggatagtgatcttgcttctcctatggtttttaaagatactgtagaagtaagaaatttcttggacaccatgattaggattggtggggaggtttttctggttatgaatgctaaacaatgacacttcttgtctgagtgtgagataagttgtctgaattgtgtgtacagaactcttgttatacgaattggtatttggaggcagtcaaaggaagttaccttctcttgttaactctttttaggctttaaagattcttgagtgttgtgggaaaatcttactgggaaattattgtggcaatttaggagttgtctgaactagattcttgtctcctaatgtaactgtgaataattgaaaatctttgtaaaggttgaaggttattatgtgagagttgcttcgattcatacattctgtttaaatgtctataacatgcttttaggttgattggtactctttttcattattattattcttttttatgaagaaagatgttatggtttatacaatgttgaatttagttctggaacatagcaggagtaggtaatcatgcaaatatattaattaagccatcaatttggtcttgtttgcaagtgaaaattggtcgtgctatataaaggaaccgaaggttaatgtcacttttagtctcttatcccttatttccctggtcttttcttatctctcttggtggaaagtttctttatgaaattctaactgtgaatcgaaataattatataaaaaagcaactctttgcatttaaaagagtgtttttgcaacccccaatcgtttttttaatcacttttgtcctgttatcaatttacttttggaatcttttttctttctcatcatttccttagtcattttctaatctctgttctactttcaatatccccttaccaccaccagccctttctctccccactttttctccgaaaggaaaaaagggaaattctcatagcacataaaaggggtatttcttccagacgtctagtctgttagatgttcacacttgaaaagccttttgtcaatttaaaatttcttaatcctcaactttatcaacattaggagggaaaaaaagagaaaatttaacttaaaagacaccaaaatctaaggtgtatgagaagaacgacaaagattatttaacactacagtgagaaatgagaatccaagtcttaattggcactacaaccaagttgacaggattgaaactcgaaagtgtactcatttgaagtcacatgggatatgtttgttctttctaatttaaatatttactacttcaaagagtgtctttgttgattgaaactattgaagctgtgtcccaaaataagtaaaaaaaataaaataaaagcgggttctcaaagacaaaggctctttcgaaattgaaacaaccgtcgaacagttttgcatgatgacaatcaaatcatggtatatagtagccaaaacactccccaagaatcattactacttcaccttttattttttcacttcttttgttggttttttggtattttgttcgttggaaggaatcattttccctatgcttgcactgcatgcaagccaaaaagtagaactcacctagtccaaccaagagtagattttgtattgggggacgctaagtaatttaactttttggattctgcttatgcgtctattttcttaccgactctactaaccccttttggcatcgcatattccttcctattcttcttctacttttattattcacacaacacagtatcttttataaataattatatatatataaataactcccacacaaatcttcctcttactccactctctctctctctctct

SEQ ID NO: 27018 - DNA, 3107 bp, Cannabis sativa
attcactgcctatgctcttagtgttgctgaagacatagatagtgctgagtcatttagttacacaaatgccattactggaaagaatagtgcagcatggctgtaggccatgaggaagagaaattgtcattgaaaaagaacaaaatctggacagtagttaacaaacctgaaaactagagagttattaagtgcaaatggttattcaaacaaaaggaaggtctaccagggagtgaggatctaagatttaaagcaagactagttgccaagggattcactcaacaagaaggcattgattacaatgatatattctccccagttgtcaaacaaacaaccattaaagttatcatatccatggctgcaagatttgatcttgaggtggatcaaatggatgtcagaactgcattccttcatggcaacttggcggagaaaatctacatggagatacctgaaggctatgatgagaaactaggtcaggtatgccttctaaacaaatctctttgcagattaaaacaggcttctagataatggaaccttagatttgatgtgtttatgatgaaaattagtttcaccaagagcaattatgatacatgtgtctactttcaaaatggcatttatgtacttttgtatgttgatggcatcctaatagttggaaaggagagaaagcagattgacaatcttaagtcacaacttagtattgaatttgaaatgaaagacttggggccagccatgaaaattctaggcattgaaatagagagaaacagacctcacattattagcctatctcaagaaaattatctcaagaaggtacttgataaacttggcatgaaagattccaaaccagtaaccactcatctagcccagcattttaaattgtctgagaatcagtcaccaaagacagatgctaagaggaaacatatggaaaacacaccctatgcaaatggggttggcagcctcatgtatgctatggtgtgtaccaaacctgatctggcacacagcctgagtgttgtaagcaggttcattagtgatcctggtgaagagcactggaaaggattaaaatggatccttagatacattaaaggttcaatcaagactggtgtggtgtttgggaatgacagcaattatgatgacaatgtcacttgttttgtcaaattatgctgggaatttagacacaagaagatctttagctggttttgtattcactgtttctaggggttgttttagttggaaagccaacttacaaaaggttgtttccttgtcctccactaaagcagagtacatggctgcaacggaagttgtcaaagaagctatttggctaaagggtttgacatcagaaattgggatcaaatctaaaaatctgttcatagattgtgacaaccaaagtgcaatccatcttatgaagaaccccatgtatcatggaaggtccaaacatattaacattaaactacacttcattagagacattgtttccaacaaattagtcaaagtaaagaagatcaatactcatgagaacccagctgatattttcaccaaatgtgttactggtaaaaagtttaggctatgcctaaagctattaaacattaaagattgttgatccttcattcatgaagtaaaccttattgatggaacaattttgcctatattctttttctcagagccttaacttgcacaagtttataaaccaggtagaatttgtggggtttatatactggtgcaagtgtctattttttttggacagtttttatagttgaattagttagttaattctgttaaggttattgggttcttgtactctctatttcagtctatatataaataccattatgtgattcattataggtgagatttgtgtgtgagctgagagtgaattttgttgtaaagagcatgagaagtttataactcatggctctcgagtgaacctatttttcgagtaggagcatgactccattcagttatggttttgttcataattgtatcatctctgagcatcatcttcaagtaataaaggcaaagcctcaaggttcctcccaaggattagatctaagtgttacaacttgtgattgaaccttgtaactcattgtgttctcttgctctgtttttactcttgctgttattgtttttttggttcatgttttattattttcaattgatcttgttgatgtttgttatgtttttggatggtgtctgattcactacatggaaaatataaagtctattttatcgtttaacaaaataattaattttctaattggtaatttttacaaaatacatagtccaaaatgatatttacccttatataaagtttaattttattctatttcgaaaaataaaaaaaaaaaaaatatggctcccttcatattatttcttttcaattcttttgatcatcttactctaatttactcattcatattacgtcatgcctgaatatgtttatagtgagcaaagaagcatcgttgtgtattggtgtaggccaacaacaacattaagtagactgcgtgtgtgcttgtgcttgaggatcaacaacaaagcttttctttttatagggtatcaaattttgagttattgataattcttgcaacaaatcttgatatgagaattttacaaatatagagtggtttgagattaaatttaatttttttttattcttgctttttttatttcccatatgattttgcacgtatatatatatagggacacgattttgtcccgtgatgtacttttacggaatgtattccgtggtacattaaatgggtctcagggtacattagatgagtgttaggatacgttactattttttaaccctaattacctctagatcaatcttagccctcaaatcaaataactctctcatttaacggctatcgtacatcacagaatacattccgtgaaagtacaatcacggaacaaaatcatgcccctatatatatatataccaattaaataatgcttgaagctttggctctatatcaacacaccggccaacccaaatatttgtgtagtgtggttcaattatttatttatttattttgggaattttacaaaaatactgtttttggaccaaaactttacaattatactgggacacggcaaaaataacatttttactgccccag

SEQ ID NO: 27019 - DNA, 2246 bp, Cannabis sativa
attgggttgtcctaaactgaaggagtttatgggtgataaaagggcatcatcatcatccttatcatgtactactactactactactgataataatgttattggtgaagaaatggatagcatggtgtccactcctaatacacaaagtctgttcaaacacaataataaggtatattactattctaattttaatttcatcaaaataatcaatactttgtcctcatggtcctaaactgaagagtttatgggtgagaaaaggacatgatcatcatgtactaataataataataaggtaataatcaattaatctttgttttaattacatagcaagtagcaatttatatatatatatatatgtcaattattctttttgtttgaatgatataagtagtctcaatatcttttcattttttattttatatttagttgtttaatttgacaagttaattatttattttgatgtttatagttgtcatcgatcccatatataattttttagttgttttgcttgatttgatttgtaggtaatttttcctatgctaaaggaattaaagagtgattggagtgaaggaattaaggagatatttgagatgagtggtaatagtgattcaatgatattgtttcctaacctctccacaataaagtgtagatctcgtgatgaaccaattagtgtaccaaatttgaagttattccttcacaaatatcatacaatccgtacacttaaattgtgtggctcctttgtaaatataagtagtggtggtgatggtgaattgatcaactacactactactcatcttacatctacaccttcttcttctttgaaggaactattcattaaagatgttgatatggttgatgatgtgtttggggtggaaccatcatcacataataataataataatattgttctcttatttccaaatttaaaaagagtaaaggttaggggatgtatgagattacagagctttgcaccctcctttatgtctttccccaacttaaaaactctacaagtatcaacatgccatgggctgaggtatttattgtcttcatcaacagcagccactcttgtacaattgcaacgaatggtaataacagattgtgatgaaatgaaggagattattattaatcttaatggtaatgaagaagaggaagaagaaaaagactccctaattgttttccagaatttgaagcaactagaacttcaaaatttatccagtctccaaagcttctactcaggaaataaagttattttgagtttcccaaatttggaagaattatatatctacaggtgttgtaggatggggagattttcagatgggatcgtaaacacctctgcatcattattgaacacaattaaggttgatgaagaaataattcctgtggaaagagatgatgttaatgcaaccttggcaaaacatttcaatttgggattaccacacttattttctcatcaaatggtacgtacctacttcactcatttattttaatacctttttctttattatataattaatattaatatgactttggtttgtttaataattgagtatataggatgatgatgatgatgaagcataattatatgtatatccaaagtttgttgtaaggtaatttttttattactattattattggtcgtatatttcatcatattcatatttatatcttaatggactatattattattattatttggcatttatacatatatgttgtgttgattctgtgataaatattggtttgtttttttggcagaggaattcattatattaatctcaaagcattatattatcatgggaagggaaaggaaaggaataatactattgagtttgactatgactacatacaatcttataatattaaatcattgttactttgttacttaattaatctagtaattattggttttatcttcttttctattttatttaagtaattaaacatgcaaaagaggaaaagaaacgtaccattaatcctaaccaaaaattaatgtcaactttttatttgttaaaataattacttgatcatcataaatttatttttagtaagggattatttgagtagggcagcaaggatgaagaagagacacaagttttacattagtattactcattttgtgcatatacatgttgaaaaataacacatctccatcatcaggatggagacccaacatagtatagctccttaatttatcacattttagcttcatctccattcaattgtaattaattatgaactaaactctaatt

SEQ ID NO: 27020 - DNA, 4118 bp, Cannabis sativa
  modified_base (27)..(51): a, c, t, g, unknown or other
tcttatttaggatgttaatcaacatannnnnnnnnnnnnnnnnnnnnnnnntaaaataatttccaacagctttgtcatatgcaacccatatcgtcaataaactacctaccactacattggatggtaaaatacctaaagaggtatgccttagaaaatcgatttgtgattatgattccttacgaatatttggatgtcttgcatatttcaatgtcaatgaatctaaactggatcgtagagcaaagatagctattttcttgggcttaaatgaaggagtcaggttcttcgacttgtgtgtggtgaattgaagaatatcgtcttaagtcgagatttcacatttgacgagtttattttgctaagacagactaccttagagatagagaatgaaagcccaaatattctttctaaggtggagcttgagataccggaaggatctaaaaaatattattgatgttcacggtgaagatgaaagtgatggttaagaagagatctcagttgaggtagagctttcgtcagcttcaccaccagtcaatcagcaattaaaatctattgtcgctacttgaccgggaaggaagattattcaaaggcctgctagatacgcagatatggtagcatttgcactcctagtaattgatgatgacgtcccatgcacttacagagaagctgtgcagagtgttgacgacaagaaatggaagttggcaatgatgaagagatgaagtctctttgccaaataaattaaacgtgggtgttggttcgacctcctaaaggaaagaaggttattggctgcaaatgggtatattccaagaaggaaggagttcttagtaaagacaacatccaatacaaagccagactggtagcaaaagattatacccagaaagaagggaatgttattctcttgaaagtcaaaattgcagacaaccctacagatatgcttacaaagtttcaacatttttttaacttgatcaagatcgcgtagggtgcattggaggtagcatttttggttttggtttctttttttgccaaggtggagattgttggatttggctcaaaagtcaaattgtcttgaagttacaaatatttggttcaactttcaagagatttaggacttactatttgcctcatttgtcaatgaagctatgcaatagctattgacttatgctgtctcatttattacatatagttggaactacttctaattattatatatggttaggagataaactatcttacatggattacatatggatggaagatgagatacctctcattattatatatggctgggaggtgatgttttccttctataaatatggagttcttaataggccatttgtaattaagtacatagcggtttggtgtgtacaaatatgaggtgaacaattcgagtacaactttgtacaatcaggtttattgggaaatctgcgagagagagagtatagccaaacttcggaaacactcgagagatattatttgtaggaaatttgtatctatattatgtatattttctactcagattaataatatcagttgtcttccatcaagtaagcaaattgtcgaaccacgtaattctttattttattatttaccgctttaaaatatatttatcgttatcttccgctatttattacttccacgcataaaaggtggatgcactaaggtttttactaaggttttgaagacaagaaattcgctctctttctgtaattttaaattcattaatagatgtaacattgattatgtggacaatcttgctttgttggcaagaatttcattctccgtgatgaataatattgaaaacatccacagctcagtgcttctgttgctttttctgtgtcacttgtacatgtgtataaatatgtagcaagatatttgaatcttgtttggagaatctaaattattaggaatatcatgtgtaatatacaaaaataagcacccataaatagtgataaaaaaatacccaacaattttttaactcatatataaacttaaatagaaatatacctagaaacatgtaaattttaaaatgcaaaaataaattaagaaataaatggggaccatccttttttatggaaagaaaataaataaatcataaaacatactttgcaaagacaactatactcagcttaaaatgagctattgccaatgagccacaaccagtcagcagaaacaccagaaaatatgcctccaagaagaaacaccactaggatattacctagagcattttgctcaggaccctgcaaaaagttccaaggaaaatatatcaataaatactcaagatgtatccaacaaaaatacaagtattagaaacaaaatcaaaaactgaatttagtgaccaaccttgtaacctttaggtgcagctgtaagaacacaaacagtgagatgaccattggttaatcctaataaggaagtaagcaatatcatccatccttgatcaccatatttggctgtgaagtaaaatgctgggatgaacaagaaacgagcaagaatggccaccatgagtccctttcttgatttaatatttaagcatttcacaaggggagtgtatcttgatataaaatccaatagattgtacattgccatcaatactagtggatacctgccaatattaaatgtaaggtttggttaaagtcaaatgtaaaattttattgctgagtgtaataaatattaaatacgactgttgccaatatattgttgttgactacaacattaagaagagaatagtttctaataattggtcagcatgtaaaagttatcaagtagtcgacttttacaaattgtcaacaaacaagaaatgccacatcagaacatgggaattgtctcatgtctggcattatagttcaccaagtagtctcatgtttaattttaaatttttttttggggcaaaactcctataattatatttttcttttataaatttgaagcgtcaattaaatctcgcagttaatatcactatgtacatctgtatatactattgtcatccaaattttacttatatacaaatgcacaatgatcatcctaattaacatttaacaataaaatttaactggtgcgcaccaaatttacaaacaaaattaaggagacattgcaacgaaaaaaaaatgtgggtgtaaaacttaaaaaataatggagtttcgccaataattaccctaaaagaatatgtagttcatagagtatagtgattgtgaaggaaagcactaaaatcttaccatgtgcccaactggtgttttcctgtattttcataaaggaagccagggaagatggacagtgtgaggatataaatcaggtacaaaccaatagcataatcgagattctctactagtaattgcttgttggtcttccgtacttcatcaacctatacatacacataagttattattatctatataacaaacaaaattcgaaactgtttggattctagaaaatggttagcaatgttacttggccttcttgtgtttcaacaccggcagccgcaagatcagatttcactgttttcgatccttgtgaggctgctttactccggaagtgtttcactattggtagctttggaaagataaatgcgtatagtagaatgcaaatgaactcaaacgatgcagagattgcaagaaataacactgcataacataacaccaataacattatacaattatgtaaactaaccaaatttaaaaaggccaaatttaattggcatccctttagcacatttgtacttacaagtgccctttcgaagaccatggttggttttgtcaaaggctgctctagtgactagccttaaaccagaggttaaaacgccagatgcagccaagccagcgaagaaggactataaaattcaataatcaaaactgtacacataaatcttactaattaaccatagtgatactagcaaaagttacagaatatgtataaagtaacctgcatgaattcagggagcataaaagccatgtcgccaaccatgccaccttgaacaagggcatctgccaatccaaaagcacctacaagtacacatatgcctagataaggtcccagtcctcccttaccagatgtgaccaagtcaacctattatattataaatagataaaatcagattaaactaattcactaatatttttataaattaaatgaag

SEQ ID NO: 27021 - DNA, 1754 bp, Cannabis sativa
ataccgccatacgaccataccactccattgaacttgcccttacaattgtgttagtagtgttatttattatttaataactattgataggtgaattctatctgatattcattttatttaaattcatattatttttatgcttaattgttgatggctttttcaaaccttagttgaggttgctaggtaagctaatttttgttaatcttactccataaatatttatatctttaatgtaatagattttgtcccatttgcatgaataataattctgttttctttatatgaaaaaattaaaaaaagaaaagtatatcatagattttcaaagctacattcattttacatgagaagcattactaatagtagtggtggttaaattatgaaaataaaaaacttactctattgaagccatatattacgtattctattatattaatacatcaacattttgatataagattattatactataattattattatacttttttttataagtttatttttctctatttattttttaaaacatatatataaataatccataatttaggccggctgtcatggcatatagggtgatttattcaaaaccacgacaaaatcaatatagtggcagttggcttaattttgttataatataatttattaattaattataatcttatttatccaaactcaccaaattctttgacaatcaagccacgctattcctatttcttatttgccctatttttttttttggtaatttgataatttcaatgagaagaataataagaaaaaaatatatgtccatagtgcatgtccatgataattgatcaaaagtcaacattttttttttttgttttcaactttttttttggtaataataaaatgtcaaaattgcttttgattatataaatagattgttcctatgaaattaattttgtcattatatattaatatactttttattatgttcaacggcaacacaaggttgcatccctattctctaaaaaaaaaaaacaattgcatccttattccctacatttttttagtatattcaattggaaaattttgtagtactgttttggtacactttttatattttttttgacattcaaaaaagcttttgaatgcaaaaattaagttatatttagcaaaaaaaaaaatattttgtgttttatgtaggtattatgttctaatacacaattgcaaaacacgtaaaatttaatatttttattaaagatataaaaaaataataaatttattattaattttatcatttttttattatgtaaaataataaaaaaatataaatagttcgacattaatgttatgttaatataataataaaataaaaaaagagatgtaaaatcaataataaagtcatacatttatgttgatgcaaattttaaatcatagcaaatattattatgataaatttgacaaaatatttgtgtgtatcaaatttgtatcactttttaacatattattggaatataattttttttctaagtgagctatattttagttttacattatttatttgcattttcattaaagatgctttaagtctatttttttttcttcataattatgtacgctgtaatttttaggatcatttataaatttttaaataatttcaaataagttaccatgcttaaataaaagttcaaataattgtttaccatactaatgagaaaaaataattatatgtgcaataaactatttaaactttattttcttcattataaacaatttaaaaatttattgatagtttt

SEQ ID NO: 27022 - DNA, 2093 bp, Cannabis sativa
aatatcatgatatttttatctttttcccatctttttctctgatatttttctaatcttcttctattttaaatctgcaaaaataaaagattcatagcgtaaaaatgctccaaacacgattaaaactaaattaaaaatatactaaaattaatctaaaattaatactaaaaataacctaacacctgtaagtctatgggcggccaggattacttggcaggactttatagtggccagactgatacaggtatcccggtggatccaagtggcaggctcctgcctccaagggaggatcctccacaggcgtctccaactgaaggaagaatccttgggagaagatctcaagttagccaaacttagagaggtcgtctgccaatccatcctaattgaagaaccacgcgctgctgactgcaatgtattcgctcaatagatatgtgaattccttagagagccacacattgttgattgtgatgtgctcgctcagcacaaatgcacaaaccaagaaacccaagaacgtaagaactccgatcacttgatttaatggtggatctaggaccctgaaccttctctctcactccactagtctctctctctctctgctctctcttcctgtcgatgatggcaagcaaggcaaaaatccttcttgtcgacgatagctcaggtggagcccaagtggtttaggctttcagatctttttttttttttggtattttggtttattttttgcaatttcaaatgcagaatcgaatgtagatttttatttctgtttaggggtttcgatttgtgaagaaaattttagatctagtatttttttttttttagtttttgtttgatttaggatagtggtggtggtggtggtgggaaaagtgggatagtggtggtggtagtggtttaatggtggacacaaaaagagaaagaagaaggaaaagaacgaagaagaaaaagaaaaaaaaaataaaaaaatgaaaggaaacaaaataattataattattattattattttaattttttttataattttgaaattcagattttttttattttaatttttaattattaaaattaggtggaccaataaaatttcactacgtgtacacttgtatacactgtggcagtctactttggcacttaacagaccaaagtagacgaaaggagtagagagcaaaatgattgcagaggttggggagtatagccataattttcccaacatggggttagatcataccaaacttaaaaatctagagagtttggttgcaaattgcccttttcaaaaacttgttttaaaaaatttgaccaaacaaacctctattagtttttaaaagttgtattctgtttttgtaaaaaattagaaaaaaaatttaagttttaaagccaaacaacccctaaactttcttctttaataaaaatgaaaaagaagccctaaactttctatataagcataaaataagaaaaaaatgtgcataagcaaactttgattgagataataaagctttaaacttctctgggtgcttttggcaccccctaaaaaaaagctttaaacttcttcttcattttccaaatgctatctgtttatttttagctagtaaagttccatacataacgagtaacaagctatctaccttatttctgcatgttatggtttgttgtctatcaaaaaatcagatttggaaaaaaaaaaaaaattattgtcgttgtggttttaattaaaaaaaaaaaaaaggttataggaaagtataagcaagagtctagttttaaactttctacatgattttctaacttttgataagataaaatactatgtagataaaatactatgtgggatatgcaagtactaaacatcacaattcactaacaagctcttcacttcatttgcacatgtgctgtttgcaagatatgagaaggccttcttgctctggtggcttgttcaaaaccatgagaaatctcaatcaacttaggctcggtaccctctaatcccctaaatataacccgaatggcatttcattgcttgattcgaacccagccggaacagaaattacagggtaacctccaattgccagtaccgtagaagcagcccagcctagtgtcaccatggcatccaa

SEQ ID NO: 27023 - DNA, 2126 bp, Cannabis sativa
cctggtaaaatattttcaacagtctgtaagtacgtgttatgatactaatagaggatcccacaactttctcactacatatggaacgtcatcaccattaatggagcactgatgctcctcaaatttcgagagatatatatgattgtaatatttatcacataattttggtaagttaacaatagagtcaactacgctaaacactgaaataaaatatcacaattgtgatatacaatcaatatcctcgtaacacgccacacacactctacctttataaatgaggatgttgtaaatggccataaaacacctaaccacatataatcccccataccattacactcgctttgtatataagagaggaaattgtacatgttcatatgacacttaattacaaaatagctcctcttggaatcatgaatgtttatgagtggatttgataatccatgcagcctgtctaattggtatcagtaaaaccaactattatatgtcacaatattagtttatcgattgttaacacatccttggatccataaggatgacagctcaagtaccaatctagcatgcctacaacatatatcacaataggaatgcatatacttgagtgaaccctaggctgcctttaatacgcatatatatatgtatgggataatttcaatactggtttgcttaattcttttccagactacagctcctccaccaagagtaaatactgatccagatgtcgacttttgactatctttttctgattaaaaatcagaatcagtatatccagtaggatttaactctccactagaatatacaagcatgagatctctcgttctctgaagatacctgagaatgtactttactgtaatctagtgttccaaacctagatttgattgataatgactaacaatccctataatgtagcatatgtcaggcccattacacaatattgcatacattaagctcccaactgctgatgcataagggtactttctcatgtcctcttcttcttgaggagtttttggacattgatccttgcatagagtaattccatgtcaagacggtaattgttctttcttggaatactatatcgagaattttctagccccttatttgctatcctaaatttcttcctcctaacgtggcatgtcaacataagccaagaccaagtacacatggaatacagccttgccaatagcagtagaaagtcttcgtacaaggtatggcaaaaccctcaagaagcaagccaaaggagttaaagggatgttgtaaaggagatgtaccacaatgtttggccgaccaaggggggtctataggtcggccaggatgagcttataaggcctgccagggtttgagcagaagttggccgaccaaaaggtgacattcagacctaggaagggtccatttgaccaaggaagcttgacctctacaaggaaaaggtatacaaaggttggcctccacctacaaaggctgacctccacctgcagaggctggccatcacctactaaggctagccaacacatgcaaagacctggccaagttttcacaaagctggcaggaacatgacctgccagaccctggcaagaacatgatatgccagaccctagtaggaaaatggtcggctagaccttaacctgtagcattgtatggctggccagcctacatcctaatgatgcatggctagccaacctttggcttggtaggagtttgatgtgcaattcttattcatggacagcaagtcaagcaacggtttaggctttaacagcccatgaaaaatagagagaaaatatctattttcaaggggaaatttagtcatttttactttattaattaattatgtaaatggtggctttatttacctatttctaatggctattgggcatgtaagatctagtatataaagagcattatccttactctgaaaccctaagtcattaagcctctaagctctctatgctctcaactctaagtttgagaaccctaatcctctcttctccctctcttctacatgccccaaggctctctatatctctctctctctctctctcatgcctccaaaggctctatctctctctctctcatttgatactttcctacttgattcatacattataattgtaacgccctaatactaaggcacgctacag

SEQ ID NO: 27024 - DNA, 4863 bp, Cannabis sativa
tttttttttttttttgcttaaaagtcgatttttttaattttttttagaaaaaaaaaaacaaaaagaaaagtccacattttttgtttctttattttgaattaaacaagtttaggcaagtaaataaattcttaaattaccaaaatgactccgtaactccaaatacagaaacattaaagagagagtgtcataatcaaagtcttaccaaatagtgtgtaccccacttgtaaaacaattttttttttttgataaaattattttattaattcagagccttgtaagttgtaactgagaatttttttccgttactagtattgtatcttctaaaataaaaatatatattaaaagtttttgtctctatctatggattctctggttttctgtgggccccttcaagtcaatggatatggacatgcccctcctgttctgcaaagttgaaattcaggttggggagttttcttttcttctctctctctttttttttttttttaattattattttgtttgaataaagatgtttatcttcttcttattattatttttgaatctttgataacttgcatgaaacatgcgtgagatggtaaaagacttctgctttgtacaactttctttcccattcactcactttactgataaataattaattctagtataatatactttttgtttcttgttttttttcttctatataattaatataatttatatttataatacttgtataaatgggttgactgtgaaaaataaaaattgggtattaaggataattaaacacaaaataaaaacgacgaagtaaaggggttgtgaattagcaaaggagtggtatagtggattggattatgcaatgaaagactgaaaataaatgtaggtctcgatataattatatgccatatatgatatatgaatatcaaagcttgatatgataatgagaggctttaattgagaaaatatactaaaagcgcctataagaatcctaaaatttaattattctttccccctgattgttttatttattttattattcttatttatttttttaaatttctcaaaggcaaaaaagagagaacaagaaaatacccatatccattaatatttggtatttcattgtagatttactatcaccaaattctttcttttgaagccatgatggtatgagctcttcagaaaagaagactgaagagtagtcgctagtgggtctagaataagagggaaaaaaaaaagtcgaaatcatcatgacattatctccatgggatttgcctcttcttgctgatcaaaaccgatactccaattttgagagctttctccaatctgtcactcccattattccttccaagcgcattcccaaggtaataactctttctttctctctctgtttgataagtaaaatgttgatgagaacaataggtaggtagatgagtcatgagtgagtgtgttttgggtttttttttttttctcattagttttcatgactctctctctacccatttcaaagattttttttttctttggaaaagatttgggaattaagagcagggctggatttgaacttgtagtaagatgaagttttttttttttttttttcattccctttttataaaatattaatgttatttaatgacttgaacccgcgaccggctagctcggttcaaacttgggcgagggtatttgaggctcatcatcctcttctaagctctcttactaaaataaaatggggaggttaaatatatttaaggatctatgtgaaataacattactttttagaaggaatagaggtcccatatcattaaaagaaatattttcttggtaaaaattgatattaatactatatgacaatcctataattgagtgaaaacgacaaattacactcgagtacacaattagttgtatgtaacacgtatgtaatacgaccggtttatgaataatgaactaaagcataaacaaattgcatgataaaaaatgttgcaatttgtttaaagaaaaaactaatatatctcattgttattcttattaatattctagtgtatacataattattcataattgtaaatatttttgtatttaagtaacattttacaaaaatcctaaatgtgcttcctcagtcacatgctgaagattttgtggagtgcttctccttaaatagcctttggaaattcttcactgaaagaagtatttatggtgttggtgtcccaattcttttgaacaatggtgacagtgtcctacaatattattgcccatccttatcagctctacaaatatatgtggaaaatccctttgtttcaccaaggtactccaagcgagatacttcttatttctttttcttctctctttattgccaaactttgaattttcatccatgtttatttgtaagtaggattggtggaaatattaactcttggagtgatgagagtgaaaatgatgaactattatcgcagtctttgagtaataactcgagtaagagctccgataacacttcggatggttccaacactgaccatgaagtctcttctcaacaagtcgatcgcttcggggacctgtatttccaattcaacgagacatctagtccttatgacagagtccctctaactgaaaaggtaaaaacactgatgacaataagcaatctaagttgaattatagttttttcaactcaactctagaagattattaaactaataatattacatgttcagatcaatgaattagctcagaactatcctgatttgctgaagtttcaaagcacagatctctctccttatagttggatagccattgcttggtattcctctccctctttctccttaataaatttatcatatttgtttgtaacactttactaatttttgttctttacctctatgaactcaaactctcaaaccaataaaaacagtactgctattcgttttcaagataaatttcatccaattacaaatttagatatacttaaggaaacatatttgaaaggtttttatctatcacttattttattttttttcctcaattttattcatattcatatgctttgttacaaatttgtatgacttgtttttactaggtatccaatctatcagattccattgaccaagaatgtgaaagagttgtctgcatgttttgtcacatatcataatctctcctccttccatggtaagttactcttaactagtattttgtatgaataagaaagagatacaaataaaaacattattgtactaaaacatgattacattcatgtatttttgtttttgtaaaggtgtttcgaataccattccacatgaagaagctaaaacttttgcgtatagaaattgtgtggtggggagtgaaggaagcaacgaaaatctaaatgaagaagaagatgaagaagaagatcttagcgcgattcgtccttttgctgctgcaatgtataagatgaatggcgagctttggatgaatccagaggctgcagatcaagcaaagattgggtcttatcttgatgctgccacttcttggttgaagcttctaagtttccagcatcacgacttcaatttcttcatgtctcgtagatgtttctgatcatcatcatcaccatttttcactccagtttttatgaggaaaaaacaacgggaaaaagacttagttttgattagatagactagttagttctaactagaaccgactgtactacatgacactacagtttatgatcaatcaaaactgcagctggttataacaaaaacaaattgcattcgtcttcgtcatataaaataataacacaattttctccaataaaatattaacatctcttttggagtaaaatttataaaagtaagggtaaggaaaaaattgtaaacaaaaatgagatttgtttttttctttatttttagtgaaaatagttggaacctttcaacaaatttaacaatcactaaagattttggaacctttcaaaaataataataataataataaattaggataatatttacaatatatctggttggccttaaagtaaatcattgcacctgctgtctaaccaatttaccaatttgggaacaattccagaacccactatagtgtgcatataaagtactcattttttttttgttgggttagttgagattctcacaattagtttttaggggtttctaactttctatcctaatatttcttctgcaagttaaagagaaagattgagagtgaagattctgactgacgatgaaacctctaaggttgatcagaagagtttctggtaatcactctcaccccttcatttctctgttagggcttctcagacctcaaattcgttgttatgattccaactacaaaagtgttaatcaactggaaaaatcgattcaaactcgctgcagatctggaagccttgatgttgataaacttttatgtctctttgattccatgattcaaatgcaacccattccctctgttactgcattcaatcatttacttgccgcactctctagaaaaaaccaacactccactgttttttctctctacaaacacttatccatgcgttatcgccattttcaaccagatgttcataccttaaccattgttatcaaatgtctatgtcgtttgaagaagatgggtttaggtttctctgttttggcaagtatttataaatatggccttcgcccagatggccataccttaagtactctgcttcatgggctttgtatggaaggctccatggttgaagccctggagttgttccacagaatcttagacaaggaactcccatgtgatgagtttgtttatggggtcatcattaatgggctttgtagagccggagaaactagggaggcatttaaggtgcttaagcaaatttaccaccatcccaaactcaatcccactcttgaatgtttcaatcccatcattgataat

SEQ ID NO: 27025 - DNA, 1365 bp, Cannabis sativa
caaaatacaattaaatttttaaaagattaaaaactattttatattctcactttaaaaaataaaattttaaaaattaaaaattgaaaatacaactaaacaaattatttttccattttcttttaaaagagaatacaatgcttcaattaaagcttttatattatatccagctgtatttgtgttcaatattttacatttccaaaaattataggaagagaaaaactcaaatgaaaactatgatacgacgttagagtcaaatttatgctattaaaggacctaaggataaatttaatttaatttaatttttggaaaataatatgatacatagaagaagaggagtatcggggagcagtagcgggccatatcgatcccgctaattctggtattcagattaggcgacactccccacgtgtgcacaaaataacaaattcccaagtcgcacaccatgcagtcgtgggtcccactcgcccgccgcacgtagtccgatgtggcatttttctcgaatacacgtgcgcatttcattggcttttgtcctacgtgcctccagaccgtgttttcattattttcacgtgcacccatattagtctcgcacacgtactgatggaagcctcggtacaatcacagccgtcctttctgttgacttttcctcaaaaccgacctcgcttcgcatgaaatccggattctgaaaatggctgtcaccctccttattaacacagaatacctcacacgtgtcactgattcacgtggctttgtttaatagaaactcaatttatttatactttcaaattaaggaaagactgttacttgaccaccaccaattagttggagagtcaatattaggtctataaataaataataataattacaaattttgttttctcatgtacctatgatattgtaatcatcctaaccagtataaatgatttggttttgtattcttcatatgaacagactaaataataattttttttaaagcaataaacaaattcattaaaaatataataatatcacacaggctaactataaatacaatacatttgatattcatcaaataaatactaaacatatcctgtttcaagaaaaaaaaaatactaaacatgtcagatttatcaaataatactatatacatcccacaaaaatatgaatagttatctaactcaacaagttgtttattcatccctaattaagttatagagattatagacaatcttaaaaatttggataataaaaatttggataacaaacttgcaaaaagtactcctaacatcataagatcgttataatagagaactctcatagtaaaaataaaacacaattgttaaatccttgtaataattttaatctaatatcatcatcaatatcacgcaa

SEQ ID NO: 27026 - DNA, 7395 bp, Cannabis sativa
taaaataaaataataataattatgaaagtcattattaaatgagcatgctaactaaattttaataataaaatattaaaaatagcataatgataaatataaaatcacagcatttattataatacaaaatttatatcacgttatattatgatctaaatttagattattttttgttatgtgagatatttgcatattcacaatttagtaaaattttttgacaaaatgaactatattttatatttgtattatttatttgtatgctcttataaagtggttttatcacatatgtaatgtaatctaattttgaagatcaattttaacctattgctcaatatagatcatgtccacatgatattttatttttccttttattatttttgttgagaaaaagttatttttttaccaaaaaaatcattaatagaatgtgatatatgagatcataatggacaactttttgaattgttaatgttggagtattttttttataagaaaatgtgctaaatttatgtaaatgagaaaaataaaataaaattaaaaacaatatttgtacttttgacaattataggtattgccccgctggagatactcactttaagcactacaagagaagatatactattattagtacaatttaatatcaagtttcacatattttaatttaataaataatataaaaaataactaaccacaagtaatacattagtgtatgttactaatagtaatactaatattgacaatagaattttaatttattatttatagttatacggccacttttctatccaccaaactatatatcaacattaattatatgtataaatccatcattattatggatcatccactataactataaatttcagtaattctcaaggttcatttcccatcacacaaaaacaaacattattattattcttcttcaacaaaaaaaaaaaaatggtttcccaaaatacccttatggtattggtagtagtagtagtagccatgattctcggtcaagccgcggctcaaaactgtgggtgcgcagccaacgagtgttgcagccgattcggcttctgtggaaccactgaggactactgcggctcgggctgccaagagggaccgtgcaagacggcgccgctggcgccgagcactcataatgttacggtggctgagatagtgactcctgaattcttcaatgggatattggatcaagccgatgcagggtgcgccgggaagagtttctactctcgaaacgtttttcttgaagctcttaattcgttttctgggtttggtcaagtcgggtctattgatgattctaagcgtgaaattgctgccttttttggtcacgttactcacgaaactggacgtaagtatactaattcatttcctaattatatcatcaataatattattaaaatacatatgattaattgttctttcttttttactataatatattctttctttttattactaatttgattttaattaattgttctttcttttttaatataattttttgtttttgttttgttttttttttaactttcgtttgattttttatgtatttattattgctattctataatttaatctaaattaaagtggtattaattcgtgattcatatatatacgtacatataataattatttagttatttgtgctataaaaaaaggtcaaaacaaaaggttattttgtttctattcttatgttatatttctcgtacgttaatttttctttaaaaatgttcatcatgcatgattaggtgttcttaattaattggaattattatttcaaacaatcaattaattaatttcaattaaaatcatcatcatattcatatgtttaaaaaatgtattaggtattttaattccataatacatataaagttaattaaatttcgtcacataaattaatggagttggtattaatttgtatatatatgaacagatttttgttacatagaagagataaatggtccatcaagggactactgtgacgaaacgaacacggagtacccatgtaaccctagcaaaggctactatgggcgcggccccatccaactatcgtggaacttcaattacggaccagctggagaaagcattggattcgatgggctaaactcccccgaaacagtggctacggactctgttgtgtcgtttaagactgcgttgtggtattggatggggagtgttcgaccagtgattggagaagggtttggtgcaaccattagagccattaatggtgcacttgagtgtgatggtggtaactctgctacggttcaagcccgtattgaatattatactgattattgtaatcaacttggtgttgatcctggtcaaaatctgacttgttaaaatatatctaagctagttatatactaattatttgtactatatatatacatgcatggcttaataaaaaacttcattagagattttcgttattataccttgatttgttaactctttggctaggtgtgacttgttaaatatgttttataattttaatcagtattataaaaaactattaatgggactaaccctgtgtaccaagtaaattaatttaattatcgtactagaattactgaccaaagagatcaaatatgcaatttattatgatttttaattaattaatggtctcggatcatgacatatacatcaatctaattaagtcacagggaggataatatgaaagagtctatgtaatggagttaattaatatagaaaaaccaaattacaaattgatcatatccaataaacaaatagagattcaaactagaacaaaaagtagaaaattaaattagaaaggaacataatgttttcctacttagcaattggtacatcagagagagtatcattacatatcatacatttccaaacatttcaacctatcacaaagatgaacatccattccaacctcctgaataatcaatataaagcaaaaaaataaattaattatatactacattttaaaccagctcaacaatacataatgatttgaaactccaaaagaaatactcatgcatgcttaaataacagtacctacctccataccagtattggttgctttgaattcatgtgaggcttcaagcaatggatcaaacataattggactttaccagttgaatcatggcttaattaaggacggatgcacagttaagactgagcgatgcaacgaatcttcttaagatcaccatttccctcccattcatacttttcttccaagtaagggcaaccatccataaagaaagtttcaaaagagggtggcaatgaaccttcaaaagatggtggcagcccttttactggaagtgaccacaactcagggcacctataaatgtgtagttctttcaaggacttgagttctcgaaaccccttcttgtttatggttttaagacaatgagcaaaccatattttaagacatgtaaggcttgttggtagcaaccctggctctggaaaggactccatacgttcattataataatctgcaataggaaaccatgtccgaagagagaactccatatccgcagtacaataacctccaacagaaaagcttgggttggatcattggtattgatttaaagagacttcaagggttttttcggtgaagagtgcttacaagagtctccaggtgcttcatggtaggtggtcggaagagtctccaggtgcttcatgataggtggtcggaagataataattcgggcctttggaggacattatggcaattcaaaatttctcctagaccttctgtggagggcatgttttgggtgtttaccaatactaatccagttaaaaggtcagcatgttttttgaaaaggaaaaggtcggcatgttgatgtggtcgttatttgcccgatgtgcctaggtatgaacgaatcaatcctccatttttgagtgtcctttagccaaagtttgttggcagcgggttgatggggctatttacaacctttgggcataaaatttttaggatggttttatcagctggtcattgtatttctgaaaactttagtttgtcatgttgcgatgatttgttggttttcttggaaaataaaaaatgggcttatttttcaaaataaaatttttgttgcaaatgtggtagtgaatgctgcattgagttactttaatcaataaaattttgcaaagataatagattccattccttgtatttgagtggagcattggtcggttaatagataatatagcacaactcataaacttaaaataatattattcctctagctatacaacaattttgcataaataatattttttcaactaccgagtagtacatgttatatcgatatatgtatattgaaacatataatatgaaaggcacatgttatctcacattattcgagtacatcacatgtaatatcacacatgctgagtgtactatattatttttcaatgctttaattgtttaaaattttgtcttatttttaatttcaatttcttttttactcattattagcttctcacaagtgttttcagtacttgcaagtgaactatacttacgagaagcatggctttagagttgctggtcgcccctgttgtctctgcttcagttgagtttttggtgaagaagattgcttcttctgatgtggggagcttcttgaagggaaagactgactctggtttcgatacacttcttgacaaactagagactactttcctttctcttgctgaggtgcttagtgatgcggagcagaagcaattcaaaaacgctagagttgagaagtggctggacaagcttcaagatgtcgtggaagatgcagaggatctctttgacgaaattgagtatgatgcgctcaaactcaaggtggaaacggagtcagattctgataaattcaaggtgagtaaactatcctccatttttaactcaattgataggaaaagaaaagcagatatggagaagattctggagcgactgaatactttcaaagaagaaaggtacatccttgatttgcgaacaaatgttgagaagatccaatcacagagatcaccgtcaatgtcttccatagatgatgctgagtttttcggtagagatgaagaaaacaagattttgaaaaagatgttgctgacgtatgaggtggggaaagaaaaaatatgtgtgattccaattgtgggattgggtggaataggcaaaactactcttgctcaagctgtttataatgataatgaagttaaaaatcattttcaactcaaggcatgggtttgtgtctccgatgaatttgatgtttgcaaggcagcaaaaattatcctcgaagcagtgactaaaagttcatgtcatgttgagggtttgagtgtgctcgaagagaagatacaaggagtattagacaaaaagaagttcttgatagttttggatgacatatggaatgaggagcctactttttggaatacattgaggatgttttttaaagtcggggcacaaggtagtaagataatcgtcacaacaagaagtgagaaagttgcatcaattgtgggaacaactagatcgcaacgccttgatgtgttaaaggaagaagtttgttttcagttgtttattaagattgtatgtggcaacgaagattttactacaacagatttaaacttgggaaaaatcggcaaagaacttgtcaagaagtgtaaaggcttaccattggctgtgaagaccgttgcaagcctattgcgctttacacatgtgaaggaatggaaaagaatagcaaaaagtgatatttttgatttacaagttggagagaaaaacattcttccagctttgagattaagttatcattatctgccatcccacttaaaacgatgttttctttattgttccatgtttcctaaagattatgaatttaagaaagaggagttggtgtcattgtggatggtagatgatttattggagcattcaagtggaaagaggagtatacaagaagtgggatatgagtattttgatgacctagtgtcgcgatcattttttcaaccggcaagttgtacatatgagcagggtcgttttgtaatgcatgatcttatggtagatttggctaattttgtctctaaaaagaaatttgtttacatagagacacaaatgtatgacgttggattgatgagtcaaatacgatacatagcatttgataaagtcatcaactgccatatttttcatgagacatgcaaattaatttatgaagcaactcgtttgcgtacatttctacccattaataaaaattcattcttttcggatgcattgctccaaaatgagttgaaagagttggtaaagttgaagcgtttgaggtttttatcattggaaggttataaaaatgtgaaagagttgcctaagtcaattggtgaattaagacatcttcgccacttggatctctcattcacttcaatcaaagagttgcccaaatctctgtgtgtgctatataatttacagacactaaagttagtttggtgtgagcatcttactacctttcctaaaaatttacatcatctcattaatttgagatatgtttctatgagtttttgtaactttagtgtcttcccaccacttgggcaattacctgctcttttaactctttcgattgaagcatgtgattctgtagagacggttggtcttgatttttatgggacgagtttttccaaaccatttccattgttggaatccttgactttcgaaaaaatgatgatatggaaggaatggtcaacaccgaaggaagcatttcccaagttaaaatcactcgctataatagggtgtcatagactgacgggagatttgcctcaccacttaccatctctaacaaagcttcatattttttgttgtccgatgcttgcttctctactcccagtgatgtcaaatgtctcagaattaaatatcaaccaatgcaagaagatttcagtattcaaatcatgtggaagtgttcaaaatttcgataatttagaagacttgcatctcacggattgccacaatatagaatttctaccacaatttatttccatccaaaatcttgaagtcaaccaatgctccttcttcaaattgtttcctctagacccctttcccaatgcaaagaaaatcaaaattgaatcttgtgaaagtttagagtcattctcactaccaaatagccaaaacaatctatcttcactctccatttcattttgccataatttcacatttttacctgatagcaacttttattgtccaggccttactcaactgcgcctctttcgttgcgaaaatttaaaattcctacctacaaaactgcctaatctcttcccttctttacaacaactaacaatttatggttgtccagagttggaatcacttcccagatcaggactgcctttcagtttgcgcgacctcaccattggtcactccaacaaggtgattgcatctagaatgaattggaatttacaagcacttcctaatctgacaagctt

SEQ ID NO: 27027 - DNA, 1386 bp, Cannabis sativa
attcatcttcacttaaaacatcaatattccagctgaacgtatgtacatcatagaaaaaaaaaataataaacacattgcaatgcagttagaaaaaaaaaactaggaatcttttttcataactacaatcatatgattatgagtgtcttaagtttcaactttgtactttagaatagaacactctgttgcataaaccagtttgaaatcagccatgtctacatttaaattaggatgtagaggattaactaaagtttgagtccaaacgcattcatatcctactaatccaaattgttatcaaaagatccctatgcataatagaaagacctaagaagaaatttcctagaatcatattaattcaaacaaattgaaataatttaataatagatagatagatagatagatacaaaaagcagccaaagtgaaaaagtaacaaagccattagtagagaccatgatttcgatggaagcaacagcacaaacaactagtctccccacgatttgcattatcacctcctataatctagaaacctcttatttcgtgaatcgtacacacacacataaatagatatagataaaaagagaaccactgagtgaagaatgatcataatcataaaacattcatatatctagaaaggacataaacaaaccctaatttataattagatcaacaagtacaaaggaaacagtaatattaatcaaataatctcctaaatcacaaacaaaaatttgggtcacaaagcgattttacagaagcatcggaagagtaaaaaaaaaaagaatttaacgatcattactttcacagaacgatcgcgatcaccacacaccaattgtaacgcctgatctgttttctttcttctttttctttagtttttttttttctttcataatgtagagcaattcaataaatcatctcagttaaactttctctgaagaacatgtatactgagatgattattgaatcgccttacatttagaaaaaattagagatcgagattcgagagtgcgtgttgtggtagagtagagattacactacagaagagggaaatgcgttagggtttttctttcaggccgtttgcattttcagggttgggaataaaaaacgagatatatgctgtatatatatactagttagtcatgaaaatcataatttttttttaaaataaacctaattagaattttctcttgacatgtaataaattatacacggttaaaaaattcttaaactattaaaattgttaaatttaaagatttttttgtttaatttcattcaatttcaccaatttaataattgctcataaactaaatcctaccactccaacttgtaaaatttgtcaaaatagactttacaaatcgaaattagcaaaataacttttttcttttttcttttttt

SEQ ID NO: 27028 - DNA, 2796 bp, Cannabis sativa
tccgcccatgtttccccacccggcagcggttccattgacaagccctatgatcttactattaaacatggtgctcatccaatattggcaagacacgaacgtcgccagtgaaaagccaatcatgaaacgcaccgccgtgtacccgcctgccgaggacacaaacgacatgcaaaacactgttggggcagagagcatgatcagaaaagcacatccatatctgggtcccaaaagatcgcatactgctcccatcacaagcctgcaggagaccaagaaaaaaatatttattatatatttatatttgaaacaaatactagtgttaaaagttttgatatacttgcctagagaagatacttccagagacagaggcaacaccagcgtttccaatatcaaccttggtgagattaaggttgtcacggatgatggggacaagaggtgcagcggcgaatgtggagacgaaacaagtaaagaaagaaatccaagaaaggtgaaaggttctcatgtggggattggccaaagagaagagcttaaacactttagccttgtgttctgaatccactggcaaatcaaattttgccgtcctatcggttggaaccatgggagaagccaccgatgcagcaaaggtttgctctcttccagtgactccatgcatggagcttcctggctctcctacaccttcaatgtttagagccatttttgttcttttccttagtattgtaggaaagaagagaggaaactgatccctatttatattgtttgcatttcgagatattaacttcggcgcacgttgacattgtaaaagcctcccaagaggcaaaatatattaaagattctcgaactgaggaaatattaattataaatttaacataaattacagaatccattacgccgcataggaaagactcgtcgtttatcccaaaggatcacataaccattgaattttttttaattaattgagccaattaaccattaatagtccattcattgacagactacaatatggacccgagttgtattagattagtagtatttacatagacacgtctccaaaatttgcaattaatatcttagtgacattaactatttaattagtaattaatgctgtggttattttcatatcacagctcttacaaaatcacaactggtacaagttaaacctaagttttttaatatatattgatccgcatgtaatggattcacatatgaaacatattcgaataatatgtagtctagtgattacattattgaacctgcgtacgtaatacacaatttaattttttttttttttttttttttgtgttttaagtatatattgtcataataattgttttatatttttaataatttcttaaagtgatttaattactagctaaactcttattcgtaagtccaacaataataggtcaacataataaggatttgcttacatcatacaaatacaatgatatatatgtatcttacaattttcttcctcagtgaaagtttaattatattattaccagacggaccttctagagagtccacaatatatatttaaattcagttaactcttaactgttgaaatgaaattcaataacatttaaattcataaggtcgatcttttttattttttttttatatcaaataaccatttttaacatatgatttttttgggtaaggatgattttttgtatttgatgttcataaaaaaaaaattgtgtatttggtattactttttatatttcataattaattatatatcaattttctcatataaacataatatttgtaaaatgattttctcttgccgtaatatctaaataataaagtagacaccctccttgaagatgctgaaacataacttgcagcgttgcccactctcttgatgaagctagctctcttaaggcagttgacgcccagtgcaccccgcagggacacatgagtttcattagctggaaagctcgtgaaatagggagtaactgagcggtctgaaatgtctctctcttagtgaagcaatgtaaaccaatccttttgtatgttatggagattaaactcttagttggtgatgtaaatatgtttaagaataagcttaagtttcttaataatggtcttgaagtctctagaattggccttagtggtggtttacttttgctgatctagactaataacattgatgtaactctactttcctataaatataagtcattttaactgttacatcaatttctccaataattacttttttcttttacagccttttacggtgctcctaatcattatcatctcactcatacttggcaactgttgcatcacattggtgctaatgttggtaccactccctagctcctaatgggggacttaaatgatccttacaacatctgataatgttagaggtgtttctaatcgtggtccttcatctcaatttagattgttcttggacacttttactcttcacactatccttggatatggcagtccttacacttagagcaacaaataatctcaacttactcacatgcaagaacgattaatttggggcatttccaactttccatgggactctttatagtcccaatttcatctttatcatggtgattactttggttctgatcatcgtgccctcattctttctcttcgtggtcgcactgagaataaccgtcagcaaccatctcatttccattttgacaagacatggcttactgaggatggctttgaagattgcatccgtaatgcttgctctgctcctgttatgcatgttcacaatcctattgaaaacacttcccttaagctcactaagtgtgaatccacactccaatcttggaa

SEQ ID NO: 27029 - DNA, 1837 bp, Cannabis sativa
attgatatataatattatataattattgttgtactgaaaatgaaaatagaaacaaatttaatgattagataattttgattgagtcgcgaattatgtcagtgtctttaaaatattttgtggctctactcaaaatatacacgactgtccatcaaccacgatattcataagataaaataatttatgcatgattttgtccactaaacagaatcgttctattacactccaaaaatattgctctaaaaaaaaaatttaagttttgaagagaataatttttttatgtgtagaaaaagattttaaaatatgttaaaaataaataatttttatttaaataaattacgctatgtgagactcactctatacttctcttattttttgcaaaattcacacaaaagttccaagagttatttatttattttttgaataagttccaagagttattatattcaataaaatgtacaataaagtaaatgaattagttatgagaaatcataggtataatgaatggtgaataagttgataattaaatactagtttggtaggaaaaccagaaaaaaaaatacatatatatttagaagtatttgacaaaaatattatttaatagcgttatgttttttttctttttaaaaaatgatcaatataattttataattggatgaatataataagaaaaatttgtggttggagaatgaatttgtcgatatatatatatcaagaaatttttaaaattatattacttgactagatattatgcaagttttaaaatttataatttatatattataaattattctttaaaaaaattagagttaatatatttttattacttttgtttcctatttcaaactcatattttaaatttaattaataatattatttttcaaatcaaaaactaatcccctattatatatctatttaaatatataatatattaaaatatcttaaaataattcaaattataataattttaaaaaataacttaaataattaattaaatctctataaataacttcttctttctttatgttctttttcaatgtgaacagaacaaaccgttcactccattccactctaaaaaaaaaaaaaattcaaatccaaaatcagagtaaatcctaacaaagattgaaactttagagagatggaagagaagaatggccatgttaatcatcatcatcatcattatcatcctcttttgggtggtgaaagaagaaaaaccagttacagccatggtttatcttcagctcaaattgagtcactttcagccatttgtgaagcttttatacctccaatttcaatggaaactcttaacaaagaaaacccatttcaaaaatcacatctttattactaccaagcttctggggctcaatatccaattcaagatgaggtcaaaatttcaaactcaccaaaaaaaaagtaggattttttttttaactatggtggattctagaattctcattctctgtgttttttttttttttttgggattgagaaaacaggtgggacagttggctgtgacaaaggctctgccacaggctgtgagtttagtgaggacagtactaaagattctgtctttcagattgggaagtttgttgctttgtgggaaactttgtttggattggaaatggccatttattcataagttttgtgaaatttcagtgggaaagagagaacaaattctcaagaattggtctaaggaaaaaacactaatacctctaagattagtgtttgttttgatcaaacttttttgcttctacacattcttctcaagggtatatctctttctttccattatccaatttttattttatttgatgtgcattctaaaatatggtaaataaat

SEQ ID NO: 27030 - DNA, 3158 bp, Cannabis sativa
tcttattctattttatgagttgattgaggggtaaataactaaagaactaagaaaaaaaaaaggatttcaacatgaaactcatcaacattattaataatctaataatctttcgaaattcatcatcttaattagacctttcaacctttgccttattgattcacttgttcctgaaagcttactataagttaaactcttctacaccactagtgatcccaaatactttgacttcttaaacttatcgaaaataaaaagactttttgtcaaagacactcaactatgttatatcaaaaaataatttatacgtaaatgatttgtacttataatggcgtatctttctttgtagctaaaatcaaatgtgagatgtatgagttcttccacaaaaaggaaaaaaggttcttcacaaaaaaagtgaagcttgaagttttatacttgtgtcacaaatcgagctaataagagacataaaataaaaaaaatgttgaataaatgtcaaattttatattcttttatatcactacaaaaaaaaaaaaaaaaacttttccaggcgtaattctccaaaatcgccagcaaaagcatcgacatggggtattacaaaaatttaggtcatccatttgtaagtgcaaattttagctagtaaaagtttgctttattggctcgatagtggaatgtcgcctgtaaaacttggttggtaaatcgccaaaaggtgctattgttttggcgggtttaattacatcggtgctttataaacaaggtgagaagtttttggcaaattactatttttggcgagagcacttttgttagtgtcaaaaaaagtttaaaaatgagccaaatgtgacgacttcacattggcgacttaattattcccagcactataagttgcgggtgtaggtcgctaatgccggggagattgaaaaagcgtaaacaaaaagtctttgccgactaaacaatgtagacagcttttgctggaagtaattgcacattcaatgtatttttatcagcaaaaatttccgctggcaaatgtgcctttactattgtagtgtactttccaccataaacactaaatcaatcactatatacatatagatatatttatatttttaatgacctaaatttaatgtacactaacaaattatgcaaatgttaattaaataccttgtataacaaatacctacctattaacacctaaacatgtgcatgaaaataattagtcattattattattattattataagaattatgtaaatttaaaattataaataaacttcttcaaattatttaaaggatagacaaagttgagaacaaagtaaagaaacaaagcaaaaacattcaacatgaaactcatcagcattgtctcaagagaactaatcaaaccatcttcccaaactcaccatcttaagccttacaacctttgccttattgatcaacttgtgcctaaagtttattatccagtcaatatattttaccccattagtgaacccaaactctttgacctctcaaaaaccctaactagaatgaaaacatccttgtcagaaacactcaacttgtattatcctttctctggaagaacaaaaaataatctatacgtagatgattttcataagggtgttcctttctttgaaactaaagtcaaatgcgagatgtctcagttcatccaaaacgaaactgagttgcataataaattagtcccgattcaaccatatgcaaaaacattgaataatgatgttcctcccattgccttccaattgaacatattcccttgtggtggaattgctctaggaatttctctcaaccataagattatggatggcgcaacattaagtaattttctcaaatcttgggctgctttttctacgggttcaactcataaggtaataaaccctaatctctttgatgcaagtactattctctttcctccaaaagaaactgattttatcaacaagtactcattaataatggatcgatggtttattaaagatgggtattatactagcaagaaatttgttttcaccaatgaaactatacaaacactaatagagatggtcaaaagtgaatgcatgccaaaacctactcgtaacactgcaatcacttgttttatattaaaacatatcatggcaactttttgggcaaagtcaccccatgatattgttacagctagacaagcggttaatattcgtcctagaatgaagtctcctcatcacaatggcgaatcattagatggtgttgtgggaaacttagttggggaagttgcaacatttttcgatcctaataattttcaaaataatgttaagaataatggttatgacataaagctgagcgatttggtgagacaattgaaggaagccatgcaaggatttgaggatcattttctatgtcaagttaagaaaggtggggaagtggcttcatttgagattttgaaaagagtagagcacataagtcttttggataagttagaaaagactaatcactcgattacatttaccaattggaaagggatttttaatgaggttgattttggttttgggaagccatttatcgtagggccaagcttaggaaaactcaatcacccatgttcaaattatgtggtgctggttgatgctgatcgatggggtaaaggatctatagaagcctttattgcattagaagacaaatatatgacattgttagaaagtgatcacaactttttagcgtttacttctaagaactcttaattaatatttgttattataataaaagttatctatatatctatatctaaataatatgtactcagtacttataattaattagcgttttcctatacataaatatatacatagatatctatattaataaaaggttgtgtgtgagttattgtactacaaattaatatgaattagtatcttctactgaattgtttttggatttgtcattaaattctagtcttccctttaactcctttttattacttttatttaagggtttatttaattgaagtattaaagcgtaatccttaaaagggagttagtataaagtcaaataaagttgtaatcttttttcatgtctattctatataaaacagtaaatatagttgtttttcgagcggctaatttaaacatttttagtattataataaatagttacttaaaaatataattctaatatatagtaaaattataaatat

SEQ ID NO: 27031 - DNA, 3478 bp, Cannabis sativa
gtaaatgcgctagtaaaagttagattttagccactacaaatgtacgctggtacctctttaccagcgcaatttgcgaaatgcgatggtaatatcgaactgtactggtaaaagtaacatttcttgtagtgaaaagaaaattcttatcatggggttcttcataaaatggatggcactttgattgtcacaatgtaccactatttcatctgagtttagtcctagctctttagtgaacccttccatccaaatcccttctttgatggcttcaggtccaaccttatattcagcttctgtagatgatagtgctaccacctttttccagttagattttcaattcacataaccaccatatactgtgaaagcgtagcttgttagagatctccttgtgtctaaattccctgcataataagagtctatattgcttgtaaattaaatggttgatagcatatctttactaaacttgataacaatcttcaatgtccctttcatgtatacatattaatatccattaagagctatccagtgagcagtaccatgattcgcaacaaattaacctgcttaccatgatcatacagtagcctaaatatggtctgatgcaaatcatacatgagacttccaacacatgagacatagggaacttgtctcatgtattctatatctgcattggtttgaggtgcctgagtttgagacaacttaaagtggtttgaaagaggtgtgaaaacaatcttagcattgtccatataaaacttatttatgaccttttagaaatagggtttttgggacataaatattctttctggtctctgtcttataatatctattcccaatatcctcttagcttttcccatatctttcattttaaattcaacacttagccttttcttaacactgtctatctcttatctttatattccaataatcaagatatcatcaatatagagtaaaagatagacatgttagctgtaatagtctcaacaataaatctgtcaaactaaatgttccattatctaggggtttgtttgtggccttatagtgatttcttaagaagacatgccttttctggactgcctatggcatagccttctagtggtgtcatgtatatctcttcattgaggattccatttagaaagattttcttcacattcatttgagccctaatatcaaatctagcatctttggccatcagaattcttatggaagtttgtctaatagcacgtgagaaaagatgtcattgtaatcaatttcctttttttcggtaaatctatttgctactaacttttctttgtatatgatcttttcaccttcaaccaactcttcattgtgcttaaaaaactacttgcaccctattagtttctgtccatgaggcctaagaacaactacccaggttttgttcttcaatagagaattcatcttttcattgatgaccttgagccacttagctctatccttgcatttcatggcttattcatagctgcttgttgttaataatttatgaggttatcatgtgagcttgtctctgatctatatggttcaatagtgtgttcacactcataacttatatttctagtggattcatccaccttaagttatagtgtaccagaattgtcatctttggtcattgtgtcttttaatttcatagccatttcgtcttctttgaataccacatctatgttgatcattcttttcttgtcaccatcctctaggcaccataaagtttgtccttttacaccttcagggtatccgagaaacatacatttcagagctcttggttggagcttgtcttgcctaatatgagcataggtaagacaacaaaaaaatctaaagtgttcaaactttggtagacatcctgtccataattcctagggagttttgaaattgagtgcaaaacatggacatctgtttatgagataacatgctattgttgcagcttttacccataattctctacaaaggccatcaccctttagcatgcacctagccttctccaaaatggttacattcatcctctttgtaagaccattttgttaaggtgttttgatcatatttttgtgtctttcaattcccactttcaagcaataattcttaaattcactagagcaatattcaagaccattatctgttatgagcacttttttttctgtattgtttgattctcaatcgctcttctccaattcacaaaggtgccaaatgcttggtcagttctcttcagtatgaaaatctacacttttcttgagtagtcatctataattcttagaaaaagtatgctcctcctatggatggtaccctagaaggacccacaagtctgaatgaatatattctagaaatttatacaatgcacaccattttggaatcccacaacttaaatacacattcttcacagaattctaattttccctttggtttatcaccaaagagaccctgcttgtcaagttcttgaaggcctctttcactcacatgactcaacatgagatgtaatacctagagcagttcaatgcctttgtcttttattgttgcatttactttgctaatgattgactttccatccaaaatataaatgtcattccttatgttaccctgcataacaatctaagatcccttggaaacttttatggattcttctatcttgatggcacacccctttcttgtaagttcactaattgacaacaagtttcttttcaattgaggaacaaatctaacatcctgaaaagttctggtgcagccatcacgcataatgaacatcacaggtccaatgccttcaattttgcaggttttgttgtttcctaaaagtatattcccacatgttattcctttgaagctactgaacaggtgtttatgtggtgtcttatgaaatgagctccatgagtcaataatccattcttggccagattcttgacttgaaacaacaagaaaatatcccctcttttaacaaagctcgcttcccctctttcttcggccttgtcactgttgagttttgtttttaatagattgcattcatctctgtaatgtccccccgttttacaataatatctattcttccatgccttgaatattgatttcgaattggatctctggttattggatttatgcttgaatttcttgtgatcccttttatctgatctgcctttgagaaatatatcttcaccattggaatcacctctattctcttatctcttctaaatttctttagagttcagagtagccttgacctcagccacgatctatatatcttcaccacacaaaatagtgtctacaaaatgctcatagacctttagcaaaaaactgagaagaataatggcttgatcttcttcatccaacttgacaccaatgttgttaagattcaagattattctattaaaatcttctaattattttctctgttctttagtatcatccattctcatagtatacaactttttcttgagatataattgttgagattttatgccctaaataaaactcattacaatctaatatgatttgt

SEQ ID NO: 27032 - DNA, 1592 bp, Cannabis sativa
  modified_base (591)..(596): a, c, t, g, unknown or other
  modified_base (709)..(714): a, c, t, g, unknown or other
aaaaaaaaaaaaatacctagcagtgatgtacagaagctgttggtcgaatcgaaagtcctcgatgctgatatcaactatttggccacaactccggtcgataatgtagcggtagatcttttgcacgtccgacctaaaatcaaggaaatcatcaggatcgccattttttccgtatatcaatggttcgccacatgagagggtccttacaaatatcaagccacaacttgcaaaccatctgaccactcttcaggatttcgatcgcacccagacaagaaagaatcgacgctgtcacgtcgcggggcaattctagccagttccgtacttctttcggcggagaaggagaaggctcagtcgaggaagacgccattgacgatggcagagaacttggcatgcaaaaggggctccaagttcgaaatttaaattggttcaaactaatgcacccttaaaagggatgtactgatgcaccctctacttgtttcgacatctaaaaaaaattttagtttaatttttttttcgttataactatttaagatatcttacaaaattttgagaaattcgaaataatttactaatgttcaaacagtctattttacnnnnnnataaaataaaatagtcacacgtgcaacacactgtttgaacgcaattttcagcgtgttaaacttttccgaatttcttaaaattttgcagatgaaaaaaaatttgactaaaaaannnnnncggatactaaaacagatagagatgtattgatataccccttttaaggaggtgcatattttttttttaagttatatttacacacactaaaactataactacacctcaaaaatttaattacatatttaacttattatttcaaaaatggataaatacttatttggtatcttgtgttttgttaaaatacatacttggtactttatattttgaataataatcaattaatacccttaatttataaaaactattcactttagtaccaaataatttgaggaaaatttagggtgaatttgaaatcgcggctaaactcagtaattttaatttcaaatgtagttcatagatcttttattctttggagatattgagtttgtttagaaaaaaaaaaaaaactcatatttaattttacttgaatgaatttagatatggtttgagtcacaattctattttgatgagattgtgaaataaaattcaaaattacttaagactttgtgtctttataaaagcaataggaatcttatatcttagaattagacccaatactatttgagaaaaaaaaaacatttcataaaagtagttgtttcttctaattgatagtgttcatcattttttttttcctttagcctcttcggctagtgagagtttgagtgccatggttgatcgaaatggcttactcacactttacataaaaatatatatagagagaccttgggggtaatttattaagaaaaaaataaatcgttaaacaaattattagactaaaaattttgctacataactacattttatatataaagatatatattacatttgataaaatagattatttttttcatcacatgcatgcttataaattcatattttgaaagaaaaataaataaata

SEQ ID NO: 27033 - DNA, 3213 bp, Cannabis sativa
  modified_base (950)..(957): a, c, t, g, unknown or other
aagcacttcttcgctaggaagtcacacaattggaggggagtgaccaatgggaagcacttctcggttaggaagtcacacgattggagaggagtgtctaagggctgacacttctcgaccatgatgccacataggttgtggcatagctcttccaactgttagaattatggtactaaataaggtacgcaatggaataataattatctgattatcattgtatcataaccccaaggatcaccatatgtataaacattgaatctaaaatataaattacatgaaaaaaaaaatcaatacatcttgatgactatcaaggtatcctcaaaacttcttgtaattttgatccaataaatttcacaccgtggccttccaaatcgatcccccacacacaaagagtagtgtggggtactaggataaagtgtataatttgttcttgttgaattctcaacacatgagcaaaaatagtttgacagaaaaataattttttcctttctctttgtatttcgaaaatagcagtgtaaaaagcatctactgatttctcaaatcagacttctatttatagtagtatatattcaattaattaaatcatatttaattattcaaataaatatctataatcgaatcgggtactaatatttatgatgagtgttctctcaactacttgagagaatatatcaaccaatttagagagaatatctcaattactttgagggaatatttcaaccaactgacaatatatttaactactttttatattcaaatatttatctttttaattaattaattaatcaattaaccaaaaagacaaaaccatgggacaaccctacaatagggtaggcacctataatgtcttagttaagacaaaaatagtagtttttgtccagataacttttgtcttaaatcccaatttaaattcgaaaaattatttatcacaaaaataaataattactattttnnnnnnnnaaaatagatttttccaaacaacatacacaactctttatccctaccattaacggtgtttcaatgtggcgattcgggggtcatagacttgtaattttaagctccaataaactagattatttattgagtctcatcaactaaataatcatgtttattaattccatcattactccactataaatatgaaattaaactcttagcaatttagaattatatttactgagttttactgcagtgtccattgatataatccattgatataatcaattgatataatcaattccaatgattagacctctttgattagacctctttgtaacgccctaatacttaggcacgctatagtgactttctaaatgcagtgcacacctttgctaatcaaaggattttttcgaaaatcgtgataaattaaaatttcgagtaaactttaaactttataaacatatacatatatttacaagaaactaggatcccttttttaaactttacattcaaaataatatttacagacatgtcgcacaacaactacaaaataaggcccaagtcgtctcaagacggaactctccaggtcgcaccgtctcgacatgtacaatcatcccctgagcttggaactcactgttgttcaactttagcctttcctttacctacacacaaaagtagtatttctgagttaacagactcagtaagaaaaacatataacatacgatatattaccgacttgtatctaggcgcccattcacctatccacaaggcttatcaaatgagtaaaaatattcttgcacgaaggtacgaccactataccacatgcactacgtactgctactgtactagtgttggtagagtctacaccgtatctcgagtaccactaagtgttgtaccacatacactacgtacttaaccgtactagtgttggtaataccgtattatactcattgaacatcatacactataccaatgcattcagtatcgctatcgtactagtgttagtagcataagaatcacaaatagcatgcatatattacacatacacatattcatatataaatacattctatgctagtcttacctcgtttcgaatttcaagtgtgctggtcaacttgaatggaaaatcacgcgctggatggatgccctatgtcacattcacgtaaatgggtaaataacttgctaaactttttctaaactcaaaactaaaagtttccatatcgataaatagcatggcaataccctaaatatcaaggaaacaccaaaattaaggctctacaaattacccaaaactggtagactggatttcttgggtcctgcccagtgaaacagttaactggttctatagtaccaacagaaccggttaaccgattcatagcagaattcccccaaataattcgaacttaatcaatttttccccattttctctcaaactttcctaactcctttactaacatccaataatagtttacaagcagtagcaacaagaaaaatgcactgaaaccaaaagtgccattgctgagctaagcttgagtttcaaactcaaacttgctcaaccaccccttaaactaaccaaaccagtggtaatctattaaattatactcaaaataacctcaaaaatcgtactagaataaaagctaaacctaacagcacctaaaaccaaatattgaatgttataactaactataatttagaaaattcaagaaataggggtttctgaggcttaccttggttagaacttcctcaatcattgatgaattctcaaaaatcagatgaaaaacaccaaagtttcccctggtttatcctcagccgagagagagaaagagagtaatcaagaaactagtttgttctaaatgtcctttgtcttctttcccctattatttaataactaataaaattgtaaagactgcttagctttaatttagaaattagcagataattagagcttaattatgaaaattatttattaattttgaattacttatttacgatgatttatttaaattcagaatgcatttttatgtcatatatagaaatttcataatttttgcatgttttgtgcctgacaataattgaacgcagtgtttggatattagaatcacatcctagtatttttagtatggcggaacaataaagttagacattggaaaggtcgggaatagtagggattttagaattccccaaaatacctcttagtgaccttttatgccttttagtgtgggaggggcaaaatggtcattttgccccattagctgtcttatatgaatttggatttaa

SEQ ID NO: 27034 - DNA, 2703 bp, Cannabis sativa
tatcatgtttacactaaatctattccttataaaatttccattcattttttatttattttttgaattatttataagagggtgtaagagagagaaataatatagtaaatagtaatttattatttattcattttgttgactcaaaaatttggacatatattcacttactagattgacgagaatgacatatgtgttaagtataaatagctagagagacacaataatttgtaatagttcattcgttgcataaagtaatagaactatgtttatttcgaaatataaaaatgaaagtagattttttgtttttaaaattttgtttttaaaaaataaaaatgtgttttataacaatttttgtttttaaattttaaaaatagaaaataaaagtgtgttctgtaatcacttttgttttataactttaaaaataaaaaacaaaaatgtgttttgtaaccatttctatttttctattttaaaagaaaaaaacataaattttgatttttttgcttttttttaataataaaattaagaatatcatttatttttatttttaaataaatatataaaattataataacaaaatcaaataaaaaatacttattagtattttaaaaaaattgaagtaatttgaaattataaaactcattattatctataaacacaaaaccgacaaagtcataataaaatatgaatgaataattgtccaatcttgaataaaaatattaaaaaagttctaattgttaataaacttcactcattatcttcatcgtcaatttgttctccatatatgattagcaatttcatcacggacattagccattttatgaatttgatctcttgaaatgctaaactgatcaacactatcattcaaagtttcgtaggtgatttatatagtagtatcttgtacttaaggaatattttcatctccattaaaatatatgtctttttctgtatttatccttataaaattgcgaatcccacaataggcaattacaatgtatttctgtattctcagtttatacgaaggtatttgttttaaaatgtgaaaacaagccttcaatatgctaaagcaccactcgatgacatttctcaaagacgaatgtcgataattgaacaacttccttttttctgaaggattacaatctgcatattgattcaaatgatatctttctccttgatatggggaaagaaaaccaggcgtatttgtgtatccagaatcaaaccatataatatttcctaaacaatgttaattgatattaaattttcatataaatattaatacaaaataatatcaataaacataataagtttgatgatacttactatggggtttatgacacattcatattctgggtttatgacacattctaaaagaattcgtgcatcattacccgatctttcccattgatcttaaacttctcaatagcatttgcatatacttctccactaattccatcaatttgattgagagcttcaatatactcatccaataagtgatgttttgtcgatatcattaaattcttacatttttatctttcgctttgcggtttcattatacaccgtcaatatttctgccaatgcgagtgagaactttactttttttgccaatcgaaaacttgtagtggaagttaatttacctcttcttttgctaccatcctcatcaaactatttttttgattcctaatatatggactccttgacatagcatcatcatcatcattatcaagatttatagaatgactgttagttgaaggatgagtattagaaccagttgtagtggtattactaaaaattggtcataacttttcataaagtacacaactttttattttaaattttttagctgacttgttaacttatataaaataaaataataatgataaatatactaacacctattaaaaatcaagaaataaattcatttaaaaatattttttatccgaataagcctattccacactttatctggtgtagtaacttgtcttgttgttaaactaaatattcctataccagcgtcttttagtaaagacttgaaatcattgtgcttttgtcttaatagattgtattttttccttaattgcatatcagtgtaacttctcttgatcgcttgtactaaaactcattctttatacgcttttacgattgctttgtaaatgttgtaatattcttattttccttcaaaatttattctttcataagtattaaaaaaatttcttcatgtttttgaggctaaatagaaattttgctattatcgataataaccacctcactatattttcttgtcatctattcaatctacatgtaattacaaaactaatcctaaaatatatatgtaggcatattatttatatatgtgctttgagcaagacatgtcatttcttttatattagtttctttcattactgaatttcatttcgaaaaaaaatctatgcccttagcattatttagtagaatataaaaaatatatattataatgtagtatgatcatatcattattatcatttcttcaatcaaattatatgttttaactataataaacaacaatgattaccaattaatttagcgatttgtgttagtcaaatagttcatgaaaaaattttcttttagcaaaacataattattcctcttataaacttcctttttaattatctagtcaagatttgactagggaaaatttcacgcatttttttattcctttccataaaatgattt

SEQ ID NO: 27035 - DNA, 4592 bp, Cannabis sativa
  modified_base (4552)..(4555): a, c, t, g, unknown or other
agtgagctgcccctctcctactcgcactttccctatctcacctaattgtcctgtcgctgtgaaatcagccccattaataggccgaaagcggcctgcttcttcctggagagaaactaggtctcatcaaggtcaaaaagggcctgacccacatgatgattttctcgatactcctttggagaacatcagaggaaacctaaacaaatccacaagggaagaggaactttgcaatgcccctgttccaagttcaaaagacatgattgttgatttttcagatgatgagacgcaggatatgactgctgatcttattcaacaaaagcagcatcagataccacttccaaatactggggataaaggtttcaaatttgtggagcctgtaagaaagaaagcggagcgggagaatttgaaaggagttgaatgcaagcaatgtaagaagttctatgacgctgttctttgcaatgataaaggcgataatgctaatcataattttcgctgtgaacaccatgatggtgtttctaggcatcggtacaagtatgttcctcctatgacccctgaaggattttggaatattggatttgagtcagaaatgtaaattcttaaaagaacttctatttgagcggcaaatggctttaatatgacaaattaatttttctagcttcatgggaattagggaataggattcatgtacctcctaccagtaccgggtacttatctgaatgagtgaaactatttcacctgttcttaaccccctactgcaatgtgctgagtcaaattaccttgtcatgggtttaaactaaattatttcaggagaaacagatagtaataagttaagatggtgttttgataacaaagataagagagatgtttgcaagaaaaaggcaaaaaaaaaaaaaaaggaaaaatctgcacacattcaaaatgtttgtaaagttaacattaaatcccataatcaaattagaattttatacaaaattcaatcaatgctctcagttgaattgtaggcctcaaactgagaaaaaaaaaagtgtctacaccagttagctgttagtacaaatacggttttttgttttgttttgttttgtttttttttataatttataaattattttatttgatttgtacaaagtcaaaatgattagtgtgccaagttccaaccaatccaaaatatttttggaagtatatttgtgctgtctgtatgagtggggaagaaagaatgtttgtgcagactcataatgcaatgcaaactcatttggagtcttctgttcgtggatttcaacgaagtcacttactcctattgttacctccgaacatcgattctttctatgttttgctccttcaacttcaaatctctctggatcatcttcaacatctttcatagcctctgccattaatgctcaagctttaactgtagaagagtacacattaatccgccactgccaccttaaaatcccttgccgaccactacaaggtaaaggtgactaacgctgtagcttgttaatttatacatccattcttatgatcaattactatcaagtttttcattttttctttatatggttctctcagacatttgatcaaacacatacatttggagtggtgcacagcagagtgactactaaaatcctcggctgaaactccaacggtaaatcttctacttaccaacaagtcattattgatggaacaccatgttactacatttaaggactttgagagcaattgataaatttcactggaaaactagttgatagataatttcagttttttattgtgtgcaaaggaacccactggaaaacggagaaaactatgtctatatcaatgtgttcttgcctctcaattgggatggatctctctcttgtatttttttgtatctttcagtagttccaaccatagctctgttgtggatgcagtgatcagtacagcaccctttgataagataatgagccctgcttctcagtcgatcttcttctttttccttggaggaataatcatgcttataatagtgctttttctggcatttgtctttttgagaattattaaaccaacagacttgaagaagttcgtcaagcgagccaaaggacgcccaggttgtgatattgtataaattttgaaatttgattagtaccttgatgaaaccgaaatgtcaactaattatgtattcaatcttgtttagcagtgtccacagatttgtttaccaggaacctccgaacaattagcatatttgatttccaaacattgaagaaagcaaccaaaaattttcatcctggaaatctccttggaagaggtggatttggacctgtgtttcgggtactaatgcagaatttgttttatttacttttatattctctggtaaattggagtactctttctgttttcctaaagtttaaaccttcccaattttccgcatgtaattttgaatggaatgttaatagattttctacaaaattcccaatgccaaaaactgaaatatttataaattattgggtattgcaattataatacatctgcatttttgtttcttgtgctaccttgacaatctaaagcttagttggcaaagaattctttatgagacagaatgatgtagctacaggtactacactcattggatattccataattctcttgttcaagtttccaaagttggagaacttggaaatatatactatttagacattggttttgattgtgggccaatgtatcgattacaatatcaatttgtctttttcatacttgttgaagagtatatctcttatgttcacaagaacagattcttgggtttataactcacttactaaagtcctccctactgcttcatgttttatagggaaagttgggtgatgggagattgattgctgttaagaagttatctcttaacaatacccaacaaggagaatcagaattcctttctgaagtgagaatgatcactagcattcagcacaaaaacttagttcatttacttggatgttgctcagatgggcctcaaaggttacttgtgtacgaatacatgaaaaacaggagcttggaccttataatatatggtatagctatcccggtttttcttcttttatccatatatttattgatatttagaaatcaggactattccaattctgttgcatattttatttgaaaatactaaaactgaaagctgaagaaactggtattatacgacgcttacatttgttattcaacacaggaaaaagtgatctgtttctgaactggagcataaggtatcaaataattgttggggttgctaaagggttgcagtacttacatgaggactctcctttaagaattatccacagagacattaaagcgagcaacattcttcttgatgaaaaatttcaaccaaggattggagattttgggctggctaggttctttcctgacgatgaagcttatcttagcacgacatatgctggaactttgtaagttctataaactaaatactatgctataatattaggacatttgataacttattgatagctggaaccttctttgggtaaatatagggaaatcccataatgaaattagtttgtatttgcttctcgtctgaataagaaatggaaattgcaaagtttgttaattcgtaaaccaaaaatcataattcttcattcatcatcaagcaggaatttctgacatgacccgtggtattaattacatccaactactatatcatatcattcttgtcattgttatttcttcaccatatcaattgtagcaacctttcttagaaatagcatgctgctagttctagtaaaatcactataaattgaaggaacgcttgtatcatcgttgtttcttctttgttattctaagtaaaaacattcataagtaccgtattgatatgtctacactacaaacataactagcaaagttagcttatacaatatagagcattttaatcagttttaaataagtgtagaagcctatgatatgtgactgtaatgaaatcagaaatatggtaaataggatttatctgatttgaatttgaagtatgaattacatattagcaagacaagaagaccaaaagggaaacttgatgatgttttatccatccaagaaccaggtcattaataatgtgactatttaataacctataaataaggttcgattttgttgtcgaagtggaaaaaaaagggcaggtggttgtgtggaataatcatacaaggatacttaatgcttagacttgttatgctgaataaaaaagtggtttgatgaataattatggaacttctgtgcttgtgctgtattgatgattaaaaaagtgactaatctttttcgtgatagggaagagccaagtaaaacctaagaaacaaaattattatttgtgcttgttttgtattgatgataataagttctcatctttatattatagtgtttggtaaattataaattttaaaatatgttaagtgagaatgagaatgataatgatagtaatgttataatttattttattataatcacacatatataaaaacttatgttatataaaaatttcatttttttatacatttttaattattttttttaaaatataaatttatatgcattnnnnaaaaataatttatagtatttttaaattatatttttat

SEQ ID NO: 27036 - DNA, 2532 bp, Cannabis sativa
tggacaaaatttaacttatattttttgttgttcaaagtttttttgttaactgttgagacttcacatataagttctaatttactctttttacaagtatttggcatgatgtttcttccaatatgaaattttcgtatcatctttgaatattttatactaatctatttttgtttttgtaatctatatgtattcttttagtgggatggaatagttaagatgattaatttttcagcaacatatttcaaagttttattgtccaacttttttgaaatatttttgtatttacttagaatagacaataaattttattgtatcgaaaagattcttctttccttcagtaatagctctttttaacattagggtaaatactattttgaatcttatgttttgtaaaagttactgattgaactctctgttttgttgaataataattcagaccctgtatttttcaaatagtacaaaatagaccctgagtataatcttgtcaaattaaaatttaataataacctgacttgaaagtgttataacaagactagttacattgttttgtatctattcgtggtggaaactggcttcaagttggttatattagaaaacaaattgacgaaaatttttagagtctattttgtaccatttaaaaaaatacaagttctaaattctcatttaacaaaataaaaaaactaattaataacttttacaaaatacatagtccaaaatgatatttacccttaattttattattccaattcaccaaaaaaaaaaataataatattgtgttccaattcataaagtcaaagcagcggtgacaattgaatagcaggttccttgaaccaattgatgaattccaacatgtatcttgtagctatctgaattgaatatataacaacaaccctaactgatgtggataaaaatctgacttctttatggagttcccattgacaccaaactatacttctaatacttttttttttaatcccaggcagtttcgttaagcaaaaatatcctcagtaacaaatgtttgttcactgttgctacaatcttcaacaggaaattgaagctgctcatagtttagctgtctggaagcctcataaagagctatgccaacactaacagagagattgagacatctaacataagtttcaaccattggaattttaacagtccctccaccaaattcttcacttttgcagtcttgcaaggcctcatttggtaggccgcgggtttctgaaccaaatatgagataatcacctcttctgtaagaaatttcctgaaaacaattaatcactaccaattaatcactatcactgtctaacagcatatagcaaaaagctaaagaaactgttcttaaggtccttccgttttgtattgtgtattccatgctgatcttaataagcctattttactatacgaatttattttcctgtaggaaatcttctcctaccaattaatcgctactgttttccttgataaataactactaacttatgagcaaaacatatgctcatgagtatttagaagaaggttagatacataacccatgtgtccaataagcgatggatatctgaaaagaacattcaattcttgaagttatgcatagctttggagtactgaaagtctgaaacttaagtttctctttgaagttgagatgagataaaagttaagaatcagtcaaagtacttgcagccggtacaaatcaaacaaacgtgattaaatgaagaaatgaaatgttggtactatgttgaacaatggaataagctgacgatcctaaatactgtaaataggatggcaaattaaaaacttacagagtgaaggtttgttcctctcttggtaaatgcaagcaaccgcttttccccagcctgtatgaaagaaaagaccttgtcaaataatcaggagttcaaggagaacagacgatatcttatatttgctgtccaaaatgagacaaacctgttgactgaaatagagcttaaaatcttcccatgaattgtgaacttttacaacaacaaatctagcattaaaagttaatagcagaaaacacatagttgtcatttgatataagaataaaagacattaataaggcagtaagaatacaatagactgcttatatcttatgggaactataatgttcggaaaactggtttagtttaggaccactttacccagataaaagaacaaatcgaagaaaaaatgtataactgaaagaaaacaaagaaagaaagcttatagatatgtttcacattttatttgtatattttggtaaatttgacaaatatctgttgcatcttttaaaaatccttataaactactgtgaacttgaaatctcataatagagacttatataagacgtaaaaatgtaaacctgcaaaataattactttcatgaacaaacatgtaaaacctataaacaaacatataaaggatacggccaataatccaaaccagcacgcttcaattttgcatcatctatctgaaatcctaatggctgaaaaagaaacatgtcaaacagccaaaaatgttagcaaatagtcattaaaagaaa

SEQ ID NO: 27037 - DNA, 2233 bp, Cannabis sativa
taatcatatatgtttcagtttatacatataaattgtctaacagtcttttattaataccaaattttcttgttttttttttcgagaaatttttccattatacaagcagaatgtatggcaattgtggtcgttgctgattggattatttccttagaatttgaaattaatattgttgaatcagattgtttagcaattatttctgcttttaatagtagtcatgtttatcttaatgactttagttctttgttagaggatgttgcaagtttgttttgtagatttccaagggtgtctctaatctatgtacgacgaacgaccaatacggatgcacatggattagctgtgcatgctcttcgaatggatgaacaaattatttcgctaaaaaactttccttcctttgtaacttctgtttagtctttttaaaacattagttggcttttcaataatattaatcattgtttgaagaaaaaaaaaagtcaccaaagtgcttcttttttcgtttaatatttgattggagtgagcagacgaatgaaggttaatgacttcctacaatatcatctcctacaccctaatgaaacccagaaattatatatacacacatatatagatatataacttagatccgttcttggaaattatagataaatctaactaaaatatatatattgtcaagaacaaaatttagaaatattttgaagctctcattagttgtatacatacacgaaattacatcaatatcaaatatttctggccaaaataattcaacaaagagaagttttataaaaatgaggaaactgtacaggagtagcagagtacatccacttgaaacaaaattcttaaagtacaaaaagtaaattaatgagaacaaaatctcaattaattgaagaaatataaaaaaaaaatggcaaaagctaatttcagggcaaaaatccaacgaagggaacatgggcagtactctgtaaagccgaatttcttgaggaggaagaagacggagacgagttttgatgaatcacaatctccaccgcctcagccaccacgatcacgaaatctattgccattttcaccatctctatacacatttccagtctttgaatcaccatttcttctttatactttgtttttcttttctttcttctccttcctcttcttctctccccctttatatatatttatttagtgcgctttatgagataatatattattttttatttatttcccttcttcccttttccgacgactgtgctccgcgtcgcaagggcttatccagaacttgaactttttctttttcctttatataaaattaataacggactacgttagtacatatatagataaaaaatgaataaattatccataatacgatctattcacaataattttgaaaacgacccttgcttattgtatttcctaaaataattatatgatatatattaaaagataaagatggcagttttgaagagttgtagatgttctttggtaaaatggcccttggaaggctccaaaggccaaatctcttgtgtctaattttatgggcaataagtgatctttatgtgtatacatatatactactttggttgtttgttaaagctagatatattgcaatttgtgtggtttaatttgttaatcttatttttgttggtgtttaatttgttaaacttaaatatgtattgcaatttgtgtgatttattctagttaatttggttggtgtttgatttgttaaagttaaatattgcaaattgttatatatattttacttaatttgatagttgttcatttactgacgtcatgaccaaaccataaataaattaaatggtttgtttttttttttaatacataaataaattaaatggttaaatcactaattttacaaaattggttgcacctctttgtttgaggtatctttattgttccgataaactaatgggaatcttaattgtttgcttgagagaaaagatttagttaatctttattttttacgttcataattaaagaaatatataatgaaataaaagaattaagataatgtttttttgtgaagccacgtgtgcttagctttttgaaaagagttcccgaacgtagaaacttcattgcaaatctgtgatgattcctacatgcttgtaatttgttcttaattatgcatgactcatcacgcatgtgatcataaattactattaaaaaaaacattgaaggtgcctagcacttctagctctatgatacgatgtttttgttttataattaa

SEQ ID NO: 27038 - DNA, 4999 bp, Cannabis sativa
gttgctaatctattttactaatctggggatattacaattatcccctccttatagaaattttgtcccaaaatttacttgaacaactcgggatatctctacctcatgtcaaactctaattcccaggtcgcctattcgaccttactgttatcccgtaacactttactaacaccagtgttttgttccttataactttctctcttctattgagtatgtacactggttgttcttcataagacaaattgggctgaagttccaaagctttgtagctcaaaatatgagatgagtttgacacatattttcgaagcattgaaacatggaacacatggtgtagagttgctagcgcttggagtatagccaatctgtacgccacttgccctatcctctacaatatttcaaaaggtccaatgaacgtcaggctaagttttcctcacttgccaaagcattttactcctttcattggtgaaatacggagaaataccatatctccaacctaaaagtcaatatccaatcactttggatcagcataactcttttttctactctgagcaataagcattaagccccaatcttattaattgcctcacttgtcttctgaacagcttcgggacccagaaactttgtctcacctaactcatctcagtgaatatgtgatctacactttttgccatagagcagttcataaagggcccgaatagttgactgataaatgttattataggaaaatttgaccaagggaaggtactttacccaagatccctcaaaatccaacacacatgtttgtagcatgtcttctaatatctgaattgatctttcagattgtccacctgtctgaggatggaactctatgctaaacttcaattgtgtacccatagctcgttgcaaactctcgtagaatctcgatgtgaactttggatctctatcagacactatagactttgaagcaccgtgaagacaaactatttctccgacatataactcagcatactgatcaatggagaaattcgttcgtacatgcaaaaagtgacctgactttttatatctgtcgacgattacccacatagaatcatactcccccgtagtcttaggtaatccaaccacgaagtccattgtaatgtcttcccatttccattctggtaagttcaatgactgtagaaaccctgtaggcctctgatgctcagcctttacttgctgacaagtcaaacactttgaaacatattccactatagcattcttcattccttgccaccaatacatggctttcaggtcctgctacatcttgttcgtagtaggatgaacagagtaagaagtagtataggattcatctagaatctcctttctgatatcagcatctattggaacacatacacgatttttaaaccgtaacataccactgctatctatagtgaaatctttaactttgccagctaatactttgtctcaaatcttattcaactctggatctttatgctaagcttctctgattctttccagcaatgtagagtgtaaggtaattttagctagttgtcccagaacgaactcaatattagcctttatcatctcatctaccaagtgctttgaaatctacttcaggttagtcatttttcattgacccttccagctcaaggcatcgaccactaaattggcctttctatggggataaaagatttcacaatcataatccttcaccaacttgagccatcacctttgtctcatgcttatcaatacaccagagtttcatcaattaaaactatcacttgattatctagaaaatccttgaatacttggttcattaaatccatgaatgctaccggggcattggtgagtccaaaagacatcactagaaactcataacgtccatacctagtacaaaatgcaatcatcaggatatcctcttcttgaattctcaattgatgataactagaacgaaggtcaatcttagaaaagatgatcttacccttcaactggtcgaataagtcatcaatcctgggtaaaggatatttgttcttgatagtgagcttgttcaattcccagttatcgatacacatccgtagtgatccatctttcttcttcataaataatattggagcaccccatggtgagaaactcgatttgatgaatccaagatcaagtaactcttatagctgaatctttaattcccttagctctgtaggagccatttgatagggcgctttagatactgattctgctcccaaaactaattcaatcacaaattcaatttcctggtgaggaggtaatctaggcaaatcctctagaaatacatctagaaactcacacaccagcctggtacttttaggtccagttgtaacaggtcgtccagtatccactgctgtaaataggaatcctatgcatcctttgtgcattagttctctagttttcaaaattgtaattctaggtatgcgtgatccttgtaccttttccacaaacacagatgtaatggcactatcaggttcaaacactaccatcttctgtttacaatcgattgttgccccatgcttggataagaaatccattcctaaaattatatagaaatcagataggtataatttgatcaggttggtggttagtcaatctaataagacaaagatctgatccacctagtagacatcatcatctccctaaatggtaacaaggttccaaacccaaaagtataaacactaagaggtttaagaaaacttttggtcactctacttgacacataagagtgtgttgctccagaatcaaataacacaatataggaaaatccattaatagttaattaacttgtcacaacggatggactagcatcagcgtcagtctaacttaccatgaacaaacgtcctggattttgattgttgcttttcttaggttcttccttctatgcttggggacagtctctgataaagtggcccaccataccacactggaagcatgttttggccaggtattcaccttgatggtgtttcttacatttaggacacttcaggtatgattgaatgtatcaccacaactttgacggccgcccccgaaacctcttttttgatctagatgatctggaagtctcaatttttctcttctgatcaagaatactaccaccagtccccttattgaaattaccaccagcacttggaattgatgttgtaccaacatccttagtagtttgtttcttaatttattgttcaacctcttcggcagtcagtgctcgctctacaactttctaatacaaagtgtcgtgattagtggtcatcttcaagtcccgactaattgctgcatccaacccagtaatatatttttgttcttaggtgaaatatgttagtaccaaatcgcagtcaaacttagacaagcgatcaaacaccagtgtatattcagccacttacttatcaccttgaactagtttcacaaaaccctccatttgagttgtacagatggctatgttatagaacttttcttcaaccaagttcttaaattcttcccatgtcaccgtactaaggtctcgagattgacctactaaatcccaccaggtgcgggcatgctcttgaaacatggaagcgacatagttgacccactcatttcctagttcctactacccccatattatccaaaatatgagtaatagtactcatccattgttctgcctttataatatcaataccacccaagaatgttggaggttgcagcttaacaaaccgctcaaacactgaatctcagtgtggttgcagggctgatctagggttggctaccacgggagcaagagctagaggaatcaattgctctacttgagctgcctaaaccggttgcataattcggtgcaactcttgttcttgacgaagtataatactttgcatttcagtaaacaattgctggcagtcggcaggaagattaacattattcaccctcgtagtattcccagaattatgtagatgagcgggcggtccgggtggattggttgggttatcaccccgctctacagactcaccctgtgatctagttggttcttagggttccttctttcaaataatcctgaaatcaacaatcctagtgagtcaggcaccgattccacacttacacacgtcatgccaaaaccctaattaacacacacaattctctttgccaaatatatcaattattatttacatttaataatcatgcttttcattatatatatatatcttctagatgctcatacgctgcctattactaaaagtagtaaacatttattcacataagcagataagtatttactctcaacacttactgtaccatgagtcgagcttatttttgacgatgattgtacatgttcagccagtcttcaagaattttaaaaaccttggtactctgatacaaaattgtaaacgtcctactcagaggaatgccacgtgtcgtgattacaagctactaatatcattaatcggggtctataagccaggtgatttaaaacaaatataaaacttggttaaataaataaattgcaataaacatcgacattttagtataaaccaaaataatttaaagtgacatattcgggatcccgtaaaaatttatttttcaaatattacaagttatttattacatgccgacctaagcgacaaaatagaatttctatactattcctgttggacccaaccctcgtggtctagcttagctggaacatgtacaagtcatcctcaaagtcctcgatctcatggttgacccgacactactttaccctttcctgcacagtagagcacccgtgagcctaggcctagcaagacagaaaaaaaagacaatatgataattataataataattatacttcatacattacgccactgcgtatatatactgagccatcacactttatattaaattattatatataataatgtcattataataaatgcctatgccatacagacctacgtgttacgctcacacgtctttttacatttaaggccttacaagagtttgtctcggttataatcaccaagtctaacctagttatgtctgttggaatttattttac

SEQ ID NO: 27039 - DNA, 5342 bp, Cannabis sativa
tatctgcctcccctagacaggaatccacatttccacccatcaagtcttttagcacacttctccaaaacaagatcccaaaaaactttcttcctaggtgagcctgccaatggcatttcgagatacttcatcggccagcagcccacctcgcatccaatttgagcggcacattgggaaacaactaattcgtccatatacagacccaacagttggcttttgcttaagttaactttaagtcctgataaggcacaaaagccttcgacaatcctaacaagctctaaaagggattctctatcattcacaaaaagtaaagtatcatcggcgaattgtaagtgactgacctgaattttatcttttcccacactgaacccagataaagaaccagaattagctgctttatccaccattcttcccagtatatcagctaccaaagtaaaaaggaatggcgaaagagaatcgccttgtctcaatcctcgagatgctctgaattttcctcttggtctgccattgacaaaatagagaatgaagtggttgacacacatcctctaatccattttctccaagtacctccaaagccttttttgtgcagaaccaaatccaagaagtcccattcgactcgatcataagccttttcgaaatcgatcttgaacaccataccacttttgcccctgcttctataatcttcgactgtctcattagcaatcagtaccgaatccaatatttgtctcccctccacaaaaacagactaagtgtctgagattgtgtctcccaaaatatactccagtcttatagcaagtgctttagcaatgaccttatacacacttgttataagactgattggtctaaagtcttttaccttacagctatttagttttttaggaatgaggcaaataaaagtttcattcaaacttccttgaattctaccttcaacttcaaaagccttaaagatgtctattagttcacctttaattacatcccaattcaactgcaaggctgccatgctaaagtcatccggtcccggggccttattaccatcacaactaaaaagagctcttttgatttcatcttcatcaacgggattttcaagcagacgagctaaagattctaagattttttgccattcaatcccttcaatatctgccccttgttttctctcagatgtgtacagcttggagaagaatgagattagctcgacgtcattcttaaaagtcttctttttggaacttcaccccttcttgagtcgcacaaagcaattgtctccattaaatgcttctctgtcctaatttcgaaaaagccttcttcctcccagaggtcgaccggcgaatcctcttttgccattaactccggcgactttaaaagatgagagttcctacttgcgaacccaccgattctgattcagccgattgagcagcagctgccttctcgcactccaaatacaaccctccctccattacatcttttgtgaccaccttatccctctcttcttctttgtcttcttcctgaaagtctaactccaattcatctgaatctctgccaagggtcgagaaccccagtaactccccctcttgttctctaaaatccacccgactttcattatcctttctagttttgctgatattctcagaatctgagatatcacgaccatctttctcttcgatcaccttaccaatctcaaaatcttgatgccaacaagtattgaaaaagccactgtattcccagtcgtttagcttaaataactctagcttaattactgatttttcaaactcaaattgcagaaattttgggacgaaacctttgttgtccccttcgagtttgattctcagatgattgagaaaattcatctctgctgtgtccttttctacgtctaacagtcccccacacaagtctccaatttttcgcattagtttcatgttccatagattcaagggtaagcctttgacccgtatccaagaaccacggcattcaattttgatttctctattttgctcctccgctgaccatcttttaaatgagactctggtgtcctatgtgccagggataaaccagtttcctatctccacaaaattctccacctcattctcgttgttgcaccaaatgattactcgatcatcaaacaattggctcacttgcaattttctacccaattctcttgagagattataaaaaatacagctccatgataacccactgttgtctctgaacataatgacggccttcttccagtctttttcacattgtttagcatgcttatattcatgaaaattattctgcttcattcttctaaatgggaactcgttttttggtctaaaacttccatttactttaggcagaaagtcccatttttccaatcctttaatcttcctactagggtgtttcacaggggccttattaccttcaacgttgccttgctctgtttccttgtgcttcctgttgaactgaatcgctttgggggcattcttcaatgagttttttacaacatttacccatgtatgttgttttgttgcatcccacgccaacttttcacctctgtgctgccttggaagcgcttgatggttctcaatcttccttctcgtgactccgtcttgaaaactttctggctttcttttaagtacaccaacgagacattcatataggtcagaccatcctttagcttctacttcttctgaaataatcaccattttgactttgttattctgcaaggttgaaatctttaggaaagctcccttagagttatcgaaacattccataaaataacttccactgctgaatctgaagaatcttttgaaagcaattctttgctgtccagcttctttttcagttcctccatgattccaagcatccagtctgctgcatcgattgttacccttatctcgtacccaaaaagtcttgttctctcacaaattctaaccgatcctccatcctttgacaaggtgatcataaaggccttgtgtttaatgtgaaaactccaatatttttggattttctgatcacgatttggatcaaatagttttcccagccaacaccagtggggtgagggccttttttcatcccaaaaccagtggggttttggtgttttccatgaccagaagggccatggtaaccccccatatgcatcactaagtttctcagaaagaggagagagaagagggcatagggaagtcaaagaggcaaaggtttttatgtaattactaccagcatcaatttacttagacaaaagataatttctttttttaaagttttagacataacataattggggagagtaatgacctattggaagcacaacgtgctgaaatgcgaaaacataatcattatcaccaactcccttgcgactccatggaacatttacgcagaacccttcagcccccatggtaccaacctgaagaatatgaagtcactcccaatagttataatccaaatgaatattctgcataaggtgctcatataatgtctactcatggaaatgttaagtttaaactaaaagtgtagaaatataagttttacaaatgaaaaagatatatatgtaaatatagcataatataatatattaataaaattcccacaaatcttcaaatccttgatgttacaaaatttggtttctaatggtcggtgtaaattttgtctaacctatttaaatcccatggatacccatgttggtatcccataaaatacaagcttgtaaactgatgggcctcccataagatttacttatttgaggatagaagaagtctttaagttgttgttattagttttttgtttagtggcttattgtgtgttgactgctattgttagtttgtttcaggctgttaggctgtaaagagagtatagatagtttgtaaccaatttgtagaaggggtcttcggcactaaaagaggggttttgagtaagaaagaagaggtttccagttattggttgagttctatcaaagcattaaatgtcagaaaattaacgggaaaacaaaatcgtaattccggagcaaattatagataaaatgacaaaatgaattcctgaaataacctatccaggtcaaggtccattaaggctccaagtcagatattgtcactctattttcttaggttgtatacgtggctgatgaataatcttagaaaactacaacttgtttgcagagaaccagtttaattaattaaagtaaagaatagtaatcagctatctttatcactatcctggaacaataaacaatacaaaactgaaccaatacctcatcagcagccccagtaccaggataaaactttcctccttcatgtctatgtaaggatatatacaggacctagaaatcaaggcaaatacatcagcattggaaaaatcgcaggataaagaatacctccacaatttttctattatttgaataagaaacgagattgtattaaaaagagataatgggaattcatctgtattacagacaagtagctgcataggctgtccacaatttcttgatatactatatttaaataaaagagctttttccatatgcaagcaataaagacaagtttaattcaatgcatacttaaaagtggtagttgtgtaccaaattatcccacgatagagcagtaatatgaatacacacttacacagtacagtacagatattgataatattaatattgggtgtcttattgccagcatcaatacaaagaattattttattgtaacaacggttttcctccgccataagtgagggttttcatatttataacggggagaggtcagtcaaagaaaagtggccccttttcaaaaaaaaaatattgggtgcctattgccctatcaaagtacttgcgacagtcataaggtccattataaattagcttattctccatcccaaatacataagtgacaaaccaacaccataccaccacctccagtaaatcatttcaatggaaacgaggcttagttaaaatgttgatgcacagaaggatcaaaattcaataatagtagtgctcaccgatttgttctggtcaaatatctcttgtgtaccatttccatggtgtacatcctgcaataacaatagccaaaattagtcgtaaagcaaaaccaaaagcaataatatcagatacataatcctaaaaaattcaccaagtgaaatggacaatgcagtgagcaatgagttgttaggcgattagtatgatgagctagagtatagtaaataaaaaggactttgagtcattgttttgaggatgggtttgttgtgagtgagaatagggtctatatataggtaagtaagaggagaaatgggggtatgcaatgtattgagtgttcactcttttcatcaaaggggcctaaggactccaatagcttgtaattggtaattctcctattttcaatataatt

SEQ ID NO: 27040 - DNA, 4573 bp, Cannabis sativa
aaaaaaaaggaaaatatagatatcatgagcgagcgagtgagcgagaatgatcttactctaacaaaacaatcgtgtgcatacgaagtaagccagcagtaatggtaggatctttcgcaaatgcttctttgacaacttgttttacaatttgctcggcattagggcaactctttttgtagaaattaggttttagttgaccaaaaacacaataaggagtactcaaaataacaacaaagcttattaaaaagatcaatgcacaagaataatgtgtattcttcctcatgattatgtatataatttctatataacacaaagtggggaaagctagagattttatgatttaattgtgtttggctatatcatcaaatgttgagagccagctcttatatatatagtggaaaagattcattcatgatatatacgtacaattaatggtagggccatgcacgtgaaagttaaaagaaaatcaacaatggtgggtatatagttatgtataaagaatattatcctactcaaccatgtgatgtagtgatcttatatattatttatttatatatataaagtcggtgttcacatacaaatacaaaatacaaaatatatgggtcatgtcttccactattaccaatttagtacgattctttttctctccttatttatttatttattttttttaatttttaagtattaatatatactacaagagaatgaccaataaaatgtagggaatatacttacagaaatttatgtagtacataaaaataaaataaaaggattgttttggtaaattttttatctatttcggtatttagaaaaattgtagtctattttttttttttttataatcaatatgttgtagttatttaaaattagctgtaaattttttttaaaaaaaattgaataatttatagtgttacaagtaaggtttaaacaattacctaccacacgtataaaaaaaaatagttgctcatgtaacaaaatatttaaccttattttcagtattacaaactacttggaattttttaaaattttttaaataattttaaataactctactgtataaggtcacaaaaaaaattaggctaaaaagttgtactgccaaaacaaataggtaatatcctgaaatactcctttaattaggaggtgcactatatagactaatactctatacttatttggctcaaagaacaggttaatacatatttagtatttttacattttgaaattgtatatattttagtaatctaaaatcaaatttgatctttgactaaatttcttgattatatgtaactaataaataaattttaatttgaaactcatattttaagataatttgattatatatattggtaaaattttgttgataaaatctaattttatgatacaccagtgatttcaaaatacaaaatacaaaataaatattattaaaaatacaaaatactaaatttgtatttagataaaatataaaatattaaatgactacaaattctaatattaaatgtatatatattaggttattattacgtgcaatacatgtatatttaattatatttttaatttttatttttgttatatatatattttttgttaacatcatttttattataaaatattaaatccaagtgctatttatcgaaaagataataatatttaaaatttgttgttaattatagttttagtttaactgaatatatacttttaattttataattgaaagatatttttttggtaaaaggttaactacaataggtaacgacgtccactattgccgacaattttaacccgtttgtgtggtaagtttaaattaaaattttaattttttttttaataatattttttattatatagccacatttaatataacataaatatatattatattatatttatggggtaggttcaaaagacacactctactatattatatatattgagttatatgctaaaggcaccagtagtaatatagtacttttttttggtgtcatattgatattgatacgattaagaatcggtcctttaaaataataatttttaaaaaatatcaattaagatgccatctctaagtacgagtgtctttatactatttatttataatattgatgccatctattatattatactatttatactagataaatatatgagtgtctttggttggggaactgttatgatatttatgataaattattatgatcgaataatctaggtttgggcataatttgaattgtgtgagattatgcgactttttgagtttctaacgtgtggaagtacatgttgtccataaaaccatttaaattatagttttattttatcttaaaaaattaaattaaagtatattcaaatatgcaattttgataaattttaaaaaagacatatatatatatatcaaataataagaaataacataaaattatttattttctataacatataatgtataacatataatgtgtatattttaatttttttttaaaaaaaaaattatataaacttaatcttaatgtataatattattttaattattgatttttctaaaatttatatttatattttaatattattttaagttatttttttttaataaggtgtgatttaagtttttttattcttaaacagattattaatcttaaattaagaatgtcaaaaattataaaatacggaagaaaaaaataattagaaaaataatttattaatgtgcccaatttttgtacttattaatttttttaataaataaagtaataaatgatatagtagtaattagataaatgttatgtttgtgatttaaaaaaaaaatgtttgaatgaatctttaaaatttttaataatactaaaaaaatagaaaagtcgtatatagaaaacatggttatgtgaagtgtgactataggatacacatatattatataatatatgttatgatgattatgtgaagtatgactaggatatacttatccaataatttttttattatgatctgttataacaagttattgaaaaaaagtcttattagatattttaattaaaaaataatttattttaaatatataattaatttatatataaaaataaaatttttacaatagtagcctgtttagtaggtcatataaaaatataattatcatacatacttacatgactaacatattaaattgtataactacaaacaatattatcttaaaaaaattgcttctaaatatatataaatatataaatatttttgagaagaatagtctagagaatataccacttttagagcaaattgctaaaaaaagaaaatatcaataactaaaaatatcattgattatcaaagcatcaactattaatatggttgggatacaatgaaacaaaatataacttataactataacaattattagtagtatttagataatagaggttgttctaatctagtttttgtaagtatatgtatttattcacaataaattataaattttttgaacaatacttttagccacatattttggatccttttttagtaactatagcatatgctcatgaatcttaaaaaatgtacttatattgtaacactaacatttattaatattattgatcaaattatagacttatacatgtgcaaaacaaactttattaaatatatggagataaattattaattgaccaaattgggaaaaatataataaattaaagtgcattgatacattcaaaatgatagaccaaaaatagtgttttcataattacaataaggacacaaatttgctttattcagaaaaagggggacataatttgaatttgatacttttgatgatatgttacataacattaatttttatattttaaagatatttagggcaaaagtatttaaattatacattttcaagtagtacttaaatacatatgttattattttttttaatagtagtgaaagtattaaaatcattatatttatagcacttaaatatctaaattatatttttggcgtcgaacatacttaaattattaatattaagtttgtactaatatttaagtattcaaaaaaatttaatttacagcgaaaatatccaaagaaattgaataccatataggtagactaaacatttttacatagaattaagagagatatttataaagttttgtctgtttaaaaaagagaaaacaagtcatttagataatatttagcttgaacaaatgagctatacttaagttttttgttcctgagttgtaaatttgtttcttagagcaatatattaattcttattcataaaaagaaaaattgatacttattagtgtcacaaaaataatattttaagtactttcgctgctaaaaaaattaattttagtattttagtgctataaacgtaataatttagttactttctctacaaatatctaggggtgataaaatatgtcatggtttcgtatttttgtcaaatttatttaggcacctacttttatttttcgtgttaggcgtgtcgatctactttctacacgcctcaaattttgttaatcctaatccgatcgtaaaaattattttgtgttcttgttgacctattttggttggttttgtcgctggagttgtagagataaagataaatttaagatta

SEQ ID NO: 27041 - DNA, 1814 bp, Cannabis sativa
taagtgttagaagataattcccctcatcacatctcttcatttgtgttaatatattgcgaggtgaatgtctcgctatacatataatctgaggttgtgttgtgtgtgcattcattctattccaaaataatgaattatcttctttggttgtgtactccgaagaaggtgcctgtctcgtcaatatgagttttaatagtcttttatcctcgtctcgcttaagactatatagccagcgagttgtgaatattttctattaacctttttattaacgagttattcttatcttgcatttaatgatataattttattatgttaggtggttcatattccattgcaagacatgtgtcaccttctgaagtataactgaattttaggtataacaaattttaagcatggtcaacaactagtgtactttgaaggtcccttgtccaccaagccttaaactaaaattgtcgtcttgttctagagtcaagatccactatacaaatacaaaagggcatgctgtctaaattgcaagtatggagagattggatcacaacttttggaaagagatgtaaccaatcatcattgaccaaagctttatgaaaggccaattaacgtgagttaggccatccctatggttatcccaagtcaagctgtcccctttaatgggcatatcaatcaatgcatgcgcttaatcaacttagtgataaaagggagaaattggtctttcccttagaaccgacacgcttagagctacttagaacaaaattcacatatcccaggatcaaccaagacctgccaaattttgtgccaatttctataatgtttgaccagaatttcttcttcccatggaagtaaggaggcccgtatacacaagacaataaccaaggattatgttcagggtcagagtatacaatgccagaaatctagttttttgatatacaaatgctttcaaaagtaaaactagctttccaagctaaaattatactcctcgcactaccaacagtaggaacaacaaaattaaaataaagtataaattcttaagagagtgtaccaaaaaggcgacatccatttttagtttagtaatgaaaatgaagctaggagagcacgactgaatcaagggcttttaattccagagctgtagaggtcttcccaaccctctacagttccaagctacacctatcatggcttctgtggaggagggacaccatcctcctccacaggggtcacaccaccaactggctcaccaatcgcagaaccctcatccttaatcaaaaaatccttcttgatagagacagagatatccatcaatcgagctttggctttccacatcgtaagcctagctgactgtcccgaagaaattggcttttccacttgctgagagcacactgtatcaaccttagcgcaaacaatattctccactttgtcactggctagaggttcttctgacgatctagtaaaaatttgattaaaattagcatcttcaacaacacacaccagaccaactctcctagggaaatctctaaccactcgcttcactcttctaatacaaagatttggctttctcccaagagaaaaagtttcaaaatccaacctctacttctttacaggcattgttccctcattgattttagaagacagttgaacaccaatatcaaaaatgaaagctttccatttattttggcctgaggctctaatagcgtcatgttcttggatgtatctttcttaggcttgaaagaatttagacagtgatctcttttcatcaagatgagcatagacatcttggcccaataaagagctatttttttttttataatcaataaagagctatttgg

SEQ ID NO: 27042 - DNA, 2767 bp, Cannabis sativa
tattaacataataataatgtaattaaactctacacgattacatttttaaaatattattaatgaatgtaacataaagaaccatagctctaaattaatattaattaatttataatatataacaccaaaataatattataatatgttatttaataacatacaaaaaaaaatgtaattaaatatcaatacttttaattatatgagttgtcttaatagttaatagttgctaaagtgttataaaatgcatttaattacactttttgagtgttattgtaaatgttttttttttgtagtgagtgactatggagatggatctttcttgtgatgtgagtggtaagaaaaatggaaataaaattagaggagagataaaggagctcgggtttgagagagaggaaggacagataaaggataatggtgtttgagttttttgacttagagagaaagaaaagaaaaataaaattgttaacttttaccgaataaatattttgtcacaaatttaggatttttaatgactaaataattttagtcgccaaaacttagagcgctcccgctgtaattattaatttggcagcaagtgttaatgactaaatacaaatttagtcactaaaaataacaaacaatgactaaaaattaatcgttgattcttttggttccaattaaacattgtcttatgattaaaaatatctttcactaaacattagttataaaagctaactattagagactaaattagtttaggtgtttaggttagaattgcaaaactccctattaagaatctacatttgttacttactatttgatattttacaaaagaaggaaaaacaaacatatgttaattaattaattttataaaagacaaaaaacttgtgtatctattttccgaatgattaatgctaaagggctctttcccaatatattttgtatgtgatgggtcatgactaatagaaaactttttgtgtaatgaatactagaataattaaggagagataatgatttgtcaaataaaatattggaaaacacattaaaatttggaaatcaatcatatgaaatgaatatatgatcgaggtgatcactacaagtacaaacaaagttcataaaattaaaccattaaacacaacagaactacaaaacataatatgcttgcttgcttgaccccttcaacatctatatgttgaggattgattaatgtatctaacttaataatattatgttgtctgtagaaaaattaaaccaataaagaactagcataataattaacctaaacagacaaatcaacccctgccgaagaaggacccgaaccattattaatattattgttgttattattcacaggctcgtcacgttggattgagtcgaccccatatctgagctcgaacggtttatgattggaccattaaagtcagtactcaaacctttattaaatttttccatagcaccatttatttgttccaatgttatagcagcaaaaccacgaccaccaccagacccaagtccctcaatgtagcgttctccatgctgccttgaccaggacacaatgtcaccgcttctttcactgtggccgctgcgaaaatcggtcccaaagggtcggttcccagcgacccggccaggccatgatgagtagggattattggggacattgcagagtgcggaagacccattgtaggtgggaaaagtggttgaataggtatgataataaggcgagtagcggtaggggccataaggcccatggtcatgagctgggcgtcgtttatccataagacgctcatgtctgtgagcgttttggtgaccacctaaggcatgataggttgtgaattctctcctgcagtaattgcatgggaaaatcttcttattacattctacttccgcagactctgatgctactttcttctgttcttcttggttgggaagaaaatagttgaagagattgagttctctacttgagccacttttgatgtagttgtcgcgatcaagacctttgaagaaccatttttctgtggaaagcttcatcagatcatgaagagaaggagattgtttttcagaatctgttgccactgaataagcaggcatgatgggcttcatcttggctagactcttggtttcatctccatttgaggcctcatcagaaggacagactttctccatgaataatgatgtacctttttcttttgtgtgtatgtttgtgcgtgaagattaatgggacattggtcttctttttatgtagggtgtgtggagttattgcattgtttcatgtatggaaagatatattttctaatatcgaaaacactactgtagcttatatgtgtttcttacgtaataactatcgttgaagagttgaaagattcttcattttatggtatgtacgtatagagtgacttgattcattcatattgtataatgttaattgctaatcatcaatctaattatggtatagaaatttcatggtgaagtataaggtaattatagttgtcaatgaccaacccagataatttcacatgcatatacatgtctctaccattttgagtaacttctcattcaattctaatatatcttatcccgttgtctctcacacacttttacaatgtggatttgaacatacgtcctacacccattcaattacctacttcaactagccaacctaataaataattggcaattttcacctatatcaacatatatattacacacaaaatttaaggctaattagcaattttttctccgaactttgacatgtactaaatcaccccctgaactttttcggccgttaaaaatt

SEQ ID NO: 27043 - DNA, 3111 bp, Cannabis sativa
aaaaataaaagtgtgttttataatgttcatttttataccttttttgattttatttaagtaggattcggggttgggtcttggacggggtcgagttaggggtctgggatctagagccggggttcgggaccagggttcgggtctagggtccagggtccaggtccaggtccagggtctgggaccgaggctggatcagagcaccgaccgggtttggggctggagtccgggtctagggtcaaggtgtgggttcgggtctagggtcgggggtcgggccgaggtctggggctgagttcggggtcaaagtctgggtcttggtctgggtccttgaatttgtaattaatttagtgagtttttcattattttttaatttattagctttattgtaatttttttttatatatttttatgtgtttttataattattttgtataatattttgtatgttatttatttttaattttattttagtttcttaattaattttatgtatttttaggtgtgtttgtgagaaaaaatgtgggattaaagtgaagaaaatattgagatctagagtcaaaatcacaattttaaagtgaaacttagatttggcccaaaaacgaagcccactcgcgtgatgaaggagcttccatccgatccgttcgttgacgaattcgacagttcttatggtgcacgtgtcctccactccagacagcagcgtgggcttcaggtccctaccgcatgctagcacctgcgtggtaccctttttaacgcccaaatgtgacttctactggcggtggttgggtcgattcacaggaaggtgattatggacaaaagcgttaatagaaaaataaacacaaaagattgataaaaagtgagaatagtaaccaatgagtttgaggattttttttttttttttggtaattaatattaaaagaaagcaaataaaggtgtaatcaatagtaaaagaaagaaaggcttcaagaatcatccatatgcttgtttagctattttgtacctttgattcacaaagttgatacaaatgatgtaacattaaagttcattatattttgagtataaaagttcttggaaataaaagaaataatttaatctgatgtagaatttaaaaatgacattatacatcaagcaataatgcaataaaagattaaacataaaactaaatatcaatattattttcactaaataataacacatagaaagaggatgactaatcatatatatttttagtaaattaaaataatgacagcatgactaaatctatttatatatatttagtatataatagcatatatagtagtatagataaaagaaaaacataaaaataaaagtagaataaaaacttgcattactcatataaatattacatgtgaatcaaagatacaaaataatttcactttgtatacggaatcatctctaaccttccaaagaagattacgtcattatgtatcattctcataaaaattctaaaaagaaatatgagaaaaaaaatgagaagaatttttgctataaaaattacactcttaaacaatagaaaaatgagctcctatttatagagtcttaaaaggattaaaatgtaaaatataagtaatatagggttataataataataatagtagtaataataataataataaataatctatagcttttttttgtatgttactatcatatattattatatatatatatttgattgttgatttaaaaaggctttgatgttgtagtatggtatttggtccatgcaggtacacgttatgggctttggagtggaaatgggagcagtagcaagagcccacgtgctggagcagaagaggaaaagggagcagctccttactggtagagaagagtggtttgggcttgggctgctcccttttgggcttcttctttcttttttttttttacaattttactacttgcttttattcttttcaacaacacacttttattcctacataatagcaacaaattaaatatttttaataaaaaaatatatctcatcaatcaaaatattaatttaaagttaatatattttaaactttaagatcaaaaaaatgtgtatttttcaccattgatcaccctttaacccgtctgccttctctcctagtaatgctagctctgcacgaaccagatcgtgccacatcagcactgctaactccatctattatggaataatataattcaatttctagtaccaatttctatgcaataacaggttttacttaagtaatttataatccgctaagatatacaaatctcaattacatgcaaattttctattttcatgataaattcaaatatgcaaaaggtattaaacacaaaaatcctataagctatccaaacaacataggtactctcgtccaacataaaaatttgttcatattttactatagcataattgacacttctgagatctcgtatcaacatcataaatatttaattgatggccatacaattaaaagaaataagaacaaataaaatagaacacataaaaaaattgagaaaaaatcaaatcatattaaaaccataaaaaaatatcaaacagtatccatcaataccctaataattgtatagctattcttgttcttcgtaacaattaaacataaatcaattaagaacataagaagaaaatagggaaaaagaaattattgaaaaattccgttaaaaagccttctcggtcactttgtttctctcaaactcgtactctctaattgtgttgatgaaaattgtgaaaatccactcttttttatagccaaaaaaggataaaaaagataggaaaaatatccaattttcaaaaagactgaaatcgttcatttggaaattaagtagagatactcccgtttggtagtcggctccaaaggatctttagaaacaacttgagctgtgtcatttgtggcgatgtagacgattttgttcagcatctaaactacacttgtcctctggccatggttgtgtggtttgctagttgtgtgttgattagaagtgagtgtgtgagcttcatcactcctagggacctggttgaatggattttactagaggtgagcataaaattcaaaaaccgccattgaacggtcagatttttttttttttgggtaaaaaaccgacccaaaaaactgaaac

SEQ ID NO: 27044 - DNA, 3349 bp, Cannabis sativa
  modified_base (2710)..(2727): a, c, t, g, unknown or other
ttattcacccaatctctataaaaataataggtttgggacgtggctacatatatccacacacatttttaaacttacgtcttactatattaaattatgtaaatctaaaaaaatagacacataaaagtacaacagtagtcatcattattatagatatttaccttgtaataataaaaatgtgaacatcgatttatacaacaatcttacttctcaccaaaaaatatataaaatcaaatagttctccaaccgtacggcattatatatatttcaatatttttttaagtaaattacattaaaattaatatttgaggaatatataagggattatcgaaggtggtgaatgaatggattgataacatgcaattaactagattaaattctatgtgcttatatatgtatggactcaatggtattacctatttgtagttattaaataagtttaattataaatattaattttaaaaatattaaattattaaattttgattaatcaatgataaataattaaagaaaaatttaaatttttattcttattttagttatccaactaaaaaaaatataaaaaaaatacatctttacaatatattaaaaatatgttcagatacaaaatatttaagtcaaactcaactttttttaaaagattttttgccaattttttttaatatggaataattaaccttatcttatataatataaaaataaaaaatttctaattagataaaaaaaaaattgaattttcttaatattatttatatatatataggtaatacccataaaaaagtatatccatataaatatttatgtaagtttaatttgtttaatattctattgaaaatcgcaataaaatgtaagtgagctatattggcttctaaaatgataatcgcaataaatcaaactagctagggcaatcatttaattttcaaaaatatatgaagtacaaaaactatatgactaacgttttttaatgtgaaaaacatcgttttataaagaggacacttacatttaagcctttaatgttgactgtatatgaattttggtttgtgaacttttacctttaatgttgtgtttatagtccgtgaattctctctatcacaatatattatggttggtttctatcaaaatcaaaatatatgaccacataccatatatatatatatatatgtatatatatgttttcgtataaagtgattataaaatgaaagcttcgtgactacaaatttaaacctaataatatttgtatgaacagtaactgctgctagaaatagatatttctctaatatcattttctaagagcatgtctaacgggagttattcataaagtttgtttttgacacatatactatatctatatgatcctcatttttaatgtaatttaacaatattattgtccatatttgacaacaaccatgtggtattactttatctttttattttatcaaaaaaattactttatgttattattttcatagtatttaataaaatttattcatttaaatagtagtatgtggtagatggtagataacttttggacttgtcaactaaaataatttttgtatgaaaaattgttaaatcatgtagatattagaattagtcttacattgcttatgtgtggaaataagttatcatatataagatgaataagctattcctcttactgccaattgattttgacatagaaactcattcattttattctaaattctaaccgtgaatgacaaagaaaattaaaaaaataatattttaaaatgatgtgtaaactttttgacaactacaagtgttactcctatttggaggcgctctttagttataaagtaattttatttaaattatttaaaaatccaaacttttgttatatgaagtatattaagtgtttatgacttgtaaaaatttataaaaatgatatattaattttacaaaaaaaaaaatatttatataacattaaaataaatatttatattttaccaaataattccaatttaaaaatgagcttaattaccacacacatagcttttgtcctagtttttatttaatttaatgggtaggtgtagaatatattatttgaataatccacccaaaaatatgatataagtatcaacaaaatgaatgtttttaacaaaaaaaaataagtatccttgctataaacaatgttattggataaagataatacattatattttatattatacttatagctagttacaacttacaagtaacaaaggcatcttaatgaataaaatcgtcaaagagatagaggatattttttcatataaaatactattattattattaataataataataaggctaattaggatttttgtcctttgaactttgacatgtattaaatcatgtcctctaaatttttaaagtagttaaaattgctctgaactattgagattgttggatttaaagatttttgtccaattttaataaaaaagtctaacatagatgaaagttcaggggacatgatttagtaaatgttgaagtttgaggggtatgatttggtagatattgtatcaaagtttcgtgaatatgatttagtacataaacaatcactgaaatattaaattgaataaaattagataaaaatccttaaattcaacaatctcaataattcaagaagtatttttaatgaccttaaaagtttaaaggtatgattttaaacatgtcaaaatttaaagaaaaattctaattaacctaataataataatannnnnnnnnnnnnnnnnnataataataataataatgttgtatatacaacggcgattgcatcgttttactgttgaatctgattgtcaagaggctgtccatttaatccattctaaggaggacggttgtcgggatgtcgatggtttactctgttgtattcggcagttaatgttacatagggctgttgtaggggtctcttttgtgtatagggaggctaatgtggtagctcatgttttagtcaattacgctttgattaacaaagtgagagctatgtggattggggttgttcccccttgtgcaagacttgcgattttgcaagatttacctaatcctttgtaatgatttttattaaggaagactttatgttaaaaaaaaaaaataatgttgtatatacatttttaaaaaataaaaataaaaataaatgattttgtatataaatgaaagagggccaaatatctaaaatcttctattggaatgaaaggaaaggcaatgaaaatgaaaagtcatgattcacgtgagaatggagagagtgccacgtaatcagccgcgtcggcacacacggtgacaagctatgaaatctttgtcacaatagccatcaaggtaggccccacttttactacctttatctattattattattatt

SEQ ID NO: 27045 - DNA, 3321 bp, Cannabis sativa
gtggtaatagcctactccccttgcattgtattaacttaagtgaatgaacaaagtgttctttccctttgaaagctcttacatgcaatttctgagtaactctcttagatcactattttctctctagaatctctctctgaagtaattcttttgatccccttcatagtgaggctaagtcactatttataggggcttaacgcataagggatggttttccttttgcttacaatgcataaaataaaaaattacaattattatataactatgatatatgaaataggaaactaaagcaggttaccatatttctctgactcaatcccaaaattatagggattatcttcgtgtctggacataacaagatcattttgaagtaattatctcttgtaagtggcgtggcataacggacttctactggtcggatattttatctaccactctactcgagtaattaacaataatagatgttgatgagttatatgcaagctattagggacatttacctccacctaggtattagaaatataggacatgtgtcggtcgacccccttgtcacatcaatgttcaaaaaactagataaaattttccccctaactctgcgcggaatcttattcggacgggtgacgtgtgtcttaggcgtcggatgacaaactgatgtgaccctgaccaagggtctcttcaatttcagctcattaatgttgaatgacagttttgcctcaaatcgcgacttgatttccgcgcgtgaagacggtcactatgccaacaatgagtacacaacgtacactttttgggggaatttgagacatttaaaatttgaaatgattgcttcttcctttcggactacctgtaaataggattgaaaaccccaattaatcattttagtcatttttattcttgaaaaactagagcaaagaaatgtttctctctcaaattctttgaagaatttctaggaacctcttgccagtaccatctgagcagatcaaaagcttcaaataagtgagtaagttcttcatatctttcttttatacatttgaatgcttagttttctgggtttctgtctacaaatcttgcttgttcttgaacttgttctaggataaccatcgaaattctaggtttaagatttagaaatctcgattatgcttaatcacgacgtgtgattctaattgggcttttattttaaccccacgatactcattttcacttatccattaggggtttatatagtgagaatcaaattccaattcaaagtttcgaaattatgggtggaaaattccgtttctaagtgaaatttctattttggatcccttaattggaccaagtcggtatattcaacctatttttttatttgtttcccctaccaattctcaccttcttgtctcctaccttttgtggatgaaccctggtgagttttggggaggcaaacgccatatcgagctggatctgcttcaactattgttctaggatcatcctcatctctgtgccagtctgtcctcgtccagtgataacctctctaactctagtttcgaagattagaaaataagtagtgaacacacaccttccccagaacccgaggtgcaagaccatttttatcccggctaaatccaagatcaagggtacggtcgcttcatttgggaactcaaaaaagggtggagacgctatcttatgtccgactggacatacatagtctgtccagacatcattgaaactttgcccgaaggccatccaaaccttaccgctgcaggtaaacctgttgcctcttttgctgtgactatcgccaggcacacaaacaaaattctatccaagcgcataatgatggagcaaaccaagcaaactgtatggaaatcttcattgtccaacccacacatcacccgtcttgccaccctacctaggaaaaaataggcccgacctgctaccgaagaggaggacacagctagtgacgctgaagtccaagagatggaggaccaaggcaaattccttcctgctactcctcttgaggctgaactcctcctgaggctgaaggagatgaggaagaggagtagctcaggtgttgccatttggtggcttcaatgaagaaggaaaacttgtatttgaggtcggctatgttctggaggccggtgaagactacgttactgaagaatacactgaggctatacccctaaggaggcaaggtgcactaggagatcgatgggtctctccaccatttgtggtgaccatggccaaaatataaaatcagctcaatcgtggttacctagggagtgtcaaatgcttccttctctccccaatcagttggcgattagcctaagggaaagttactgtgcctggttggcagttcataccaagcagggtgccatgttacccttgctcccatacttcaagagggtcacaaactattaccatataagtctgaccccattcacccctaaaggtatcaagtatctgtctgccctattcgtcctctacgccacacaaggatggggtgagccatccccgcatgacatcaactggctctttaatctgaagtcaagtcagaacatgttgggatacttctatttttctcaaatcgagaagaagtggttgacgggtaccacgaccactgaggtgactaatatagggggctttatggatgaatactacctcgtcaaaggaatgggcaccgtccacaccagcttccagcaggtgccgtcctactacctctttccattcacactggagctcaagaagagggcacaaaaattctccaactaccttctgctgcacggaatatctccctcttgactatcgaggccaattttgtcaagtataaactttttccacccaatttcgtaccaaaggctacgaagaaagcgaaagaggctgtgcccgtacaagaaactgtgcccaaataggaaactctgagtaaaagtgggaagaaggcttctccaagcagccaagtacctgttgagtggtctatccagatcagggaggaacttgagagagttgcttggcaaatcgctcaagtggcaggaaaaggaaaagtcgtcctgacggagcaggagtaagaagactccttagatgatgagcctccatctctacttgttcgggagaatgctcctgcctacgtgtagggtattttaactcatatttaatttttatctgtattggcttacatcgtacttgtctttaaccttcttgtttgttcatatgcagctatgtctcagaaggtgttccaggccttgaaaaagaggtcgggtgacagttccagccagaccctgttggaaatattttactaggatctaaatttactaccaagtatgtttcattaacaccctaatatgaattctaaaataa

SEQ ID NO: 27046 - DNA, 5114 bp, Cannabis sativa
gtgaaaacacctctgtgaagtcaataccttctttttgagtaaacccctttgccacaagcctttccttgaacttcactagatcattctttgttcttacttccttgtgcttgtaaatcttcttgcatgtcacaaaattcttgccttttggtctttgaaccactttccaagtcttgttcttactgagagaccccatttcttcatccatggccttgttccatttgactgcatcttcatcttttatagcctattcataaccctcacgttcactcttgcttaaacctgttgcacagatgagagcatatgcaagaacttctttccatacattgaaatcgtacttctgctttggctcgggaatcctcttagatctgtcccttactgattaatattctaacaggtcttcagcttgttgctaacttcacagttaggttccacctgaatgttgtccttttgctcttaatcttgagctgcctaaatggtgtcttcctgagtatgttccacctgaataagttccacctcacatgtgtttggtgcttcagttaggttgtttgttcttgtgcttgagcttaaactcactgtcacacctgcagggttagtgtccaaagagctacatgcacttgagtcattgttagcaatacaaggaaaataatcttctttaaatatgacatctctactattaattgctttaagccttgttttttctttcacccacaacctatacccttttgttccctcaagatagcctagaaaaaacatttgagtgctcttgccttaagcttgccagcactctaatgtgcatatgctacacatccaaacactttcagatttaagagatcagtgggtttccctaaatatttctcttcaagtgtcttgcattcaattgcactagagggacatctattaatgagatatgccacagtaagcacaacctcacccaagaaccccttagataaactagaatgaatcatgagacatctaaccttattcatgatggttctattcattctctcaacaactccattctgtcaaggagtggtcctaacaattttatgtctttgaacacatacatctctgcaataggtattaaattgatcattgcagaattcaagaccagtatcagtcctaagggtttttagcttgtgatttgtgaggttttccatcatggttttcccgtgaacaaatttttggaatgtttcattcttatgtttgagaaaataaacccaaacctttctagagtaatcatcaactatagacagaaaataagagcaatcccaatgtgttggtgttctttctagtccccacagattagaatgaacatactctaaaatgttcttggacctatgagtgccaactttgaacttgagtctatgatgcttacctagaatgcaagattcacaataatctacctttgttaccttgtcctttcccaataggttttattcactcgtgagctgcagtcctttctcactgatgtggcctagcctcttgtgccacaacattgctttgtgatcctttggactttggactatggcattatgacatttaattacaggttccccttgtaggtagtaaatacctcctttcttgtttcctttcatgattgtcattgtacccttgctcaatttttgtcacaatacccacgtcatctagcacgctaattgaaattaaatttcttgttagatttggaacatacctgaccccagttaatgaacacacaatgccatcaaatattatgaaacttacagtgccagaccctccaattagacaagcttggttgttcctcaatatgaatctttcttcacttgattccatgaaatcagaaagaaagttcctattatttttcatatgaaaagtgcatccagaatcaaggatccaatcatccttgaaattggttgcaacaacatatacttccccactgtcataatcatcactgaaatttacttgttggtcaatttttttcgtatgatgattgttgtaattagatacatttgagtcttgactacttgatcttcccttgttccctttggtcaagagatagcaatccttcttcatgtgccctagttttccacaatgaaagcatccatttgaatctttaagaccaccagcttgtgatttccctctcccttattatacccctttccttaaccccttccaggactccttcctttgttttggcttggtttcttatatttgtttctgccttggtaagaatgtaactcaccactactagaaccattcttctcatcctttattcctaagcctttggatttgagagctgagatgactttctcaagtgtgatagaggtctttccatacttgattgaagttttgacctctctatatgagtctggcatgaattcaagattattatggcttaattctcatcactaagggcctcattctctcctgaatttgcaagttttatgtgctttcttaagaactcatccaaattgtggtgcaaggtctttgagggactcatcttgaatccaaagattctttctttcatgaaaatcttatttgtcaaagatttttgttgaatctgttctagcactaatactactgttagaattcattcttgagtcaatgatcttcaaatcttgaagtttctagcactaatactactgttagaattcattcttggattcctacattactcactaaactaaacaagacaacacacactgcagatccaacctaatcttgcagcaatggatttcacaaaaccaattaccaaattgtataagccatgtcaattgaattgctaatttgttaatgttaattcaaattataattttgatcaagaccacatttgaattaattattaaagatgaaaacaatcaatctttgacataaacatgtaatgcaataaaacataaattaaatgatgaaataaagcaaaacaataaagatcaaacacaagaattttggcaatattccctttaaactttgggctacatccttgtgagctctccttaggaagaacaactcttttcactatgatctaagcttggatagtttcaataatggtggagatttcttatcacactctttgagagataatctctcaatgatctcttgattacaagttgattaggtttctctcttttcttgcaaaaaaaaaactcttgactaactctttttcttttctctctctttctctaacaatcttggagcttctctcactaacttggagagaacttcttgctctactttgatcaatgagatcaaatccattgaaagtcttttgttcaagtcggttgagaaagaataattagcagcctagtcttttaagttagttatgtcgcataggatttgtttagttctatttgaagtgactttagttgtgtcttgagtgattaagtgtgcagcggttcatgataaaactgtccttgcttatgatggggtttaattcaacaattacctgtaaaatgtagtccttaaactctgtgaggtgtcagacaattgcctaagttgtcttatggttaagccgacctgagtcttgtcctacccaaaacataacatggtactaatatattctaatccaatcctaactaatagttcaatctggtatttatattacatttagctaccaagatttaacgtaataatagagttttgatagttggatcaatgttatgtaaaaaaactaatagtccattacaatccaattaggcataccaaacaagccctatggatataagggataaccaggataatagtgtacacataattattgttggggatatactacaaattttattcctttattaaattggcaatttttattatgtttggattatctttttcatttatcaaatgatgaaattttttttttgctaagacttgaaacaacttcagtaaacagaggctaaaatattggtgagtacaaagggactcacctcccaaaattcaagaaaaccattacgagattgattgagattccatttggcaaaaacatgagccaaatgattacagttcctagacatccatacgacattaacatccaaatcaacaatcaaacttaagacctggcaaaaggagaaagatagtttccaccaaggagcttggagcttcttaatcgcccaaactagtgattgacaatctgagatcaagttgacatcacaaagtcccaacctttgaatcacattcaggccagtagaaatggcttcaagttcccccttaataatagaagaggcatcgaacatagagacgaacagctaagcactccaccacagctatcccaagccacgacccccactgaaccctgtcctttcttatttgcatagtccacattcactctaattctaccaagtctaggaagacctcagcgaatcgaatgaattccagggccctcgctatgagactggaccaaagcaccatcagtctgagttttctaatggctcaaaaaggcttcattaatcttgttcctcatgttctgaagaggccattgtgcactgttatggaaataattgttcttgaagaaccacaggttatggtaaaggacagcagcatatactaagaattccattttctcagcaggctccaagtttccctgtaggaaagggggattaagaaactagttaatagcctcagcaccagagtgaagagggaattcatttatatggatatgtcacttgctagataactagaggtatgtagtaacagcccaaaaggagataaaatgagcactagtatcactgtcgtctaagccacaaaggacgcatcttccaattggattgccaaaaatcgttgccaatcgggagccaaaaggaagacaatccttatacaacttcaaaataaatactttcaatctttcgtgtagagaagtcttccacagagtagagaaaatttcatcattagagaaacgaccatgattaaagtcgtggtaagccgctttgagggtgaaggagctatcaggggcagatttccaaagtaaatgatctttaccaagaaaaaatataatgttgctagaaatgatagcaatggctgtaactggttcaaaaatctcagagatgagatgggcattccaggacttgccccttcctccaaaatatcttctacaacttgacccccgtagacttttgcattgacaacactagggccaataatgtagtcat

SEQ ID NO: 27047 - DNA, 1349 bp, Cannabis sativa
aagtaacctagttgttgaattttagattttgtttttgcttcaagaagtaacttgatacttttatttttaattttggtatagtttgttgagttttaattacatttttgcacaagttaatgtgtttttgaaaaaaaaaaaaaaaaagaaagtaagatagttgttgaattttagactttgcttttgcttcaaattgtatcctgatacttttacctatgattttggtatagttcattaattttgattccattttttctaaaagaaacaagtaagtcagtaagtaaccagatacatgtatcttcaaatgtggttgattgtgttgagttgtgaatgtatttttaacaaagaaccttgttattttaaaaaaaataatctggtagttgaatttttagctttaatttttcttctaaaagtaacatggtagttaaattttttgctttaatttttctgctagagtaatctggtacctgcattgtgtgttctcttatggttgcacaaagtaacgtgttattttgaaaaacctggttgttatattttagacattatttttgataatcttccagtaacaagtatttacagtagagtaaattacagcaaaactctcaaaagtttaaaattactagcaattaacccccaactcccatttttttggcggttggaccccccaaactagcattttgttagcaattagtcattttcgtctatttttagctgttaatgatcatgttagacaatccatgtgaacagagtgtacacgttgcacaatattatcggtccacataaataatttctttttctaaaagaataaaattttaaaaataaattattttaattttttccttttttaaaacaaagaattttttttctttattctccttttttttatgtttttatttcttcttcttcttcattctttgtaccatcgccaccacactcaaaccacctttatccatcattaatcaccactgaaaccaccactgcacaaccaccactacccactaggccactaccatcacaaccaaaacataaaaactgccaccacaatcattgtatttattaaatccaaatcaacttaaaaacataaaattaaagtgaaatacaaaatctatctcaattccataaaataatctctattctactcgattcacagatccaaaaaataagatccacctgattattatcataaacatcttaccaagactaaaaaaataccgaaacgaggaaataattaaacaaaaaaaaagaaaaagaaatgatgagttgatatcatcggttgtagctctgataacgtgtgttggtttttggggtttgcggcttcgaatgaacagatatgtttccttttgctattagag

SEQ ID NO: 27048 - DNA, 2023 bp, Cannabis sativa
aactgtgtagtcccatacctacacagtctcggaatcatcatacttgactttctccaggcgagtgagattgcacaacttacccgatattttttcttacgaatcacgggactattgactatcacatggactccagtccgacccccaaacacgaaccttgatcgtatctcaaaccatggatctagtcccggacccgacttcgaactcgaacctgaacccaggacctcggcctcatacccaaccctaaactagaaaccaacctaaaaattaaaaataaaaataaaatttaaataacacacttatcttttttcttttttatgttttaaattaaaagaaaaaattgttaccaaacctcatcttattttttaaataaccatttttttgaattgagaattttattatgatattatttgcattgacacaaaacaaaacattattaatagttacattacaacttttttgatcaattgtttttacatagtaactacacctacattaattgcttcatcaatggactaacgaccaaatataataattaattattcattcaaaaagaaattcaagtgaattatattggtttcagaaaatctgtgtacatttaataatttgtgtttgtttatgttttaaattcaaaaagtttaattgatgaagctctttcttggtctcagaggaagaacagagcttattttgaggtttgatataatcagtaattgaattcattaatgcatcatcaattaacacaacatctctctcactctttgaatttattgtcttattgcttgtaattaactgagttaattagtttgttttctgaaaccattggactgggattataactttagatattgtgagagtaaattaaattggacattgtgattgtatggtggtataatgtatgatttgtataattctatcaccaagtaaaccaaatttagtttattggtaattgatagggccattaatttaagacatatctctaataaccaattattcttttgttttataaatgtgttttttaaattacatttttaagctaaatttctgttgagaaatataaagttcatcttggtaatgaaaggagtagtctatacatcttatgaatgatatttagtttccacatattatcagtgtgagactctctcaagatggtagttattttttgctctctaatctaaaacagcttgatcacaagtgactcttttggctcactatccctgaatcacaagtaactctttttagctcgtctttttggactaatttttagatttagatcaaatattcgttaaagtttaatttggcttttgataccatgttgagaaatatatggttccatctcaaaatctattggtaatgaaagaaataattaatttatacattttatgtatggtatttaatttttacatattattaatacgggactttttaacataaacactccaatattcttcaattgagctagccccaaggagttctaataaccaatgaatcaaactaattagttacaaacaaaggagtagtgtaactatttgttctgatattattgcattgaaaatgtcctgtttatttgtggtgtttgtcttgtgtgaaagggtactgttttttcatgtcttttttatttaagggaagtactttttaatctttcttttctgctctttgatcagatcctttacttggtttaccaattactttttttttgaaagtgttctttattgttgcttgaagaatatgttatgtaatttatagtaaaaaatgtgttaagttgttttatttagctatgttggtatatatatgtacacctaaccttaccaactggcagattattccctttgaccaaatccttaatccataattagacttaacaaacacaacactatgaaaaaatatactactaatatattatttcatgaagaaaattcgtaagaattagttatataaatatatataattttaggctaattagtaatttttctctccgaactttgacatgtactaaatcgtgtttcttaaacttttttggctgttaaaa

SEQ ID NO: 27049 - DNA, 2997 bp, Cannabis sativa
atttgtgttttgttaaacgatttacaaataaagtagtttattatcttgcaaggagttcttgtttctctatagatcacgtactctagttagaggactagttctctaaagtgtgatttattgttttgaaagattttactttttaatgaaagttacaaatttattaaaataaaaaagaaaaaggaaatgagaaacaataaaagtaaagaacatatgcagtgctgaatgaaactcatagctgtataaatttggtctgaaaataaattgatggtagaatctaccacttgtgggtttcaatatggtttttcttttttttttttttcaaaataaggaacagaagacttttctaagacaaaattgtaaaagtgggaacttgtctccttagccagatcagatcagagtatatgctatattttttaaaaaaatataatatttattaaatcagagttattggggtagaaaagtaattttaattggctagtggatgagattgagaagaatgtgtgttgtaagttgtgtcaagtatgaatattaataatgtgatagtcattgttcacaacgtgcttcgactgctggcttttaattttggtattagtcaacttcaagtccagcaatccacttcaaaattttaaatacacctacttaaaatgatggcatttttttcattaaaataaaaaatgatggcattttatttcccttacttctttttaaaagtctaaaaaaaatattttattctaaattaatgtaagataaatattaattaaagaaacaataatattttgaaattaataaatatattaatattaaaatagattaattataattaaataattatattattatatgactaattatgtaaaattatttgaaatttattgtatttaagacctcaaatataagttatgtgcattttagtaaaattattattttactcctggtacaacacttaagcatctttacaatttaggggtattttagtcaaacatactaaaccatttcgatataattccaataaaactcattctattaatgtcgtgacattattggccattatatcgagttttctcggtccttgaatccaaaaatattttatttcaaaaatagtataaataatactcacatgtttcaataaaatctctataattaataaattacactcaattaattattttctcaaaagtcactaattatctcataactgacttaagtaggattataatcttactctattattcatataactacatatttaataaaatatgacaaattaaacttaattatatttttcaagatattacaaaatatcagttagatatttttattttattatcattttttaattaaataattgtcatatatttatttaattcattatttaaaagataattagttaatttattttgaattatcttaactaataaaataattaaactaaattaatcacgagtctttatatgtcaccctacacgtgtgggctagggatcatattttaagatccaaaattaatttatgaattttgccataaataagattcattatttattttactaataaataataattgaataattttttttaaaactaatagttgaataattctcattaatatcttatttcataatgattaaaataaatattattttctctaaaataatgtatttgtttatttaatattaatatagttttttctaattaaattaaatagttaaatactattaattatacaattcataattgtcataattaatcaaaacaataattttataattgactattttgcccttaaaaaatttatttttcataaaaattaattctcactcaaattcattcgtcaaataattttttttcatgttcagtgttgtatagaggtgaccccgaattgggacccggattcagatctagaccataactcggacctggacttaggacccgacccgtagttggtgttggggtcgagtgtatttaaaatatattatagctttaatacaaatcaatatcaaacatacaaattgtattaaataatactagtacaatacaatataatccaacacaatacaatataatataatacaatgtgacgtactaaacgaacccttaatgtcttatttagtaaaatagctagtaattacataaaaaaataacaatttttagtgcaatatttaaaatatattttttttagttattacacaatttagtagtaaaaatcgtgtaattgtctttaattatcttcaattctaattatttcttagcctctcaaatgcgtcctaactaattatatcaaatgtcttccaaatctaactagagggtggctttcaaaaagagcatcaggtatttatggtgcctaatactacgataaagtgttgccttataactaattagtgattttttatatttttattaaaataaaacaagtaagatacgatattaaattctactaataacaatattatactttatcatgaatgtcttttagcatttctctttaaaagatggagcctttatacattaagaaatgctaaaaagatgcctagcaccctcttacgtgtcaatattgctattggtgtaattaagtatcgggtctcatatagtttaacataataatttttatgaagtatcactaacgaatcgcaaaacgatatatctagacaatactaaacaccactagtacaatgctcttatacattttatctcttttagttttacttttgtggttagttagggaaaaaacaaaacaaaagaagaaggttgagaactatctttctctatatatagtttggtgaagttaataatatttattattatttatttaccattattataaataaaaagtgtgagcgggggctctcaaatttctgtctcagactcagactagggtttttcgcttccctccaaactccggtctctgaaggatcgactttgcttgcacaaggtaaacttcattatgtcattcctctttcttattctctctttaaattaccatttcacgctattaatttatac

SEQ ID NO: 27050 - DNA, 3346 bp, Cannabis sativa
ggtcttcaagtttttgatctaagtccttaactttttgctcgagattttgaatgaatgtcattataaaattatatattatatatcttttttactctcttaatatatattaaatggtagatgtatctcaattgattcaattactttttttctttgcaaggttatactgttgtttcttttttcaatttttattctagagcaaagtaaaatatgaagcattcttcttaataagtagttcactcagaggatattgatgtattgtatcattctttttcacattttaaaggaaatttataaaagtattgactttgaaattcttatatttaagaagtgaatcatgacatgttgaatacaatttggatgacatgattaccaaactttattaatagccatggataaaatatacttagcaaagttatcagcaacaatattaactgtccttgagcaatgagaaagactcatattatgaaatagagtcaaattatagtgaatgccttgaagaactaagcctagtgacactccaaagaaacattgttgttaatcttattaatcattaggggtattcacaatgcgagttataatctttttttctaaccaaaccatatatgtaatttatataatttctcaaactgcaatcgtaccgcgagatcttaaaattataaaaactgtatcacaaaaatacggtgcggtgtggtgtggtacgatttgagtagtttacactattatcattatcaaacattataatgaaagtttaaaaatcaactaataatgttttaacaatacaaaacaaaaaaatcttagtaaagttttaacatcataacatgtatattattcatcaagtcattatattgtataatatacacatacattatatatatttcttcttatatgaaaaataaaataaaaatcatattgtaaaagttggtaactttgtaatatatagtgcggtgcaatttgaacaacaattattgaattcaaaactgcaaacgcactgcaccgcggtttaacaaaaatgcaaaccgcaatcgcaccgcaaaagatttcaaactgcattttttatgcgatgtagtgcggtgcaggtagtttaaccacattcaaacaatcaaattcaaattggatagtatcccaatcaaaaagatgaccttgtattcttacatggcgaagagcaagagcttcagatacttcagcttgaaaaaaaccaatcatgtgccagatagtcgatgcatagataacctcatgaacgtcacagataaccatgcccatactacaaaaaccacctttcaaatctaaagctggattaatattaaccttgaaacaacccacaaacggaggcctaataatgctcaattggatgagatgaaataggcacgacattcccaagagatctttgacgattaatctcattggaacccaaaagaggcttctagtaatcacttaataaattataaaccatattaaccactaatttaggagacatcaaatagttattatgtaccattttatttctcctacatcaaaccctccacatgataacaagggctaacttagaattagacatttgatccaaaaatagataaataaaattaataaaatcagtacaaatgaccaaaggatctctaaggttaaactcacaaagttttcgatattaaaaacgagaaaaatatccccacaaagtatgatgagtagtcttctcttgggcgtcgcataaaggacaaagaccatcggtaagcataccatgcgtattcaaattaaacttaactggaatccaatagtttgctaaacaaacatttttaaatatgtatttattaatatatatattttttttcaatttaaattaaggagaattacccacatattattttttttattgtttttttttttaatttacagtttggattgttcctatatgtgttgctatgtagattttggttacgattcagattgttatggttgatatgtggatttatgtaaaaatacaaaaattagtgtaaaaataaaaaaatctcttaaattaataaataaattttaaaataaaaattaacaaaatgttatgaaattaataaaattacaagttcgcacgtgttgatgtacaacccctaattgttgttacataaccctatctctcattctccatcttccccttctcccaatcgctcatttcctcattccccatatgttttttatattatatgtaactagttttctttcctcaattcctcactgattctctctcttacatcgcccttttcctccgcctctgaccgtccaccgttgctccgcccaaaacctaaactcatctcacgattaaggtttctctctgactttatttatatatatatatatatgttgattgggtcttcgggcttgcagtacggtctgattttgcggttttgttcttattttcgtgtttaatttctctgtgtttaagtatttttggatctgatctgtctatttttattttgtgtttaaatgttttgggctcgtgtaaggattcgatctggttcacaaatcattgtatactagttgaatgtttaggtttgtatcttctatggttttaaaataaaaaaacgattgggttctttttttttgttgttggttgttcctatagtataatatagttcaattgggtgattaaaatgtaggtgtgataatatcccaaaatatatatttgaatatgcgtataatctgtttgaatctgataaaatgattccttgaacaaattaagaaataccatacctcttatattgtaaataaagattatgtttttggtatatcttgctcttacaatcattgacttaattttaggtagaaattagatagagtgatcaaattctttatttgtgcatatcaacattctgcctagtccctttcaaatgctttcaaacatacctgtaataagattttggtctaaaccattttgcatactgtgatgaggaaacatatggtttagttacttgtttcttccctttaaagtttttagttctagtagtagttctctttgaatagatatgctcatttttttttccttttccctttttaaaataaataaataaataaaaatcattttgcggtatgcatgtgaattctggttattagtttcttattaatggtgtcctttactaagtatacacataaatatttatggcttttgaacgatgatatagtgtgaatgctggttattagtttatattattaatggtccatatgtcatgtactaaataaatatacacaaatatttatggcttttgaacgatgatataatagtagaagtatatatataaatttggattattaactttattttcatggaagtgttttttattatgtggattttgatgctttttttttt

SEQ ID NO: 27051 - DNA, 1501 bp, Cannabis sativa
cttaattagtctgtttaattattttattgtaattctatatattccttaattaaatacatttttactagtgttgtcttctctttgctctatattttgtcaaacaacttctaaagctaatcttctttcattgtattgtgatatatttcttctcacattgttgtcgtgctcgaagtgaataaaatgattgaaaaaacaatattaaaaacaaaagaaaaaaaaaagtaaatctcatgatcaattctattatattactttaaacctataatatttgattcaaattttatcagatcttttaaaatttaattttagattattgtttacatatagggttattataataataattaatatctttttttttttagaaattaaaaagtattataaaataacagttgagctgttacaattttttttttttaaaaaaaacaatatctcaaaaaatcaaatatatttttatatataacaacatattaatgaataaaaaaagttttatttatatactaggttaaattatagaagttaagtgatatataggttatttttctttttattattattttacaaaagatgaacatctcataaaattattcaaatttaattttgtatcatatatttaaatttaaattttatcatatttttgtaaattcaaattaaaattttatcatatttttgtaagttattttatttgtatcatatttttgcataataattaatatagctttttcagaaattaaaaaaatatatctgttatacaatcttctttttgaaacaatctgttatacaatcttaaattaaaacaaacaaaaaatctgaaatatcacttttatatatgtaattaattaaatttggcaaaccctaaccctaaacgtataggatattatatatatccatatgataataatattatttgagccgcaatatataatatataaccaatcacaatggaaaacacaaagcgtcaaacaaggcgtagaagtactgtctcacagtcacagaaacgtaaattcaccaggtaataataataataataattaaattctgtttgtatctatagaaatatatatatatatttgttgggttttttaatttctttattatgaaaattgattgttttatattcaattataatttatataacagagctattagtagtgaatctggtaaaagaacattattgttgaatgaagatcataaaattgataaagctcatgttgatgaggcaaacatccgatcaggcgctactcataattataatactattacttcatcatcaccaaattattcactgcaacacaagactactcctagtatgaattataataatgattataagtatacaagaagaagagaagaagaagaagtaattgatctttcgagattcacaaacattggagatttgttagatttcttggatgaacgtactgcatggttgattccttacacttataatacaaaccaatcaaataattgattgcaggatatgaattgttattttagaatt

SEQ ID NO: 27052 - DNA, 1348 bp, Cannabis sativa
  modified_base (777)..(778): a, c, t, g, unknown or other
tagtcacccatatatatatatagatatataaatatataaaaatctatttacactccacaaagtaataagtgcaccttaatattcaaaaaataaaatttaaattaatttttaaaaattaatcttaatatatgaagatgtaaggaaagagaatgttagctttaaaatttcaaagagaaaaagggaataacaatggcaaatgatgatgatgatggaacatgaaacttaggtaacaattgttgaacatgatatatatggatggtgagcaccttaatcattctattaaatataacttttatttaaaacttttttataaataaaatttatattagtgcaaacttatatgttaaaaacagataaatgaaaaattatcaattagttttgatgtctacccatctcttacaaatatgttgtgttgttataccaaacttgattagtccatctcttgttttgagccttagttgactactagttattggtccaagtactacgcacgtgaaatacaaatttcataatacgggtagtgaaatgcgtttattaaatttgtgagaggaatgttcattacaatctcttattacaacctcttagtcaatctccacatctgaaattacatgtcgaaatatttttttttcaaattttttttaatagcggtatttgttatcgttacagtatcatccttgtaaattttaaaaaaattccgaatagtttacagtaccgaaaacagagttcttgatattccagtttactacgcgcgtttaaaaaacttcaaatgtattttcnncaccgtaaactattcgaaatttttcaaaaatttacaggggtgatgttgtaagcataacaaacactcctgtgaaaaaaatttgaaaaaaatattccaacatgtgttttcgaacgtggaggttgactaagaggttgtaacaagaggttgacggtagcactcctcaacttgtaatactaaatgttttccttgaattataaaatttgcagaatcacttctattaactttttttgtacgacaaaaattcccttaaactatagtaactatagcaaatatgtctttttattacatttctttcatttttaaaactatttattgatgtagtactaatgtactattaatatggtgtaattctaaagtcttagcaaaaaatacaagcataaattatgctctagagaaaaatttaagaatattttaagagttcatttttgtatgtttagcatgatcaataaattaaatttcaataatttcagttatataaataaattatcataatataaatatatttgtgacatgtaatcacatcaaaaaattgatataaggtaacagaagttacactaaattacaattttt

SEQ ID NO: 27053 - DNA, 4556 bp, Cannabis sativa
tcctcctgtgcaaatcacaagacaaacatccaaggggccactagcgagaccgatacaagtggctcgactagaataggtgcttggagccttgagcacatcaggctgcagcaataatcccccggcaagactatttcaaggacttcataaaccacgtcggtcttgccccattccagctgaatcccatttcatatagaatccttgcaagtttgagggttttatataaaatcttgaattgggagtgccccactcccttggaagtagagtatctttactttgttaacgctgttctagcgaggaagaatggagtagagggtttttactatctcaagactcacataggcgatcgcaagatcatcgtgggtttgccaaataaaacttccttcaaggatgaattcttctggacgaccggtctctcccccatcggcacaaccactttttgcattatacataagtgattatttgcactagacttggttaaattaatacgtgccttttattcgagtttagctaattgtatatttgttatattttagacaattgtctcaaaaagacctctgattactcctgagatggccgagcggcacaagctcttgttgactctcccatacggtcttagatcatgtgactttcttctaaacgtggtcaacctaaggtctgtggatctcctaactgacaaggagtttacttgtgattataaatatcccaagtattcttcttgacagcaggttcctatcccagatgaggagaaagctcaagattgtgtggctcaggcacaatacctccaaaatactacccctcgagaagacaaagaaggagcatcctgaggtaatcaatgtggttggtcacccacagtgcttagggttgagcgtaatactctagttttattttgagatagccgctataacttttacccctggaacccctcctcatagatcacattacacataggtttgatagttggtatcccaagttccacgtctaaattaattgtactgagtcgtactacggtatagccgaggagtacggtaccatggcagatagggcaagtcatatagatgcaagctgggatttagaactaattaatccctatgatatatttaggatcacatgttgtcgggattttagtggatattatagcccttcttccttgtcttctagtgattctggtaaattccttaggcaggaaattataccccaatctccccttttactcatttttcaataaattctaacactttatcttgtctcacagaaatgcatttcgagggccgcgtccactggaaagggaagaagagagtggccacctcaaaggctccttctgatgtcgaggtggagccccctaaaaggcaaaagaaaactatagctaacaagaaacgagcctcctagactgctaattgcgaggttcctgagactgaaacctaggatgcgattcctcctccagtctccgcaagtaccgacaagcatcttcccaaagcgactcaagcctctgcctcctcgagtcaggcccttgaaacatggcctgtcgaggctggaaatactggcccagagttcattgcagagtttggagcggcaatttgccatcatttcaaggctctccttccccatgtctgggatttgataaaccatgaggatttggagggggtgcttacaaggagtttgtctcacagcctcttagtaagtttccttatccttttttgttcacttcttttattcttcttcttttttattactcatgcatctttatttgtgggtatctagagttctttcctctcctctgtcacccagtaccgaggcttggaaaagataaaatatttggagggcgaggtccagaacctgataggccaacgcgaggttgtggccaagaaatggaatgatgccaaactggagattactcatcttaccaaagatgccgagaggatgaagaagaatcttgaagttgtcgagaaggatacaaaggatgagattgatgaatgcgagaagcccaaagggaaacttgatgcagccaaggtgacacttgatgggaaaggggccaaaacccaagaacgatgcaacatagttggccttcgtactatttaccaagcttggatggtaaatccgaatatctatacaagtttcttggaagaacctaaggaggaaatccttgcctactgtgagaagactaaggaggaagaagatgccgaggcagcagcagaagaagaactctctaagtctcctacgatgtaggcttggttttcatttatttttattttgtttaagcaaatggccttagggtcgagacaatggtttgccctttgtggaactttttgtaatggaaaatttgcaaggttggaaggccaacttttcttttatttactctttcttgaacgcttcgtacttttatatttgaacttaatatatatttgtttgcttgcgttttaattcacactttaaactattatatttttatcaaatccaaagtacttttaggaattcccattgctcgtattttcctttgatattatttaagtagttagtcatctactatgtgtacgagcagtttattatctactattctttttatttacgagcaattattgattctgcttcatacaaaaagttataatttgttttaagcaaaattaaatatactgttaatgatttatcactttatatatttttgattgcttatatgaatagttaggtagtctattcatatattaggtttaagtatttttccaaggcatcttggtgtcttgtttaatattttcctattcaatgcgagtcgttagtatttagtttcgcatggagcttatgagttgattttcctttctcttcagaaaggtttaattgaatgtcattcacaatttttgattttccttcctcatcagaaaggttcaatcaaaaagaactttaaaaaaatttgaaaaattttaaagtggtgggtttgcaatataccatgtatttctagataaattctggctaatcatacacatatgcccctcaagtaattttaaagggtaacactttctaattacttgaacaaatgattaactttattcataacataagttcaaaatattacatcaaaaatgtgagttacagtatcaatttactggtagtagggtcgcaaatgttccatgttccagtagttctttgtcagcgagccattcagccgagccaatttgtaaaccccgatccctactatcgcctaaatcacataaggatcctcccagtttgggttgaacactcctacagatgcgtctcttgtatttgcaaaaacttgccttagcaccaagtctccaacattgaatagcctctttttcacccttttattgaagtatcttgttactcggtgttggtatgctgcattagtaatctacgagtcagtgaatttttcatcaagtagatccaaggaaatttttaaaagttatttgttttcttcttgattataaaactctcatctataagtcgagatatttacttctataggcaacattacctgcgagccaaatgctagggagaatggagtatgtcccgttgttattttcttagtcgtcctatgcgcccaaagtacttgaggtagttcatcgacccatctacccttggcagcgtctaatttcttcttgatagtatccttcaaggtcttgttaacaacttccacttgtccattcgcctgaggcctggatactgatgagaagcttttaattatcttgttcctttcacaaaactcagtgaataattaaccatcaaactaaatctcattgtccgatactatgttcattggaattccaaacatgcaaacaatgtttttagcaataaagtggaggactttcttctaggttatggaaactagaggttcaggcatagtctatttagtgaagaaatcgacaaccaccattgcgtacctgtctccttcttgccatgtgggaagtactccaatcgagtcaattccccatataggaaatgggtaaggtgaggtcatcattctcaattccgttactggtacgcaaggtatatgcgagaatctctgacacttatcacactttttaacaaattcatgggtgtccttgttgatggttggctagtaatatccatgtctaatgatcttttttgatagactttgccaacctgcacgatccccacaaaagccttcatgaatctccctaatgttcatgtttgcttatgtgggaagacacactgaaggagaggcattgaatagccccttctatacaacttgccatctactacgtgtagcgaggcactgaatacaggagttttcgtgcatcgttcttgtcagttggaagttgtccattgagtagatagttgattatggagtcatccacgtgggcgagctatctatcatcttcacatcttccttttcgctatacttggctcatttaacatttccaccgaaaccaagtttagttcatccaagtcattctgcgaggccagttttactaaggcatcgacgttagagttttgatctctttcgatttgctcgattttaaaataatcgaacttttccaagttcttctgaactctctctagatacttggccattttcaggcccttagcct

SEQ ID NO: 27054 - DNA, 2360 bp, Cannabis sativa
acgccccaaccacgtaaaaaaccttcgtctcactttctcacagctctttattataatcatattttaacagttgccgaaaatctcggtcaacagtagataatccacctcctgaatacagtaattgttactctcgcattctcttactttagatttctagggttttctgttagagaatatttttgtaagatttatggaagattgagtttccatatgataatgactcattttatttgctaatcatggttggtggtgggttagttgatcaagaataagtagattttatattaaagttaaaaaatttaggaaatcttagcaagttgtcatgctcagtggagtacacttgcacatgagttttgtagggaatcttagaaaaattttctatttgctaaatgtgggattaattgctagtggattttgcaactttttagaggaaagcttgttgaattttgctctaagtttagacttttgagtttttgttattatcactaccatgtatagatagactctcttttgccttgagaactaaacaatgaatgtgatatgctctgatgagttactttagtcatttctttgtagttcaaaatttttttttggggtttaggttttttgttacgtgttagttttaaccaagccatgctagccaaacaagcctggagagttttctctaatcctcagtctcttttagcatccattttgaaagcaaagtactttaaaaataattccttattagatgcttcttgtaacaccctactagtttaggcatgctacagtgcttttcataattactgtacaacctttgctaaacaaagggtttatcaaaagtgataaaatttaaactttaagaaataaacatataccgtattgcatttataaaatctaaagttccgtattacattttccaactatacataatcaaaagatgtcacacagtgactacaaaattgtgagccctagttgtcacgaagatccaacactccaggtcgatctgtctcaatatgtaaaatcttcatctagctcaaaactcactgtcattcaaaaattgctttgcatttacctgcacataacatagcatctgtaagtcgacaaactcagtaagaaaagcataaaacataaatatataaccgacctacgactaagtgcccatatacctatcaacaagtcataaaccatgcaaacatgtataattgagtctcgaacgttcttgaacatagtataattgaccataataccacatgcacttagtactctaatcgtactagtgttggtagcatcaatccacactataagtacaactagccataacaccacatgcactcagtactctggtgtactagtgttggtagcactagttcatgctttcgaaagtataaccaatcataataccacatgcacttagtaatctggcgtactagtgttggtagcattggttcatactttctgaattaccaaatacatacattcacgatatcaagatgcaatcatatatacaccaactatcgttctaacggatatgtcatacatctagaaaatataaacataaacatgtacatatgtatgtgtgttatactagtcttacctcaattttgatttcaggtgtgtcggtcgaccttagtgaaaattgttgctggtaatcgaaggctctatgtcacatttctagaaaaatcaataagtgttccctaacactttcgaggacataaattgacaacaaaaagtttccctattgatagatatcatagaaataccctatgtattgtgaaaaaactcaatcggggtcctgagaaaagtcttaagatggaccccccaaattcttcctaaatcggatagctcgaaactccactatcaaattttaaaacttgcataactcctgctattctaagcccaaccttacaaaatttttcaaggtatctgaaaatatcacaatgaacattttttgtgaagaaacctgaatcaaattctcaatagaaatcaaactaaaataccgtcctaaaactacctaaatcggattgcctgaaacctccctgtccaagtttggaaatcccataactcatccaattcggattgaaatattacaaaattttttagagcacttaaaaacatcataatgaacatattttatgaagaaaccttaacccaactcgtaacagaattcaagttatcacaaccaagttaagtttaagttctttgaactcaaagttgcaaaacttttgctagaaccaccaaaaacaattcaaaccacttctaaacagtcctaaataaccttaagtaatcatttcatgaccttcctaaacttattcaacatgttctactataaacagtcactgaaacctaacaaaaaccctagaaaaccaataaatttcagg

SEQ ID NO: 27055 - DNA, 2553 bp, Cannabis sativa
ttgcaataccacattgattttgtagtatggtcattcttgggttacaatatataaatatatccataaataaacttacaaaattgaaactcctactcctttaaataaattagtttcccattaatttttaaaatcaaattatctttcaaatgagaaaattaaatgggaagatgaataaatcaacttctatattatttgaatgtaccttatgtccttcacctttgttaactccccaatatccatatcaaataagttagtttctagtgtgaaagtatcttctatatgaaattgtttgaataattaaggatttatttatcaatctcatgtaaactataatttctcatatgtatatatatttttgacaaaactatgatttctcatattaaaaaggcatatatagttgcaaaataaccaattactacaataagaaacttgaaaaaagacttattttgggttgtatttttcacttttttaataagaaaatttacatctcatactgtaattattatttttattacttttatactgttactttgtaacgttataatttacttttatactgtgtaatatttttgtttatattgtatttatttttcaaactttttttagtgtttgagtaacatttgtcacattaaaatcacattgagctagatttttttttgaagctgaatacacgtttttcaaatccatttcttcttctccttcatcttcaaaattgttgtcttcttcttcttaaccttctattttagttttctttatttgtttgaaaaatttatctacgttttttcaactgtgggtggttatgcacgtttgataagttggtgaactgaattccatttcaattcagttttttttctttctaaaatcatatttcctccctttttaccttccttcgttggtcattgtttccccatttatatatatatatatatatatatttgttttattctatccatgattattactcgttcatgttcttcttctccagtcgtaaaaaaatcctgaaaacttttgaaaaaactgtgaagagttcaacaatgggtaagaaagattttggtaagaagaaaaaattttaagatgatccccctagccttacatctcccataacttctaaaagaaagttagtagttgattaagtggaaaagaagaaatcagaatattctaaagttatcattgaagattcaaactttgattttgagcttgaagatgaatattttgagatagagaaagtgacaaaggtatttatttgttttttttttcgggaggggtggggtttttttaatcatcttgttattgtttatgttatttgttgtgttttgttttcaatcttgttatgtagtttagggttctcttgttttattgttgttttagtgtttttgtttgtgcatggtcactgattttttaaattttatatgttttgtattttgtatgtcctattcattgtttaattagtattatatacttgattttatgttttttacagttatttttttgtcgttttgaattattttttaatgtaaggggaaactttccaagggaaaggttccctctcatgatgatatggaagtccccattgtcaaaagagttattaaggtatagtatttatttgttgtatttttttttggtttattttatttttgaagttgtattgttattttacagtggtttgagttgattttaagttattgttctaggattggagtcctaagttatggttatttttcgactgtcccatggttgattggtggttgctgatcgtggctgctgagtttaaggagctttgatattgtttgacttacacacaattgactcttgctacagctccaagaattctctcggtcatcgaagatttgagccaagaaagaaggagctgatctttcttgcgccattgttggtaaactggatttggagcaccattgatcagaagtcgtggtggagacaagtcagtgagcagaatttcgtcaagatcatggccaatcaccgtgggaagaacttgagatttccatgctaaaaagttcgtgtgatcgagtttgatggtgagagaagaagtaagagaatgagagaaagggttctaggattgtgttgtcgtagcaagaggattagcaccaggatcagatacaccagctgatgacgagttgtcgccagaagaagctattgacagaggtcagttgctctgataccatgaacaaagagaaacaggggagaacagagagagagagagtgacacaaggaatgcttgaacacttgcctcaataatgaggactttcactttatttataatacaacagaattgtacaattacagaacaagaattctgttataaatgagaattcgttaagtgtagaaagaaaaaccaagaagccaactaactaatcaaatagtgacaaaactaactaactaactatcttgattatccggcactaacaatacctaataacaatgctatgtgttatatggcagagtcaaagtatagacattaaaaccatcttcaagtgtccatgtgattcaatagcttaattaattattgtgaattgtgatgtgactacctaattaatt

SEQ ID NO: 27056 - DNA, 4676 bp, Cannabis sativa
  modified_base (2780)..(2798): a, c, t, g, unknown or other
  modified_base (4502)..(4502): a, c, t, g, unknown or other
  modified_base (4639)..(4641): a, c, t, g, unknown or other
aaaccaattggcaatgagtggagtagcccatgtttcttatatatggctcaatactttcacatttaatccatgtgggacaatattctccaatacccaaaactataggaaaattgttggatctccaaactctggacctaaagcatactcaagtgcgaaagcttccaagttccatatggaaattgaagaagcttcgaaacctgcatttgaatgggagctgtcgaatgaaatgtatgactctaccaaacaatcttcacaagttgtctggcgcacttgtggatgaagaaggcgcggctttggtgaaagcgctacccaagttgcataaacttcaaaagcttaggctaacaatccatttggatccaaggctgcgagaggatttggcaaggaacattcaagaacttacaaagttacgatctctaagcctgaaatccattaatgaaagcggcaacctccaggagctgtatgtgccagatttgaataagtttacgcagctttcaagcctaactttgtcaggaaagataacaagatcttccatcatttttgatctaccaggaagcctaaccgaacttactttatcaagttcggaactattgagaggcagcctaataatgccaatgctagggaattatcttccagaactcaaatttctctattttcttgccgattcttatagcggaaaagaaattgtttgttcagtgggatttcctaagcttcttgttttgaaactttggaatcttcctaatctggaaaaacttgaggtgaaggaaggagtgatgtcgagcctaagaacgtttgaaatcaggtgctgtttgcagttgacagcaactaacactgagttacccaagttagccactctcacagaattgaagctgagtaacatgcctgatgaatacacggctgagttgaaaaggaagttgacaaagctaaatcgcaatctgccgattaaaaccttcacttttgattctgatgagtgatgacaatttacaactctgtactgttgttagccttgtttgttatgattagttacagagtttcaatacagaaatctctctacttttgtttctttagtataagttgattgcattcagactttaaacaagttattaaatctcgacctctcctactgtatttggttggttgttttatgacttattcacacaaagtaatgatagattcgactgtgttgttatttttattaagattgatcgttacaacatttttgaagtccaaaagtacataatttcagaaagaaaatatgccaactcatgcttctgaagtccaaaagcatttgaaattttgaaattttaaaaaagaggtattttgtctcttctttgcttaacatatgatttattaaaaacttgatgaaaatttggggtttcggattcttaaattttgagtctaaaagataaacctggatctagactcgggttaacgggttgtactctctcaactctttaaaaaaatcaaattttatttggtcaaataaacttaaaagtttttattttcaaccgataataaaacttaaatatttatactctacaaaatttaaattatttacagatatttagtttttcttttttaagtcgatacaacaatcaagaaaaaccacaagtaattcctataacagccgatgaaatacaaaaaccacctaagttcataaaactacttacccttacaaaccatactatatttttatataccaatttgagctgagcatcactcaagtaaaactttgacacaatgatcccacgaaaaactggtggggaacatgaccgaaccgctataccaagctacaccaacaagtataattggtatggaccaatccgtacctttttcagtacaatgctaatgccgattccttaaaccaaaaaaaaaaaaggaagtgcatggccatttttaattaatatatatgtaaatatatgtaataaaaaaataatgtatatatattataccgggttgcaggtggatttgggtccaacccaaaattcggtgatcattaaaacctaaccagtgaacccactcaatggagtatcgagtaggacccaaatcgcccgaacaattttttaattggcaggttgactgggttggatcctgataggttgatcgggtgcggattaaacttggttcagtcctaaataatcaatgaatatgttccattcaaaaaaaattgtttttatattatttggttgacgtatacacaataacttgacaatgtatagcccaagaagattcaaatgttttatttcattattattatttgtttgacgaaaatgttccaagaacatttaatgaaaatgttcctttcaaaacaaaaatgaaaaagaaaaattatacacttgataataagaagattcaaattattattattattttaggacttgttgacggtacattatatatgatgctcaacaatcctatgccatggtcgttaatactgtattccacttgctttaaatttataataaattctatataaaactattctaataatattgacacggtcttataacaatatcatattttgtgttcacaattctcttggatgcatgttattaagtattttttgtctttcattattttcgtccacctaaatgaatggagatgaaaaaaaaaaaaggaaaaaaagaacacttattttcaacttggtggtaccatgcatgatgtatcagtatcatgcatggaatctgaaagctggagcctttgtattttagcacttataaaatagcaagtctgttaattaggaagactgactgaaggtactcaaattaatatatatatatatnnnnnnnnnnnnnnnnnnntatatatataaatttatatatgtaagggtcggtctaagcatttttggggcttgtgcaaaattttaaaattgagctcttaaaaaaaacgtacacattaaaattacaattctattactagttttttttttaagattcgttcataaattttcaattaattttttttttatttatgaatatataataggaaaaaaaaagaaaaaataagttttctttagaaaaaaaataaaaattgggccttaaaaaatggtatatactaggttgatgttacatgcaatacatgtataattaatgtttttttaatcaggtttaattaagtgatattaaatgcaatacatatatgttaaattttttaatgaggtaattatttttattttttaatttttaaaatagaggatttgagatttcgatcttttaatttttttttaactattgcagctatattcgtgtgctctttagatatgattatatatatacatattgtatatatatagaataaacgaatgagtttaattattgtatgtattttatattaatctttctatgtataaagattatattaaaaaatattttaacaaaatttaaatttgattaaagaattatttcaaaacatattttatatattatatctaaatatatatttttaaaaaaataatgataatgatagatacaatagcaaagtgtggttataataaattataaatgaaattaagatttatatatatatatatattttatatatagttgtgattatacatgaatataatgtttatttttaaatatatataattaaattaattttttttatataaaatatctaaataatttttatttttaaatacatataatattattattatattaataaagaatattttgttgactaattcgtatattctattaaagttaacgtaaaaattaaaaaactccgttaaaccaataattcaatacacttataattaattatttttctttttaatcaggtttaattaagtgatattaagtgcagtacatgtatgttaaattttttaattaggtaatataattttattttttaatttttgaaataggggttgatctttcagaatgttttttaagtattgcggctatattagtgtgcatttgagatgtgattatatatatatgtattgtatatatacaataaaagaataaatttcattgttatacgtattttatattaatctctctatgtataagggttatattaaaaaatattttaacaaaatttgaatttgattagagaattaattaattttaaaatatattttatatattatatctaaatttatattttaaaaaaaataatgatagtgataaatacaagaatgtgtggttataataaattgtaaatggaattaaggtttaaatatatattttatactgtatatagttgtgattatatgtagatataacgtttatttttaaatatataattaaattaatttttttttatataaaatatctaaataatttttatttttaaatacatataataatattattatattaataaaaaatattctgttgactaattagtatattctgttaaagttaagtaaaaactaaaaaactccgttaaaccaagaattcaatacacgtataattaattttctttttaatcaagtttaattaagtgatattaagtgcaatatacatgtatgttaatttttttttaattaggtaatntatttttattttttaattttagaaatcggggttgatcttttagaattttttttccctattgcagttatattgatgtgctctttaaatgtgattatatatatatatatgtacccattgtatctttatatattaaaagnnnctatctaacggcatttcttggtttgacagaatata

SEQ ID NO: 27057 - DNA, 5446 bp, Cannabis sativa
attcttattaatagatgagagagattagtactggttaatggctgacacagagcttttgtttttataattaacaaactcaaagtataatttaattaatgcaaaaaaaaaaataagaacaataataagcgcagtcggatggtcgtgcctctttgatagtctcaagagttaagcatacattaataaattataaaatccatgtcatagaaatacatataatctgtagtacatctcatacaagaataatctttattaattgtataatccttaaatttctctaaaattatagaaagaaaaatcttatcaaacatgtggtttggccatattaatagttcctatttgttacaactttatgaggatgttggcatttggcatgggaaaggaggaaatatcatgagtagttctcttcgatcgaatctttgtattatttaaagttaaaaaaaaaaaaaaaagtagttttggattattattgtttgtgccttcttaagtcaacacttaggaatttctaaattcattaattctcactttttacattaatcctctactacgattgtacaattctgcgttcaatatatgatttttcattgaaaaagtttcaaggaaaattaatataacaagcttaaaactcataatatatatatagagagcatatgtatccaaaaaaaataaatcttattgcttaatattccttccaaaatttaccaatatatgtaatttaatattattacaaaactactaaagcaaaactaattaagttgaacagtttttatcattatataaatgtgtctttaaataaagcctcaatcgtactgaatattatttttttgtagcaatcaattacgtattaattatttataccaatatttaattattcataggagagtacgtatatatatacacttacatacatagttggcctcataaattttctttttagacgcgttgattagctaattaatacccttaatcgttcacgaatcattttattttatttttttaaaagaaattgaaattaaattaacaatttatataaataattggtaacatatctatcttttagttttggtctttacaaattaattggaaggtagatatatcttatgaaaaattcaagatcataacatgtgtagatgcaataatataatcactattaaagactataataaacgatctcaatatgaataatatatcgtgacgaaatttcgcaagagagtaggtgacgttgccaagtattagtatatatatacacaaatatgtatatttatatattgattagatcacaccgacattatggcagcaatcagattctcattctgatttatgtattcaaatcctgaaacacttgctcagactgagaggtatagctattttacataactaattaaacaaaatataactgatttggattacaattttccctattatatatgtactgttcaacactgttagtataataacttcttgatcaatttcgaatattctttgggggagattcgtaaaaaaaaaaaattgaattaaatctgtttattatgatgacaatcggtaatcagggacctacccattcattgcttggggtatattatatatatactaaaaaaattaaatatatattttaaatttgataattaaaaattatttcatcaaattccataaaatgtattgagactcggctagcgttgggttgggatgatgatggtgatgaaaaatatattagctagtctgtgatcactcaaaaacagacattaattcgaattaatatttccacctcagtatatacgataataatgattttttatttaaaataataataaaataaaataaaataaattgtatgtgtgttgataaggttgtgtatcgaggtgggaccaaaaaacagcgcaaggccatggctcaggcttttcagcaaactcgatatcggacccaccgccccatacgactgcacctccccacaccggcaacgcgtgctttccatgtccatttctctctctctctctccaatcaatcaaaattaatggctttcaataaagtagagaaatacctcgacttagaaaagtcttcttactatagcttataatcgtcatcctcaccaagtccaccaaatatagttgcatttctttctaccctttcttttgagattcaattattcaatatttcttttttctttttttttcagtaattattcaatgttttattaaatatgcaaaaattatcaatgttttgtttgttcatccaaaataagaaattgaaaattctttaaaaaacgaactttgttgttcgaacatcatccgaattattaaaattaattaagttcataaatacatgcctctctctctctctcaatattcagaagcactatatatatatatgatgaatatttcacacgaatttctcatttatataatatagaatcatcaacacatatatttatagaccgacttatggtagtatggcaaaacagtattaatttctttccctaataattctctctctttaaggttacttaatattggaccctttttttctcaaaagttggtattatataaaaaagaatttctcttttttctttctaattgtgcaaaaaattagagcatatgaaagggaaaatatcacaagtctcaaatatcacatcaacgtttaatataatatatatgtcattataatttgctaagaatgtgtttacttaagacaacttttttattccatatatataactgagaaccaaaacgttgctttctgataattaatgggagacttaagttagatttagggagaagttagagaagacatgtggatccaaatccatttgttttatatatgtcaatgtagttatttatatatatacatatatttataagataaagatatacagctttaatgatttgtaagtttgtaacaaaatccatcccttgtctaattttgacctcaaatctttctctattcttatcattcatatatctatctgtacagctaccactcaacaaggatggaaacccacctaagttcttaaaaatataaaagagtgagaaaaaaggaaaaaaaagagatatcatgtttatccacctgtcatacattgcagtttcattcattcattcatagtctagtcgtgcacaatttttatgaaatgaaaattatgttcagaggagggccctataaataaggaccgtccgattcgatatatgggcctctctgattcttttgacacctctacacacccacatggccaattaacggttacaatcattgtgctgggtcttccttgtgggttgtgataaagtataacaactcagacccccaccaataatctcattcatcataatctatactatatatatatatatgaaaaatataattataataaataatatatatacactactgtctactgatgatgatgcactaatattagtgcataattttcatggtatattttagctaaattattgaaaaataagcaaaatatctcttaatcttgtatttcattaccaaattatatcttaatttctcggtattatcctgatctatatataatacaaattatattatataataatatatgaagatatagcaataattaagtttgtgcttaataatgttggatatttgatggagatcctgtggccagtatcaagcttttggactattcaaagaggtacctagtttatcgtacggtcgtgatctaattgtcggcgggccaggacatgccaacttatatattaaatcatttttatttcatataaatgtgcctttgaattggacaaataacacaataataaatagattaattagatatatagagatagagagagaaatttttaaatatttatatatacaaaaattttataatattagtggttatcaaagacagacatataatattctcgggtgcatgtgattctcaccttggcaggctagctaagctgtatatacgttattttgatgattaatgtctttgtgtttattatctaaaaaaaaaaacccttgtgattctcaacaaattttcatatagaaattaattgtaattaagctaataattattaataattaaattatgtctcgtttgttattattattatatttaatttaatatttattgcattgctggagttgtctggggcatctatttcacaaaacttgaatcagattggctaaggcactgggatttgtttggcatgcctcaaaacccaagtgcaacaaacactttgggttctgcgtgagaaagaatcttaaattcttcatctctctcctttattaattattatattttatatatatataaatgtatatatgtgagtatatactgatggggaatatgagagcaagataaataagttctttctctgtatcaaataaagacacatgtagctgtttttcaagttggggttttggaagtaaaagtacagtgctctctcttctacgttcttcttcttcttctgatctgaaacaaaaagagactctcaaagaaaaagctttctaggcttctagctagtagtcttctcttctttcagctccttttaaccaaaataacaggttagaattattactcttatactatacatatattagttttccttttgtatatcttctgtttgaatcataatttagtataggatctacaactgcttagttgatgaatttgcaggcttaatttgatgattagtattaatcgtctatatattttgagtatatataataagttccaaatactctttctctttctatttctctctatctgatctctctccctctgatctatatacacataacaaaactacactagtgccggggtttatggtttatttttactcttgcttttagaaacattaataattcgaactgtacgtaattgatctgatccatcagccaaaaatattttcaaaggataataattatcggatttattataaccatgctaaaataatgaagctaactgatatatttgggttggtacgtactactactaataattaagatattgtgatttgtttttggttttttactaaaataattacttgttcgcagcatgatcatcaatattatgtgtgtatatatatataccacatttaagcgtagatacgtgtatgtgtatgtatgtatgtatatataggctatagccaaattataagaaccttattattatgatcgatattattcacaagttttcctatataagacagaatgtagctgttttttgatatgtatgtacaaccaaccaaaaataattggtattccaacccttaatattagcaaacacaccatagcttttgtcatatatagtttgctacatagctatctaggcaagagtataatctacgtcataaaaaaattgaaaattttgattttaattaagaagaaaattcaaaattcaggccagtagggtatataatcggctaagaatgcggattacagaaatcaagattggagaacatgtgtacatataataataataata

SEQ ID NO: 27058 - DNA, 3334 bp, Cannabis sativa
  modified_base (437)..(444): a, c, t, g, unknown or other
  modified_base (2930)..(2931): a, c, t, g, unknown or other
aaaaaaaaattccatgagaagaaattaatggtaaaataaaatagtctttaaatatattaactctattgaaaaaggggatatacattttaaattaattgaggtagcattttaattggattggctcggcttggctactttattgtcaccacatatcatctcaaacttaaatgagcacaaaataataatttatgggtattctacgtttttttccgcagtgaaagtatgtaggaatagtaaattagtgtcttttggtcggaggtaatgaaatggaataaaaaggaaagaaaacaatttttatttcatttctttgtttggttgcatattaaagtgttggaatagccttttcaccattttggtataaagacaattctattttgaaatggaaagaaagatcattccattgagaaaaaaatttataatttttttatcaatttttnnnnnnnntttaaattttattccattccatttttattcttattttcattattacatttttattcttccaaactaaatgccaaatgtttttaactttttacttttgtttgaagacagatttggagtggtaagcctagcctaggtagctgccagaactgaatgaaagttgcgaggttaattggtagtttccacgtcaaatcaatatagttggtaagttaatttttgctacaacatttggcattaagttacttattatacttctttaccaaaaatgaagtctctagtcttttgattaaatgtactagtgattacaaagtattagtctaaattagaaatatttatgggagatgttagagtaaattacaacaaaaatactagttttattccaagtaagtgtctaagtcttattttttatgataaaaatattttctgttactagtgtgaaactttcttggtatctctctgctttctaccttataatgtgtctgatggcgtgtcatgtcattaaaataaatgtcacaccactatcaccatttaaaattaactcctgccacatcatctattctaaaacttaaaattaaataaaccccttttaaaacaaaaataaaaacttttaaattaacaaccataataacaattcaaattatatataaaaaaataactcttaattaaattttataaaaatataaagtagacttacaataaataaaacaattaaaattaatataactttacaaaaataaattaaaaataataataacccataaacaactcaataattaaaatctaggaattctcttccatttcttcatgctttcttaaagttgtagtagatagtttaataaaaacattaaaggactaatttataacagcttatcatatatgattaccaaaaccaaaacacaccattattttgcagtacatgaacaattaagcttgctcctaaaatatttcaaaaaaaaaaaaaagcttgctcctaaaaactagtatgaagataaacaaaacccactcaatcaaatacattactgccccttggagacccaataccctaaagctttaaacatgttctccggcactgaaattgcacctaacaaacatgttcacgcctcattgacaagttggaagtcctcatcggaagcagggaggccatttcggtgagagttcaggagcagagcgagtcaatggttgttgataatctcgacatggagtgtatcggagatggcaactcctcctcctcaagcgacaacaagccttcgatacacatttacaagaggcccaaatttagctcaagaaccctaataactcctctatttgtttttatatttacccccaaacccaaatcgttacctaacaaaattaaaattaagggttttaggaaaatcaccttggagggagaaaaatggaaagcgaagaccagtgtgcaggagcggagatcgtcagcgacccaaaggagttctatcatagatcgattgagattcttgaggaattaaggtttttgaaggggattctactattgtaggatctagaagagtatggaagagtgaaagagactaattttgcagctagatgcaaagaagatgaagagacatgaagaaaagaatgtagttcttgcgaaaaaaaaaaacgaagaagatgaagaaaaaaaagacgatgacgaagaagatgatatgatttattttagtttaataaaaatataaattaattagtttttattttattattgttaattttaattaatttgagtttttatttagtgatgtggcaatatttaagtgagttggcaaattttaaatgaattatcgacggtatttttttttaaatgatgtggttcagttataaggtgacatgtggcacattacgtggctgtaaacggtgaggtacctacgtaagctccacactaataacggaaggtatttttaccgcaaaaaatgctacttaagtacttatctactactcggaataaaacttaattatttatgccgcaatttactcaaaaaattaaaaaataccttctttttctatacattaactaaatttacctttaaataaagtttaatttaattatacgtctttttatgagtattataccaaattatcctcacacactcatataactaagacataatttcaaatataatagatttgtgataggggtaaaattagtagaatgattaaaaaaagaggtaaatataatatattttgaaaaagatggtaaaaattaaaggcatgaagatggtaaaaattaaaggcatcaagttaaaaaaggtatgtagtgtaatttcctccatatttattttatagaaaaattactttatatatcattttttttaattttattttttctttcaaatttacagtgtgagttgttttggtggttgctccagtaatttttatgtaggttgttatgtggattttaattgtaatttaaattgtttcgttaattgttatacaagttactatgtgaattttcctaaaaataaaaaaatatatatttnnaaatataaaaatgaaaaaacttctattttgtaagcattggagatgccacgagtagctagataataagcaagataatgaactaccctttcatttaagaggaaattttaaataaatatattattttttgtttatacatcttctgttacatttttttttattccttttatggtatttaatttgtcttatttttaaaacgcttaattttaaagtcttaagtggtattttttttacagttaattggatataaagtatcttctgtataaaatgattatatagaacctagaaccgataatagtgaaatgtatgaatttctaatgttgtttttcatgtgaaagtcggtttagtaataaaagtggcgtttttgcatttgagtaacttgtatatttgcaaaaaaaaaaaaaaa

SEQ ID NO: 27059 - DNA, 6385 bp, Cannabis sativa
  modified_base (30)..(50): a, c, t, g, unknown or other
  modified_base (6330)..(6342): a, c, t, g, unknown or other
tcatatttagagtgttaatcaacatacttnnnnnnnnnnnnnnnnnnnnngtaaaataatttccaacagattgttgaagaggcaaaacaacatgtgatcaaagaacaggctgctaaggatgtcgtcacaacctcaaaccctagtgttggtggtagtgtaagtaaagggactgacaatggcaacccagaccacaagcggaaggctgaagctttcgaaacaccgggaaataatagaaagttttgtgggaacaaaggcgaccgtcatggtcgtgggtcttcatttatggaaattatgacttcatggaactatttttgagtagctatgggactaatttcgatatttacttgttgaaaatcaagtttggaactttttatagcttaagtccaaacattaatagtattttttgtttaagggattgattttaatttctgttacataaggattttttttatttatttatggtatacatgtgtcctgagaagtttggaatgatttggatagattttggtggtattttagagagtataaaatttggaactttcgacccctactacgaaccggtccaccgtttggtgcaaccggtcaaccggtttgtgttaggaaacggttttctgtttctagaaatttcaaggaaatcaaaaattgtatttctgtcataacttttcacttgggtgtccgttttggatgtatatactgtttcaaagcttgcaatgagctctacaatatggtgtatgttttagagccaaaatataaattttattttagtgtacttataccacgagatttggtagaaaaccctagattatcctttacaaatattaagtagcattttaggataaacacttattggtttaccgttgttgtgacataatgctgaatggtgtagtgtgacaatgtcttttcaggttacatttatttacattttagaaaaagacttattgtcatcgtgcaatattttattgcatacactatcagagacttatgctcgaaaccttacaagaaaaggtatataaaatttgaaaaaaatagtgtgtaagtatcatatatgttgactgatgatgttttcttatatgcctcgattgttgtggatactatttggagggtgcgcaatgagaaggtccataataactattctcctgacataaaaaagtgtattgataatatttgtacttcttatgcagattttcatgcttctttgcttcctagtcccactccagatctaaaggaagtttggtcccctcctcctccggattggattaagctgaattgtgatgtcaaggtgggatttaatagtatgtgcattgctgttgttgcaaggaatcattttggcagagttattagagttcaaacggctcgggaagatttctcggatgttctttgcggagaagctgcggcctgctgcttagctgtgtttgtagctttagaaatcggatccaagtttgtgattgtggagaatgactcgagggtggttatcaatgctctcaatgggacggactctcgttgggctcttgaaaactatgtctcattttgtactaagtcttctcccttttttattagttgtaatttctcttatattcgtagaacttgtaattttgccgctcataatgtggctagatgggcgtttgctcatcaggtgtttgggactatcccggtgtcctccttacctgacaacatattttgtaacgaccgagaggtctaatttatttgaatttatgatataaacacttcttttcaaatatatatatatatatatatatgttgactgatttttttaaagaatatgtatatgtgactgaattgtttattgattctcttgaatattctttataattttaatttttcaagtgttattattcacaatttttctcttttacttactcttttcgtctacaggatgatactcattgatcaaacgtgtatatttttttgggatctttattttttcatgcatttaaataaaaaatatttttgaaggaaattaatataaattgaattataatggtgaataagtgtaatattacaatttatttatttgatttctttatattttgacttcaaattttttgttcacttgccatttatatttgcattcatgtatattactttgttcattttgtcattagttcaaaaaaaaaaaaattgcatatcaaatatttttttacttcatgagtttactatacatattaattggagattgtttgtttctctttccttaatgttatttatttctttgatcttgaaaatttttaaaaggaaaaaataaaagagtaaccatttttaaagaaatttgtatacttatttctttttcttctctcttctgatacatcgttctcattttggctcggttgtttattttttcttcaagcttattcaggaacaatggtgattatttgtacttgtgttggtttttttttttttttttcacaagatggtgattttcctgttactctcacattacttgtcgttgctcaatcaaatcttggttctaaaagggggagaaattttatcttagtcttttctttgtttttgtagttcctttggctactttgataaacacaaagggggagaagtttgcacaaaatcctttctggtttgttgtttctgcttcctcttattttgagaggaagttttgtggttttagtttcaaaacttttatgttttattcttgttcttgtatttagggagagtaattttcatatatcactaacatatttgttgtagggttgtgtatttaattttgtctactaaatttccaaagagacatattataaaatccttagttgacatatgtggtaaagatgacaaaattaattatgtgtggtattttcgaaataacgttgaaatcttgtttttgtgtgaaaatattttttaaaatcagattatgttatatttgtcaaataaatatgtagcttctttatttagaatatattatcttgactttttatgtttaaggaaaatattaatatttattttattttaattgatctaatttctttgccaaggcaccaatctgtgtctttaatgtatattttgtttccttttatatacttaaactttgctgaaaatctgcttaggcatactgaatatgtttgaacggattcagtttctttgaatagattttaactttcctttttgggaataatttttcatttattgcctgattggttcattgcttgtaaagcacgacttgtggtgtattaattgagaatgtattcttactcgggttgtgattttatatggaaagactaaattgtttattatgtaataaatactatatttatacatggtatttctttataattgatttatcttattccttttctgatatgatctacattaatctctccagctaggattcgtgatgtctaaggaaaattcgtgggaatgaacttgacttttatgaagtctagattcaaaatgctaaatagacagataagaatttcgtctgtacactttccatatttgttcagacagaatttcgtcatttattgagttgttgtaaggaatctttttaatgacttctctttgtattcaaatctttggagctcatttccgggtgtcatttattcttataaatatatctaaactagtagcaaaatgtggaactcttccacttattaattccttatattttagaagagagtgtttcttttgtaaatgatagttattctgttattcgttggtgaatttgtgtgtctttgtgattacttttatgtgaagtaaatttcaaattgaagaacgtaaagaagaaacttcgggagaaggttcatccaagtcttgcatcgggaggaagcaaacatcggtatcttaggtaaaaaatttctacaagtcttacatcaggttgaagcaaacaccgctatctttggaagaagatttctacaagtcttacatcgggagaaagtaagcatttatcaagttatttgaaggatgttcaaaccttgatgtcttcaagagagtcattcagcaaataagaatatatcaagcttgtaacaaaattattagaaggagtctatattttgtttaagataattactttgtacttgttgaaatttgactaatgaattttatctctaagcgtgaccccgtgaattagtaacaatttgaaaagattgttgataatacgtataaaatatcgtgtcattttaatttttacaattttactttttacaatttaattaattttgatttataaagttcaatttctgatagaacagatttcgttcaaataattttacaatagttccgcattaaaaattatttgttaatttcacttgttaatcacaaaaacggaatttcaaacttttatcctaaactcacactatatagatagtataattgattagaatagtgtaacttaattgatcatacccaggttgataacttttaggttaaataatcataactagaacaccatttttttcagaagtaatcaaattagattaaagacaaattatgtcaaatcacagagagaagctctcatcataaataagaattaacttagtcaactaggaaaaatgtgttcccatggattaatcttatcaccatctatataggatggcggctccacttaattgaaaggctttcttcttcattggttattaaatgcctgttattggtcttaacttagttaggtgttcaatggggccacctcaatggtctcattcatactcattgcttcaactataaaattttggttaagaaacttcaaactatcaccaataacacttcttaagattctcttaaaggagaaatggtgtaacaaccaagagttgacccattcatatgattttttttgttagtactaagattgtctttggaataatattttcttaaaatattttggcaaactaccaattttgaactgtgttggcaaacccaaaacaaaaaatgtaaaacaccacttactgtcttctaaagacaagtaataaaaaaaccctatatattgttggacaaaactagcacaaagcattaaatgaaatgaaagcctcttggtcaaagcattagtgatgattaagcatgcacgataagccataggcagacctaagaagggacattttgtaaaaaaaaattagaatgattagcatttttacttccataagtttttacactattttgaattgagtcttttatagtatatgatttgttaaaatactcccacaaaatataattattataataacgtagttctactatcacattttattctaattttatcgtgaaataagtaaaatagtgaatgataatttttaaacaaatgcaaattatatttttatttttagtttttcgatatcattaaagtaaaaaaaaaaggataaaaaagtatttgatttatattcatttatcaattattccactaaatcacccgtttcacgataaaattgaataaaatatgatagaattatcatgttacagtaaaagtgatatctcgagagatatttttaacgagtcgtatactataggagcacaacttagtaaagtaagaagtttaagtagcaaaaatgttaaatattaaaaatttatatgtattttggcccaatttaacttaacttttttcataaactattttctaacttttttaattaaaaagttccttcaaagggtgtttgaataaaaaataaaaagtgttcttttttaatttaaatgtcattttgaaaaaatataggatttgtagcttcttctgaaaggagttttgagaagcgatttttaaaattaaaataatttatataatttttaatttactcacaaaatttcttttttttaatgatatccaaacactttgaaaaatatttttcattaaaaaaagatcttcacataataattattcagacggtaaaaataaatcaaagtctatatttattttatacttctagctataaataaaaatagaaatttaaccaaacgagacatttgtaaacttttaaaatacagtgattttttgtaaaaatataaattatatatgtaaaaaaaaaatatatttatacccctcttttacactttcttttatatttattcttcatttttttttgtaaaagaaaaaagttacatttataatcttcttttgtatcttcttttatgtttaattaatcctcattatttattaaattttttacatttttgccttttaattttatttttctttcaccccttaacaaaatttttagacaaggtagtatcatgttgtttaattaatattattttaatacatgttgctggtggtaaatcaattcaaaattgttcattttcacaaatatttgtatatatatatataaatattgacaaaaaatttgtaatgtactaatgtgtttatataaaggggtaagttgaaaaatnnnnnnnnnnnnnatcaattaatcaaatttacttctaattttatatttaattgaaa

SEQ ID NO: 27060 - DNA, 4430 bp, Cannabis sativa
caagcaaggcaaggagacaatcgccatgaagagatcccagtggatgagcagagtgacagagcaactgcctccatcatgactgaaggggaaggtgggacacaaaggcagagggttccatcacccataagacaccctccaccaccaatgccaaaagacccaaaaacctcgcatcataaatcgggaaaagagaagaggatttattccataacctcaagctcttgtactcacatacgcaatgaagagatgaacgagttgagaatgaacaacttacgaccggaagaaacagttgtaaatatgaaaaatgtgttggacaaactcttaaaagggcattctgaggtgcctttgtcaagaaaagagagccagatgtaagaaaaaaaaagctagaggaggaagggatgtccaagtactcaacgagtaacacgccagagtcctcaccaccaaaggctcggcccaaaatgatctagaacccttgtcgcggccaaagaaaactaacttaaaggttgtctagagcaatttaagggaaaaactcaaccaaaaagccactgtcgagaagtgagtgtcgtcgctggtaatgccctgccataaggatgacccaaagcacacacttcctgaccttgggaaaagttgaacagaaggaggtaggagattgacaaggaaatggaagaccttcgacgaagaatagtgtctgccgcatcggaggaaggtagttgggatgaggatgattttgatgatgagccacctttctctagaaacattcaatctaaacaactacctcccaatttcaaagagcctaacatactgccttatgaaggaattgccgacccaaaataccatttggacgccttcaatgaaatcatgaaaatgaagagagttacaagcaaggcaagatgtcaatgctttgttgtaactctcaggggcacgacatacaaatggtttaaaaggttgacccccagcttaattacctcatggaggaagttcactgatgaatttttggcgcaacaccatgcctcctagactacgtcgttccaaggacgagtttggccaatatcaagtaaggagagaccaaaatcttgaagagctatatatatatccagcattttaacaatgaagaaaataaagttggaagattgtccaaagacgaacataagatggctatagccgtcggagttagaccaaagagtaagctatggaacaacatggtcaagagagagctagatgatctggaggacttctatgaaagagccaataggtacatcctagtggaggatggacatgagaacttaggtgtaggaaagagtgatcaacccaagaaaatgcctgctaaggaacttcgcaagaaatgaggatttgggcacaaagaagacttttgaagcaagaaggtcaagagagaagcagagccacaacaccatgaatactcccattacatggagttgacttactcaatggaacatattttttcatgacaaatgagcatcaggtattgttcaaaagaccatcacccataaggaaggaaagggccaagaatgacccgaacaagtactaccaattccacaaggatatagggcatctcacggaggaatgcaagcacctcatggttgagattgaagaattaatatatcgtgggtacttgggaggatattgaagagaaaattagaggccaaatgaatggcacctatgagaagtacccgacaaagcccccaaagtgttaagagaaatcagaactatcataggaggacctagcctaggaggggacactcggaaggggagagacaagtacacctgagaggaaaggtgggagccccaagtttggagcttagaataaagacttctaaagagtttcaagggagaaagtgacttagtcaccttcatagaggaagatgcaagaggagtgcatttcccgcacaatgatccattggtgcttatagtttaaatggccaacaccagggtgcaccaaaatttggttgataatgggagttaagtggatattttatacttcacagtcctaaagaagatgggactaggacttaaggatctaaaaccttgtgcctcactgatatatgggttcaccagtgacttaattcagccataggggatgatagaattagctttgatcattggggaacaacctcaatatgccacattgatggccactattgatggtgagaactcgtcaactaatttagtggctaaatataaagtaaacccaaaaataagatgatgaggaagatgaaaagatatatcaatattaatggatgaatgtttgctctttattgcattcaatgtctgagttacacaaataattttccaaccccctttcacatctgagaaagcagtatttataggctctaatgacctgagttacacaatggtcccaagtagataagttgtcgctttcgggctacatgttgtagctgcaggaggtggtcttgtacctcgtacctttgtttggtgtcaaatgatccctagctatagagatggtcctcagttgcaaaggtggtctctggtcacaaaggtggtccccagtcgcagaggtgtggctgcaaagtagaagatttgatcaaagatttggacgagatgttcactactctctacaagtaccgaatgaagttaaattcattaaaatttgtatttggtgtgtcatcttgaaagttcctaggcttcatggtcaatgaaagaggcatagaggcgaaacgtgagaagatcaaagccttgatagatatggaatcgcctaagaataggaaagaggtgcaatgtttgactgggcaagtggccacattgaacaagttcatttcttagacacaaacaagtgtctcccattctttatcaccctcaatggaaataagaagtttacttgggatgaaaaatgtgagaaagctttcacaagcttaaaggagcacttaggaaatccacctcttttggccaatctggaaaggggagagaagttgtacatgtacttggcggtctccaaacacaccttgagcattgccttagtaagaggagaaggaaagcagcagcaacccgtgtactacattagtaagcattttgtggacactgaaactcgctacccaaaaattaaaaagttggcctattcactcattgtggagtcgcgaaagttgaactcatactttcacacacatctaattgtggtgttgactaatcatcttttgcgacaagtcctgcacaaatctgaaacctcaaggtgcctactcaaatggttgataaagctaagctaatttgatatcacttacatcccaagggtatcaaatcaactgtcaaataatgatggaagatttcatggtagagttcacctatcatttagatggggaggattaaaggtaggaaactggtggagagttgggagaaagtggagaaggagaggccacctaggagctacatgtagacggggcctcaaatgataatgtagcaaggattgggttagtgatgttaactcttggaggaatcaatatgtattgtgcaataaggtttgccttcaaggcgtcaaacaatgaagctaaatacgaagcaaagttggtagggttgaagactcgccaaggatttaaagttacttgactacaaatttttagtaattcacaataggtagtttttcaagtgtggggagataccaagcaaaagggccaaaaatggtggcatacttagccaaagttaaaagctacatggagaagctacaacatttcacaactgagaaaatccaaagggaaagcaacgtcaacgccaatgccctagctaagcttgcatccatataagagattgacattcaagagcctgtgtcggtggagttcttagcccaacaacccattgagagtgatcaaatgttgcaagtaagaagtgggaaatcctcctggatgacaccgtacattaagtacatccaagaagggaagttgcccttggacaagaaggaggctcaaagaatccattataaagccactagatatgtcttcatggatgggattctatacaagagaggtttctccactctactcctgcattgtataagagaaagtgaagcacaacaagtgttatttgaaatacacagaggagaatgcaaaaatcatgcatgaggctatttcatgtcgatgaaagtgttgaaataaggatactaatggcatagtctagaaaaagacacaacgaagttcgctcaaaagtgtgacaaatgtcaaagacacaccaactagagcaggtgccctctagccaaaatcacaagcatgactagtccatggtcatttgccatgtggggaatcgatctaattggagctttaccaataggtagtgccagggcaaaatgtgttatggtggcaatagactattacaccaaatgggtagaagcaaaggcctttgtatcgtccccgcttcaagtctccattgggcccttacacccatggactaatggctcttatacacgagttcgtcac

SEQ ID NO: 27061 - DNA, 2007 bp, Cannabis sativa
tagccataagagttccggaattactaaatatggggctataggtttatctccatgaatgagcttgctgttttcaagatctgcaaaaaataattttaaaaactaaaaatggtatatttgcatttttataaattaaaatagtttcttttatcagattaacataataatacaataaaacaactgatcattgaccatgaatttgcatctaaatttttcataaatttccttgcgaacaaaacatgtaataccatcaacagaaaagtgaagaaaagattccttaaaataacatgctatataatatatatctaattattttttttaaagaaaagattcaaatcagagaaataaataaattaattacacaatactatgtgtctttatacgtatggaggaaaagagggaaagaaaaaaaatgagggatttgaaaatgaattcctcaacttcataattgagtacatgataaaataagaagaattgatgaatattatacctgccattgatagactttgaaggaaccaaaccagatggatcaaagaagttagatgatccagcaatagttgggaccatagagaaaaaaaaaacataaagattgatctgagtttattggtgtggttagaaagaaagagagtacacaccacctttaaatttaatcaattggacaccatacaataatacttaatacgtttattgctatataaccacataattcagcactcaaatctatgttaatgattatgattagccctaaccatatagttttgattaacaaattatatgtaatcaagctgaagagagagagagagagatagatagtgtggagtggagcccacatgcatggaaaaatgaaatggaaacttcacaagaaagtctctcttagtcacgtgcaccatgtcaaccactaccactattcatcagtcaacaaaagggcaaaattattaatacctaccttcttaaagggtaaaaatgtcttcaaactatcaccttattaccacacttttataatagtaagaaattagagagatcaagcttggaggaaaataaaattttcattatccaaaaaaaaattaatacctaataaaaatgagcataattttatatttgtcaataaatagcctagtggctctactttttttctagtttgaatcccgcctccccaatgtaaaaaagagcaatttgtggcaaaactcctttatattttaatttttatacacttaacgcccttattttatttttttatttttgaggcaaaatccccttaagtttatttttctttgtaaatttgatacgtcagttaaatattaccattaaatattaattggatgaccactatatacaactgtgattaagtaacagtaaaacctcgaagtcgatacagtagtaattcaggttgtatttaacagtaatatctaattaataccttaaatttgcaaaaaaaaaaaaaaaaacttaagggaagtttgccacacaaaaaaaggttaagtgtataagaattaaaatataaaggggttttgccgcaaattcttctataaaaaatagaaatgagcatatactgacgtggcaggtgaatattggctccaaagaggctcttttctgaggtgtagctacaatccgtatatttttctttcgtcgcgggaataaataaagaagcctttgtgaattaaagaaagaagacctatgttaagagcaatacaccatattgcaccagaacattaccccacattctcattcatttgcttagccaatttgcttccaaattagagatggaaagttataccacggggatgggtaaccgcggggacccgctcctaatggggtggggattccctgtcttggtggttaatagggtggtggtgggggacaattttagtacccgaagcggggatggggcgggggcgggaataatactattcgtactatatccgaccccgatatagatatatataatttattttttattcttaacatatatatatagtatatatatgattaattttgattatcatccataat

SEQ ID NO: 27062 - DNA, 1135 bp, Cannabis sativa
  modified_base (965)..(970): a, c, t, g, unknown or other
ctaagacctttcaaccaagctatgcttgccaaacaagcttggagaatccaaacaaaataatccttcctccttgccactcttttaaagtctaaatactttctcaagtccacctttctgaatgcctctttgggacactccccttcttatgtctggcagatcttgcattgggagaaatctctcctcaaggctggcctatgttggagaattggtaatggagctactacttgcaacctcgaagatcactgggtccctaactgccactttctccctatctcccgtccaagttaccttacccatgtctctgacctgctcctccctgatggtgattggaatatccccctccttaacaatcatttccctaacgatactgtcaaagagattatgtcccctcctcccctaacattaaccatagtgattcacttttcttgcaacatactacctttggtcactactctgtcaaaaatgggtaccatcttgccaagtcctttacacatattgcccaaccctcttcttctagcactgataccctcaactcttggtagaaatccctctgggatcattgcattcccccttagctaaaacactttatttatcgactttgtcataatacccttcccactgctgaaaatattttccatagaaaatgtctccactcccccacttgtccttgttgtcacatgcatcctgagtctgtctaccatgctttgtttgattgtgagggtataaagagggtatggtaaggtacgtcctttaaacatgctctcaataatttaaaaggaatgcatattcttgatacactattatacattaagtcctatttttctactgacacttaatcttttcatgtgtattctttggaagtgctggaatagtagaaactcttttttgttcaaaaatcagcaagaataccccacgaggatctatcaagatgcaaaggaattttttgttgggctttatgccctaannnnnnctctatttcaatgtaatctctatcgtttaattaacaataaagagacagaagtatttcatcacttatatatgtgtgatttggatgtgattcatgttgatctatgtgtttttgatgattgattgatgtttgcgatttttttacaaaaaataattggattttcgttct

SEQ ID NO: 27063 - DNA, 1180 bp, Cannabis sativa
taataagtcagcccacttctcgacttccaccacgtcgggacctctcagaaaaattggaggtgtctgcttgcagaaccttatttatagtggttccatctgattcactgcagcaatcagccccgcctgcacagcagaggtaggagccacctgcatctctgaagcaggcattgcaggagcacccttctaccttaggcatctgatttcattattgattctatcttgcattattgcaaacttattttcccactcatgggcagcctgcggcgggttacaatctgcccgggcgcgtgccctagctctagggcctctatctcaggccatgtatatttgggtgaatttgaactccttgaccgccactggatctaaccgagttattctggctcttcgtgtttcgcctggtgtccattctattaaaacagtccgtgaaaccaagagctagcctggtcagatcgcaatcaataataatttattatttaccgcttattttggaaattaaaacatgcacctattcaactattaagctactaacatgatttctatcaggattttcttataacatactaataaaataaactactaaggaaataaaggcttactgaactgtgagtctagctgatcactaatgatgattatacatgtcgtgaagatctttagaagacaatctagcgtctcagataccaaattgtaacaccctactatttaagacatgttatcgtggttttatactaattatgtagctcgttgctaattaacaagtttattgaaaatcgtgattatcgtgattaattaaaaaaaattttagatacttttagatacttatagattccaaaataacatatataaatatcactaggatcccatgtacaaaatatttacaaccgttacaaagtatgtactacaaagttgtcaactagcgactatacaaaatatgcccagttctcccaaagactgtacgctccagacctaactacctcgacatgtacaatcttcgtccgctcactctcacatctgctcaaccttagccttgcccttacttacataatcaaacaatatttgtgagtcgacagactcagtaattaaagcataatcaataacataactataactcagattataatcaggcgcccatacacctaatcataatcctatctccgtgtcccacatggcactgagtctagaa

SEQ ID NO: 27064 - DNA, 4382 bp, Cannabis sativa
aaataatttccaacagaaagttctcttctttaacactcattaattacttcaaacatctctaattaacagttgttgaaacctcagtcaacattaatggtaaaagaaacggaacctaacaaaaagaacataattatgtaactgttatattttaggaaaaattttaacaagctgtatattttagggggcatgatcagatagtgtcaaaagtttatggacaaaaatgctaattattttattattataaccaaaacataaaaatatgatattaaatgcaccaaaagatgggcaaatgttttggtatgttaaaggggtgttcatcaaatcgctcacatcgcacaaactgtccgcaccaccacacatcacataaaaatgcagcttgaaatcctttgtagtgccattgcagttagtattttttccaaatcgcgcggtgtgatgcggttttcagtcttgaattttattattgcaattcaaactgcaccgcaccgcaccgcactatatattataaagttactaattttacaatataatttttattttttttatttatataagaataaatatatgtaatatattatagagacaattcaatataataacttgattaatatatatgctatgatattaaaattttaacaagattatttttgtatcgataaaactttatagatttttaaatgtttattataatgttcgataatgatgatggtgtagactgttcaaactgcactgcactacaccatatttttacgatatgatttttacaggttttagatctcgtagtgcagatgcggttgcgatttaaaaaattacaaaaaccgcatattggtatgaagaaaaagttacaacccgcaccgctagttcgtttacaaccttggatatagaattgagattggacaattttgctataacattatccaaaattctaactaatgtcgaaacaaggggactatattatctcactaaataggtgggttgactttgtcccaaccattgctccttttgtttttttaatatataaaatattttatagtattttttttttaaagtaataaagtatgtctaccataaattttaatgaaatattttctttattcctattttttttttctttctctattatcttgtagcctttttcattcaatataatttaattttaataattattgtttttatttgaaattattgaatatatgtattttgaatatcattaattattctttcttcataaattataaataaattaaagtacaatctgactaaatctccacatttcaagagtcaaaattattgagtgtaccgtatagtgaactccacaatatccctgccctacgcacataaacatataccagcaacaataccagaaattcattaacatttgaatggtcacaacagttaaatatcataacatagattagttaataaagtaaaacgagaacatagatggccaaaatagtaagccatcatttgattcaaagagcagtgtcccattccatgtcatagtcagctatgctatacacaaatgaaatgagatgatgacatcaaagttgtaaatgaataaactgtgcattatgcactctaacaagtgccagaaatattcaatatgcaattaattacttgtgcacatgtctaagttttccacaataatgaacatgttcatcataattcactaccagaaagctatgcaaggcaatgcgccactaccaaagacctctacaacaatgactagagccaagcgcatgttctaaatttcaagaacattcctagtcaaaactgtaaataaatgtgaaatgaaaaaaaaaaaaagaaaaccatcctatttcataaaaatacattgtatgatacagaggtgagcaaacaattaagcctctgcatatcgcttcgatccttagaagtctctttgcttcctttctcaagtaaacatgaggtcatttttgcctccaaggtgaggacgaaagcatacacgtatctcatgctcttcaggctctgatcgaagttttggtaccacaatctcaagtacagatcctggcccatcgtagtaagcttctatgttagcatcctcaaggattcgggttgaaagtggtatttctctgacaaattctcctggtgggcagtgctcaggtgacggatctgtaagcctaaaaaccctatcatgtctcttaatatacggcatgcgagatgtactcgcacaggacaccttgatgataccatgtgtgagcgtatttctccatgaaacttttaccctttgaagatcaacacaaggcaggctaataataatcaaatagctttcttcatcctcataaattgttttggccccagtaacaggcccatacacattattcatcaccccactaaagtcattcaaccagtgcggtccatttgggagaatttctgcatctgggataccattagatggagggttaatcgccaaacagcactcgtcactgtttccgtttggaaaaaaacccttccttcttttgctgacaggtgaaagatctaccacatcagaactactgtggttggatggatgcgttgacaaattcagcccagacccgttaagctgcttctttggatgtgaatttgaggtgctctttatgggagaaggcagcctttcaagctcaaactcagtgtttggaaggtttctccatgaactaaaatcacttgcatcgtgagggattgtgaaattccaatccctaccagtaagttccacccaccgtttctgctcttcctcactgaaaccagtgagattgggggctggaacaacctcaatcccgtgcacacactgaggatttgatagacccctataatgcttgcgctgcatcctgtgagatcgaacaaaacccttatcaacactaaatggaaaggggcgttccccttggcgagaatgaccattcatgtaacttctcagctgcatcttacctagtgcattctcaggtcgttccttaaagacccacatatacatgttttccatgtcatgctggaccataaacacgtcatggttaagatcagatttatcgaacccagaaattccattgtggtcgcgtatagttttggccttggacttctcattgagcgcaggcttgaagtaagaagtaaagaagaaccaagcaccccatatgctatccaatcgcttggcacatttccggccaatcttggaaatactgatcaaagtttcagtctcgcagacttgtgaagagagcccaacatctaaaatatcgcaagagtcgatattccagggttgttgaggagggctgccctcaactgagagaggtagattgatatctggagggtgagagggcataatttggcgattcatctccaaatccaattcgtcgtgagaggaggaggcactggaatccatggacaacatggtggaagggtgatgattctccattgaaagggaagtaaggcgtgaatctcccatttcaattcaattccttggagggttttattgttctcggagtcggcggcggatatatcatcgcaattccaaaaataattcaagtaaacaaccctataaacaccttcaacattcaatccccactatatctcccctccatcaaaagcctaggtttacaatcaaataacaaaatttctcacacacccacatcaaaatccagaacaatgaaccaaaataagtacaaattggggtaaaggaaaacgtaaatgaaagagatccatagaaaataaactccaaaaatttaaaaccaagtatcgaagaagtagatataatcaaatcaaatcaaatctgtttgacctcaaactttgtagaaaacgagaaagaaaagacggaagagattgttacgaaacgctaaagaaagactatatccaaacctagccattcgaatctcttgaaatcttcgaaacccacaagggatacagagaatggaaagcaagatgttgcatccatagagtatgtctcgtagcgtgttccacaaataatttttctccgtataactatttgaaaaaacaaaacaaaaaatcatcgactcactttgactttgaactttctgccttgatacacttcagcccttatcaaaatctctaaagtaataacaataataataaaaataatttagtaataaaaataaggcaaaagtctccaaaaatatagggttaatgcaaattagtataatggtgtgacattttctctaagtctgttagttcttttttaactgatccgttaaattcaaataaagtaacacgtgtcaattttttattagactaaataataattttaattaaaaaaattaaaataaaataaaaaactaaaatatatattttaaaattataaatttattttattttatattttttttcttttttttttcttattcatcttcttcaaccaagttcgatcggagcatcaccacgaccccaaccac

SEQ ID NO: 27065 - DNA, 1798 bp, Cannabis sativa
tgaatgatttatgtttttaaaatggaaaataattatggttgggaacaatattcaatacttaattaggtgggtcctgcatgcctacttggccttgtacagtctccccatgtgaagcaaaaagaaatacatatgctaccattttgtgtatccaaacactgaaaaccaaaatgaatggtactgctactgcatttataagaagaaagaaacaatacaccatacaaatttctaagaatttcaaaaagtccaattgtaggaataataatgtttttttttttttcaaagaatatataggaataataagttgaaaaaacgtcgtacacattatttagtggagcatttctacttaatatttatgtgtttagcacaacgatcaagtatggccttataattagttagtgattttttataatatttattgtactaattactatgaatactatttagtatttatctatttaatagttttacattttttattcgagcaagttccaaattcaatttcctcttctcatgttggagaaaaaattgaaagatgaaattattcctaacctaagagaattagaattaatatatataaaattaaaattgggctgggctcttatttaaaaaaaaatatataataattttgaaaatgatcaaaaattaatatgtacattttcacataataattattttttaggagcctatcgactagatggttctaagtgcaagtctaatctaacttagcccaaagttatcctgatgagcgacgatacatgccagagagattatatgtttatgtgcaatgacgattacgaatttagtctaggagttttattctgtagggtttaattattataaaaataattatacttattttacaaaaaaaaagtttataaaataatttgtgatataaatatgtaagtttaatttttagctgtaaataaatatttaaatttaatttttagcaattatattaatatcaagtcattattcacgtgtcattttattattagtatatttaaaatatatttttttaagaaaaataaaatttaatgaatttggtcaatcaagaattgtcacatagtaaataattaaattttaatacttatttgcgagtaaaagttaaatttaaatatttaattactaaaaattataatcatgagaatttttttgagaaattatcccatatttttttatttttttttttatcaaatttacggtttagggttcttcggtgttttctatgtggattactatacggattttagttgcgatttaggttgttctgttagttgttataagagtttctaggtagaaatttcgtaaacatacaaaaaaaaaaaaataatattttaaattataaaaataaaaaaaaaaccctaattttttattattttattataaaattatctaattaaaataaaaagattgaatttgtccatcacggtataggtgtcggtcacaatgagaacatttacaacataaaatataaaataagtttttctttgaagagaagcatgatatttataattataacaaattaaagtcactcctattagtttttacttaaaattttacaatatatcaccaaaattatattttttctatcttacttcaactttgttacattacaccgtacataataatctatcttctttttttatatattatttaaatattaaattttcaatatattttattcaattaaaaaatatatattatttttttaaaaaattacattagttaatggagtgctccataaaccatgtattttatacaattttctaccgtaataaatagctgttccagcatcacc

SEQ ID NO: 27066 - DNA, 5162 bp, Cannabis sativa
agcattgctattagacactagtggtgcctagcatccttaagacgtgtcgccttacaattgactagcgatactccctaaaagctattatgttaaagtatatagaacccgatactattaggccaatagcgatattgacatgtaggagaatacttggcaacactagccctttttagcatttctgaaactaaatataccctgaagttagttccacttgccataattcatattaattgaccccactttggtcgatcagtggtgaaagcaaccccccttgaattgaaagcctagaaatgtgtgtggtctgatcattcggcccatctcaatccccatgtcatgtagtataataaaaaataattaaaaaaaaaaaaacggaatcgatgcccctacttttaagttttaagtaaatatttttgctctctttcccattaaacacatctaacaaaattaatttatagtataaatatttaaatttaatttttaattataaataaataattaagtttaattttttattagtatattttaattatttttttaaaaaaataaaaatttaataacttgaaccaataaaaaattaacacgtagtaatatacttaatacaaaattcaaatacttatagaaattctaaaaatataaattaaatattattaatgcatgtatttataccgtaaattattacaaaactactttatgtgtcaaaacctaatacatgtttcattacattgctatagcaatatttccttctttttttttttgactctttcttaattagtcttgtttagaagttatcagtattgtgtattgtattggacatttgaagaggtatgagaacttgacagggggcagtgccattgctactcttctctatctactccccacgtattattattattattattataaacttataaatatagcttataggagattgatatttcatatcctatagataagtttggctacgatgatgattctccttcatagcaagttaattcatttcattccgcttcaagtcaaaaaaatgacctatttcaaagtatttaaatgcaaacacaaagtgacaaacttgactacatgtgcaggcatgagagcattggacccatctcttagccaatcagctaccaagaacatgcaagcttttacatttgttttcttgtatttattttatttatttatggattaagaaactttttgccataaaaatcttaaataaaataatgataaaacaaacgaaggaccaatatcaaacataggtggggatgtttgtgattcttgagcttcacttttctatggctgtgtttgtggtgttgtgtctacttttcttttatctgctcccttattttactgcctctttattggattttgatgtcccaagcgttagatgcatttatcaaatcacattttatttagaatattaaataatacaaaaacatattttaatattgagcattgttttattgtgagttactttaaatttccatgaacccatctaaatatcgaagtatgagtgtatgagagtttatgaagagcatttcttaactaaaaccttaccacataatcattctattacttaacacacttgaatttctcattttatgtctaaatagtaataccttaaaaggtacgtggacaaatatattgggctcgtaatacaagaggagtatgtcaacctatagtggttagagtgctaccatgtgcttcagatgcatttaataaaaccgacaatcctattataatcctaattgcataatcggcattatactatacatatagtcatccacatgtgctaatattgacactgtgagcaacgcttaattaggcaagtccatataaaatattctaacattctcccacttgaactacataattacaccaatatgtactcactaagcaattgtgtcaacacacataaatctcaagaaacactaatgtctataagattaactatgcaccatattgtatcgataagacacaaatataatacataatgagacatatgagattcataaatcataatgataaatattgatcgggatccacttgaacatagcaccgagactaagccactggcttacatcaacaaatgtacacaaacaacatcaaagagttatccataatatgactcccactgaccaaatacacatttgacttccagcaatccaaacaagaaatgatttcttagtagacacattcaggtaaattatgtcagtgtagtcattgacatgttgtctgtaagtgcgtgttatgatactaatagaagaccccacaactttctcactacacatggaacatcatatttatcatataagttcagtaagttcacaatagagtctactcttaaaattgaaatgaatattacaattgtaatctgcaattaatgtccttgtaacacaccacactatacgtttacaaatgaggaagctctaagtgtctaaacaacacctaactacagtataactcctcttaccattatattacatgtacgagagaggaagttgtaggtgttcattttgatttgacacttaattataaaataactcctcctagaatcatgaatgcttataagtagattttatcatccatgcagccaatccaattgatatcactaaaaccaactactatatgtcatgatgttagtttgtcgattgctaacacatccttcgtaccataaggatgacaactcaagtaccaatctagtatgtttgcaacaaatactatgataggaatgtatatacttgagtaaattataggcttcattcaatatgcatatatatgggaaaatttcaaaaatgatttcttgttatcatctatacacatggacttgaggtcacaatacatcaaactttagactttttaaagtttctcaaaacattaatcacaacaatagttagtcaaaacaaactatgagagaactcagtctaccattaacctcatcatgaaaaatctaattatttagaccatataaggtttatcaaggattcttcatctgacagagattatcaaataacaatttacacgtctccagaatagatcattatcataataactgagaaatgtattatatcaagtaataaaataaatgtatcattgctcccattaatctctcacatagtattgactaatggtaatatttcaatagttccactgaaactatttcaaggcacaaaataaaacacactagtctcctgaactcatcattatggaacaaacataagaattttacttcaaataccctgggaagttcctaagcaaatcatcttcataaaatttatcatataaggattgatggacagatatatacctgacacccatcgcaaaactctcactgagcatgcagtaacttggcatattttatattcaaatgtgatttcaagatttatcaatttcgagacctaatctaattttctaatgagggatcgatatgagaaaacatattatagtcccatccaataactaagcgttagaggttttagaatcgcttaaagctaaaagaaaatatattagagcagagccactatgtgaaaataaagattatgcaattcgctcattttcttagctttctcaataatctatcaacataaactattatgtcatgctaaagtcgttcaaataaaatataggactcttacgtaggtaaggacaactacttcaaatgtcataaccaaaatttagttgatctactaccaatagggtagaaaagattcagtggttcatgacaactaataagtttccttcaccatctaagcatcctaactaacaataaaatcatcgataggatgactaaattgcatgtatagattttagtattaattgtgattgatacgggagaaaaatattaacatgaatcacaatttttgataattgacatgtaataacttagaacaggtaagtataacacattcaatgaataattttaatctcataattatctaataaggccaattgtgtatttttgaatttttagcaaattctattaccgaaaatatcaattaaatattgacaataacttttttataataaatgcgcaaatcatgatcaatatttttttacacattttccataatatatgccccgaaaaaatttgtaataataataacaatgaaattcacataaaaattctcaaaatcaccaaaggcatatatataacaaaattataggatgataatcaaatgaaaaatgaccttgtatgagattaaattaataacaataaatttgtcacaattctcactattttatgattaacaaaattgacatgcttagactcacgataggtaaatacatagacatataattacttattcactaacataattatattatcaaaaatatccacaatttatcaaataattttatgacttgaatattgttgatgataagaactcgtcaactaactctgtggtcgtaaaatcaaaatctaaagcaaaactcgaaaataagatgaagatgaagtaaaatacaagtttaagtggctaagagatttcttgtgtacgtaagataatatttttttttattacattcagtatgtgagttacacaattaattttctaaccccctctcacacttgtgaatagagtatttacaggctttaatggcctaagttacatgatggtctcaaagagataatctatcgcttttaggctacaaactacatgtgcaggtcttgtgcctcgtactcctgtctgttgtcaggtggtccaggtcgcagaggtggtggctgcagcgtacccttggtcgggtgcttagcgtacccatggtgcatgggggctcgcatgagagtccttacacacacacacaacacacaacacacacagtattgtgattttactataaaatgcttacaatattgtgattttgagagttttgccgctaaaatttaaattttgaagattaattgctcgcaaagttagactgttaaagttttttttcacaatttattctaaaatagtttatttattgaaacaagggggggcggggggaatgatagctaaatgaaaagtatttaatatttatgctcacacagtatattttttttaataaaaaaatataataaattttaaaagaattattattaataatataaacaattatgaggagagaattgttttacttaaaaatttcttatgctcacatagaatatttttgggatttttttatttttacac

SEQ ID NO: 27067 - DNA, 2750 bp, Cannabis sativa
gtttcggatcagaggtgatccgtcgggtttgagctccaacccgctctaactaaataaatctttttaacatgcctaggctaaatttaaatttaaatacttaactgaaaaactaaaactccttaaaaataaactccttacaatatttaattatactaatatcaccgaactcctaaacatctgtttttatagcacttgtgaatttttgttgttattattattattattaatgtttcttttcttttttctttttcttttaaagaaaaacataatttattatctatgttattgtttgttggggagttagtggacataagacaaccttcccactgacgaatcatttccaaggatgacgagacggttccaatagttgaaggacacgtggactgaaattcagtgagactttagtttccttggaaggaaatacttttcagaaagtagaaaacagaatatgagatttacaaccaaacaattatcaaagaaaattgtttcatcaaaaaaaaaaaaattatcaaagaaaattgaacttataaataaattaattagttggtttctataacctaatggttctatgaaatttcattatataaattaaaattaaaattaaaatgaaaaaatattttattttctgagcctactttgttaaatttgtatgtacatataaatatttatttatcaaaataaactagattccaatttatcaactaatgttattttggtcatgttcttgagaatattttgattatgtgtaaaaatgttaatgttatgggtttcacccagtactgtaatagagttcataataccactgtccataatttagctaaattgtctttatatttggatagagctatgtggtggcataataatgagcatggtccttatatttggttcctttaataataataacaaaaaaaaaaaaaaaactaatattatattgtaaccaatttactcaataaaaaaaaaatatcatactctacatagttgatattttaactgcttgaaatttaatataagttcattttgttattgtcctttagatataggttaattatgatttttatctctaaactttgatatgtaccaaattatgttccttgaattttttacgccgttaaaaaatctcccgaactattgaaattattatatttgaggacttctgtctaatttcattcaattttactaatatgaagattgtccacatactaaattatgcctcttgaactttgatatctactaaattatgtcctccaaatctttcaaaaatataaaattgtggctcctaaattttcattcacatcagactttgtttagtaaaattggacaaaagtccttatatctaacaatctcaataattcagatagaatttttaacgacttgaaaaatttagaagacataaatttagtacatatcaaagttcacggaataaaaattcaaattagccacaaatatatgacaataagtattaataaacaaaaaagaaaattagtttgtgtggaccttaccaaatttattgcataaattttacagattccacgtgcaatattaataataataagtaaagtagatatgattttgtagtttatttgtttatttatttattttgagatgtaggaatttgggatgttattggatctatatgtcattatcaactcaacaacaactagtctcatcccaaacatatttaagccacaagcaatgggagacttttggcctatcaacctttgcaatctgcttggtttcgaaaaacaaaagaaatcctttgcaatgtgctgacaaattgatttcgaaagtatttggttatcccatttaaataagtcttgcttttgtaatataggaaacttagagtatttttttttatctcaaagaaataatgggaaagaaaggttaaacttaatatgaataaaggtttttaatagaatttaatggtatttttcaaaacaccacgcatcaaaataaatcaaaatttctgttaaaaattggtgtctcatattatgttaaacctatcaaattttgatacatcaactaatctaattaatttttttatagcaattatactggtagtgaggtatgggattctatctgtgctatgctgaaaatttatgaggcagataaaatggctattacctagctaggccttccttgtttggttgggaggaataagaatgctatctttgactttcttaaggataagcttcagaagagaattcaagggttgggaagggcgtattttgtctcgtgcaggaaaggatgtattgctgaaatctattactcaagcattgccgaattatgctatgaatatatttcttttgtatttagacacttgtaaggagttagagcggcttatggctaagttttggtgacattcggctttgagcagtggtaaaggtattaattggatgagttgggagcggttgtgttgttataaacatgcaggagaattgagttatcgaagcttgagagactttaatttggctcttttgaggaaacaatattggcagttgttggttaatgatgactctttggttagtaggctctataaggcaaaatattatgctcatgataacttattttttgttgaattgggagataatcctagtttcatctggcgaagtattcttgaagctaaagatctagtacattcttgtgcacaaagaacaatcgctgatggggaaaatgtatccattcttgcagatccttggcttccacatagttctaacaactatgtcgttacaaggcaccctgctcttgtgaac

SEQ ID NO: 27068 - DNA, 4816 bp, Cannabis sativa
gaaaaacctgttaaaactagaattcgtaaaaatgtaaaataagaaaaaaaaaaaaaaatcaaattttaagtattttgtgtaaattttcatttatatttggcaaaaaagaagagtactaattagtaattagtagtataataatccttaaaaaaatagtagtataataataagaaaaaaaataaaaggtcattcatttggctagacttgtacagttgcacaacttacataaatttagaaatttcataattattataattttgttttaaaattaaaacttgattttttaataaatttattaattaaattaaaaaaaaagttctcatttaaataattttttatcaaaattttctaatttattttttagtaaaacttgcattgtttacgaaatatacatggcattcttattaaatttgcaaacaatataataattcattcacttataaatacaaatgtatatttgtcatatttaaaaataattgaactaatttttttttctagataccaaaatagataaaagtgtatcaatgtactccttttaggagctacattgtagaattctttaatatatgtatattacataattttttaaaaacaatttaatataataatttgatgattagtaaatatgttagacgttaaaattttaataattttttttattatttttgtattgtcaatattttattagattaatttttgaatttttattataatatataataataatgatagtgtaaatttttaaaattttaataattttaagatattgtggtgtgggtggttttagggatgaacatattgatcggatttgattcggacccaaccaacccgcctggccctgacccggaaaaattaaaaaaaaaaatccattttgtttggacgtgtcgggtttagcctagtacactttcgggcaggttcgcgagttaattttttatggtcaccggattttgggttgaacccgaacctgcccgccgacgcagttacttttttttttctcatatataatatattaaaaaaatattataaaatctaatcattttatttttactacatagacaatatattaaaaataacaatatataatatattatatatagtttgaaacttcacttttgtatttaagatttgaaattaatgtattttttattttattttaatttaacgaatataaattatagtgttataagtttataacttatatgtttaatttaatatatagaaaaaaattatataaaatttgattttttttagaaaaatttaatgagtttattgggtcaactcgaacccgcgaactcgaaacctgcgaatctgaaccatttcacggatcgggcccgagtaaattttttgaattcaaaacccgctcaatccgcccgatattcaatcctacatgatttggtttgaaaaaagatgtcgggaacacccctacatacatgcatgaggtggtcctaaataaggctttataatcgactgtgtactttacacgtcaaagagagagcagagcctagtttgggacgacgtcgtttatgtatttctaatcctaagctcttttcttgtgaaagtgggaaaccccaaacccaaatccatccattactcacctattaatattatcttcaatttaaacttttcttctccaattactctctacaattacatattgcgtctggttcgctttggatttcgcaattccaaaccctagaatactaattcataaacagctcaaacgccccttaaggtatttccattttcccagggttcattactttacctgaatttaaatttcgtgttttatcggaaaccctaataatcgcagttttattattctaatttctcttcttccatgtattagtaattcgcttgaggtcttctataactttgtaattgcaattttatttatctattaaagggttgcagtattgaattggtgtttgaagaattatgcttgatttttatggtagcccaatttgtatatatatttgggattttggggtttttctgtgttgcttttatcgttcctaatctgttttccgatccctgatttaatttacgctctcactctttttttctgggctagtaatccagttttggtacgtacttattggaaggtattgatttaatttgcaggaccttttggttgattttcattttgtgactttgtacatacatcaacttcatggcatccgttgatggtagagttacttattcttctctctctaagctagaccatgaggacagccaaccccattatgatgacgacttcaatgataatagtggatggcctgtgccggagggcaatatcagttacccatcagtattgtcaaagtcttcaaaacaagaatacttgtatcaatttcccgatgaatcagaagattttattggtgatggatatgattcaggtgaggatttcagcaataacgctctcacaactaagacaccggaggttaatttgaaaaatgtgctgaatgggatatttgcaatattaaccgggagtaataaatctttaactgttcccacgaataagtcgttacccagttcaaatgtttcgtttctgggttctggcaaggacggaaacacctatttacactcctcagtttacatccccagtgccccgccccttcttgagccaagtggaatcaattatagtgcttacaaagaggtattggatgctgaaccccctgattgggttcctgatagtgctaccacagtttgcatgcagtgcactgctccttttacggctattactcgtgggcggcatcattgtcggttttgtgggggaattttctgcagaaattgctctaaaggaaggtgcttgttgcctctcaagtttagagagagggatcctcagagggtctgtgatacttgttacgacaggcttgatcctttacagagcattcttatcaacagtgttagcaatgctgcacaaattgcaaagcacgatgtgatggattggacatgtactagaggatggttgaatcttcctgttggtttatccatggaacatgagatatacaaagcatccaatactttgagaagctactgccaggtgcaattttgattttcaatcctcttctttgtgattatgtatctgatagtgactttttctatgtacttgtggaatatcataaatttgtgtttaaacaaacaaaattttacagtgaaaatcacctgtcattgtgttattatgtaacatctttttgttgttttgttcaatttgacagattagtaggcttaattctgaaaggtccattcctctagctgttcttaaaggagccaaaggccttgcaattctaacagttgctaaaggtggtgttgttgtgtcttacaaagttggcaccggtttggttgttgccagaaggtcagatggatcatggtctgccccatctgccatatcctctgttggcttagggtggggtgctcaggtataatttgctattgggttcagctgaatcaagttgaatgaaataaatagatagtaggaatttcatgtagaaggttgttgcagtctaaagtcttgcctgtagtttctttctgttccattatttccgaaaatcttattattgtttcaaacttagttgctcttttaaggtgattattctttattacagattggtggtgagcttatggacttcattattgttcttcatgattcacaagctgtcaagacattttgtagccgcatgcatttctctcttggtgctggctgtagcgctgctgcaggacctatcggaagagttgtggaggctgatctccgtgctggagacaaaggttcaggcatgtgctacacatatagctgtagcaaaggtaccatactatctttccaatctcttgtgtgttcaaatgttttgcatagttacattcatgtattttgtgagaccgagactggggagccttgtcatctatggtttctttctttatgtcattgtagctcaaaaaacgcatttgacttatcacttattgtgtaggtgcctttgtgggagtttcattggaagggaacattgttactacaaggatggatactaatctacgtttctatggcgatccttacctcacaacatctgatatattgcttgggacagtggacaggccaaaggctgcggagcccttgtatgctgcccttgatggtctctattatagcttgaggcactagtagtttcagacgtttatttgctctttgtacatacgtacatacgtaatgctatatagcatctgtcttgttcatatgaagttcttcagtacttactactccccccatgttatgattatgtctctctgtgttcagtctcattggtttggttttaatgtttatttctcatctttgattttgtaactgtacaaaaactcaatctcattgatgttggttaagcttaactctcatttgtacatattaattgtacaaactaccaaccattgcaatatagaatgaacccatctatttctattttctactcatttttattactataacttaatgcgcactgacaaagataaagcaactccttgatttgtggaacctataaagcaataaattatctttgcttcgattccataatcattgtcctatgtttaaagggaaatgtttttgggcaatgtctaagagcatctccaaataaccactaaatttagtgttacactatcactaaatttagcgtcaaaaaatatttttactctaaccacaacactaaaaattacactaaaaaaaaataaaaccttattattatagtaattttttaataaaataaaaaataaattaatatcatattaattaacaaaaattaccacaattgttatatttaactaattatttaaataaaagagacac

SEQ ID NO: 27069 - DNA, 3450 bp, Cannabis sativa
ttttttttggccaaagttaccctaaaaaaactccaaaatccttctcaaaattgctctatacatgccttaaacttgaagtgaataataatattgagataaagagaatgacataccactccttggacatccaaaatggtagtactctgatcaatgtgcttctttgctgcaatagaacatgcaggtaacttgacagcaaaggttctctcaaattctctaacatggtacttcacataccgatccattgttgtaacttgcataagcttagtcgaatcaacctgtccgagtctttcgatgtaaacaggccttccatccttatcaactccatgatgtccttgtggatagtaattcagaacttcatctatctcatcaaattcaaattcctttaagaagaaaataggcaaaaggaacaaagtttaatgaatggtttcacttctccaaacaaaaaagacatgttttggataagaagaatccatggctacctccatgatagtgtcagcaccaaaatccttcctccattgcagcatatcagtccacatttgcttggtcttttcaatgtcaaattttctggctcttaagaatctgcaattatcaactactcataaacattagattgcatttcaattaaagaaaaacataagattgcaccttgaagtttacagaagtaactgatcgtaccctctgttatgttaaataataatataacgttataggttttataatatttgaagccaatttctagatgcaaaatataatcagtctgctcataacatctctatgccaaattattattaagttttcttttgacgaaaagtcagtgcaggttattattttataatattttgaaaaatgtaagatatttaacaaaatagaagatttaatgggtaacttttgtaaaatacaaaatctaaaatgatatttaatctgaggatcattatcattgaaaatatgatgaccttagcatcatgtgatgatcatcatgtttggagggcaatagctcatccaagattagtgcttggcgaaatgcatccacagctagcaattcatcagcatcaatgtcatcatcaaaggtgactgacataaccctactattccttcttcctctctttgtcaaagaattcctgaacttggtcgaggcattgatcgctttcttcttcaacgatccaagtctcgtcttcttctcatcgtcgtagctctcttcgaaacctgtgtattaattaacacgaaaactcatcaagaaaaattatgaacaaaaattaagaaacttaaggcatgcaaatggtctagattttccatgggacaaaagtacattattaaacaatgagatggctttcaatatggctttggacattttccttaacaaattttcatttcatataattaatatagtagtatataccaccaaagaatgggaagttcttgttgtaaaatatcccataaaaatcatattcttttcttggtagaagtagcaaaaaaagaaaaggaaatatgaagctacaaatgttggcaaacaactcctaaccttattattcacaatctttttcaaccttaattaaacaatctaaatagaatgaataaaatcttccacaacttaaaatcaagaacaacattaatagttaatattagttttgctatagatttataaccatgaatacaaatttttttttgttccctctaatgttcacatttcattaatttttattgaattagtaattcaataaaaaattatgaattaattcagaaaatctattactttttgttgttcatgacatcattgtgttgattgtatttgtcattgtatatatagctatatatgagttctatatataagtgtgtatatataatcaaatatgaacaattaagaattaaaaaaaaaaataggagaaaagttatgaaatcatacctggcttaatggggcgttcaagaggtccagacatggtatcacacatgattacttttcttgattaattgctcaatgtattttgagataataaaaaataaagacaaaataatatatcttaatacatatacatatatatagcccttaaaagtttaagctccacctaaaatcatacacaaaaaaattataaacaaagttagaaaaaccaaaaaccatgcaaaacccagaacccaaaactcatgaataaatagttatagaggatcaaaaagttaaataaaactcaaaaacataagaaaaaaagggtgaaaatgtaagagaaaaaatgaagagaaagtaccttattgcaagaatatttttagggtggggagaagagaaaaaacataagtaaagaagattatatattctccgaattaatctgtaattattgcggctaaatccattaaggacaacgaggaggacataactatgtttagataattataataattagaaaaaaattaaaaaaaaaaatcaagtatgatcttttttctattttttttattgttggtgttgaaaaggtctgtagtgttgtttagctataatttggttatttaaggaaaaataataataatagagtggtgttatattgcgatatgcaagccactccctctatttatttatttatttttgtctttttatatataaatatttattaatttttcttactaaatctcaccaaccgttttacctaccctcaaactaaggtaatttatatatatatatataaaacaactttcttaaacatgtcaactatataatatatctatgctaagtaaaatatttatatctatatatacataattatgtaatatattgttttataagctccttatacattattattattattattattattaatgtgactaattctgtaaattctggaagagtgaaagggattcatttgggtgctagaaggtagttgttggagggaaggtagtcattaatttcatttatttatctcattatttgtgtctgatatatttaaatatagctttattattattattatttatttatttataagatattaaagtcaattgtttctataagtgctcttccactaaagtttttttcttttttcagatgtgtttatgtggcctttggcctgctgctacttaaataaagaaataataaataaaaattggaaaattaatttttagatttagttagtttatggtggatatatatagtagtgtttagttgtgatttattgctttattttttatcactattattattgttttaaagtaaaggcaaactacctgaattttcctaaatcaatttataaataataaatcccttcttctctattaagtcagagcttaattacatcttgaaattttttgtgtaatatcattttaatttctgaaaaaaaaagcttaacaacaaataggatttattacatttttttgcatattagaaacaaaaatcttctaaaggaaaaatagaattttttcttcaaattggttttgttacctttttctcaactcataagtttttttttttttttt

SEQ ID NO: 27070 - DNA, 2495 bp, Cannabis sativa
atgaacttttggtaccattttctatagtaataattatagagctatatactaaaggtaacaagtattttgggtagtaataatcaatgaaattgattatataaaaacaatggtatatctatattgagacaaaaagaaatgggttatgggagttagcttaatttaatttataaattaagaaataaataataaaaaccccaagttttgtgtaatgggttggagaggcttttttataatgttgagaatcatcaacaggtgtcttgctgtactcacatgtctatgtataaaaaagtatatagagatcatgatagtaattgttgtgggttgctttcacaacagagctagaagtcaaaacaaagtagaaaacaacagcttgattgatgtatatatatttatataataaaaaatatatttgtttataaattagttgagggctcttaataatttactagaaaacaattaacatcatcttttttattcttataatgtaactactatttaggaaaaaagaaagatgggtgatgataatattaaaatttaagtattttttgtttgtttatgtatacttattattgatgtgtgttttgtttctttgtaaagtaaatatcactttcattttcaattcatatgtctaaatattttgagaattattaaagggcatgcacttggccaagatatcatattttgagtgttttacatattttagtttaataaaaaatttaacctcatactctaatattttattattgtgatctcaaatttgatgtaaaaaatatcacacatttattctacattcatacttccctatatattaatacaatacttttaagaaatactgaataaattttataatatctcgtatcgctactattacaatttaatacaagctcccaaatttttaaaaagaattagtaatttttaatatgatttacatttatcgcactaaaatcaacctcaaatctagaaatttatttattaattttgatagctaggttaaatttcactatatccaacatccattccatgcaatattgataaatttaagaatagttaaagcattttgcattacaaaagtaagtaattatttgcatgtttgaactctctttcaccaaatcatgcatgcacaaattcacctaattattatgtcaaaattttagtatttttctttcattgcgcagtagccttaattatatactcctactaaaatatttatagggtcttctcttatattttctttttttggcttctctcgaccggagcattgttagtgtctcctctggcctaggtggtgctccggttgagagaccccccatcctcttaagtcgtttgggtttgattcatttatggcatcttctctttcttatcaatgttattcttcgttgaatcctattaatatatttgtaatttcgtttaatcatttatgcctttagtttttacgtactcgaagccactacaagggttgggatggcaagattatttctccatttagtctgtcatagggatggtattgtttatttactctattactataatcgatcgacttgattattagttgtttaattagttattttttgtgagatttgtgctattttttaaattctgtcatttaccaatcaaaatgattttgtcaacaatataatttttacaaaactaaagtttttttttgtgaattcatatgatcaattaatgtcaatttttacaaagaaaaaattgacatatatggcgtctcgtgaattttgaaaatatagtagagtagcttatatataaagaaacaaaagaaaacaacatggttggacacatgattttgtagttggatcaacaacgcagttgaccaaattaaaaacttgtaatattaatatatatatgaaccatttttatttataagtcacacacaatcacggagtactattcattcatatataagtaaatttagtatgaaaccttttatttgatgatataaataagagagagacttgttgttaaactaactaaccatttagaacaacactttttgttacctttttttttaagttgtaaaactttattagccgcaaatgcattttggtgttgctatcaaaaacagctgggggtggggccacttggatgtgtcccgtgcattctcaacttctctacacttccgcctctacttttgccacgtgtcacctccattattgtgtctttttgactgtccaacccaaacaaccaaatgccacgtgtcacctttcattcattgttttcttttcttcactacgtacgtacctacactacaatacattacttacaattatttagccttttcacgctttttctttccttaatatctctattgcccttctaactaagcgtctttcttattaatctcaaagttcgtctcaaatacaagaaaatgattcaattccaaaattaaggatcttggcgtttgattcggaggaataaaaatataaaaataggaatgagaatgggaataggaataggaatgaaatggaataaaatttaaa

SEQ ID NO: 27071 - DNA, 1952 bp, Cannabis sativa
agacattaccctgagaaactctgaatcggcaggggcagctatctttagggatgataaaggtgacacgcttaagattcacacattccaatcctactactaggactctcttgctggggaagtatttgctttagttaaaggagccgaattggcgagtacattgggatacaacaatgtcatattccaaagcgactcctttaacgcaatcactgcgattcagagtaaccacctctccataagaaccaatcatcacaatatccaaagcctcctagacagattcaattgtgcagtgcttctttcaacctgtgggaggctgattggattcaaagaaattttaatgctgtggcctatgatgcggctcgctggggcaaatcgtcacagacttgtttgggtgcttcgatttggccaattttggcggttccctgtatccatgggatgcggatggctgctctttaacttagtttatctagttttgttgtttagaagtgtttttctctgtttagtctttctgttgtttgtgtgttcttttcgtttagctgtctgcttcctgttttgtcccctgctttacggggctcgtgtgttttgttctcgccgtggcgactcttaatcaaaaaaaaaaaaaaagtcattttccaaaatgatagaaacttgttatgctctttgtaccactaaagacaagagagaatgattcccaaaagcttgaaccacgtttttagcttacttcttcgactttgaaacatataggcatagccttcttaaataaatgtttcatttaggaagagaatcattgattcagacattattaatcttggattgacttttatgccctctaaattgatagagaaaagcaaatatcctattggaaatagaaagggaataacacagtcacaaatgtataaatcatatttcattaaaaaagagtttaatgcattcacatgcaaaactagagaacactactgttctgtataataacacaaagaattggtggtattccagagaccaccacttctaaaccaaactcattcaatagataatccctttcaactgcccttacaatatttaagtatatatttatatttctaagactctttacacatcaccaaagccacatatacacccttaattacgaaatatataactcaccttctattaaatacttctattaatttgactcttgggtacctacctagcacaaaacctatacaaagtgcagcatttaagcaagattatatcttgctgtgaatatttgtccaagtagcttgattgtgctttctataatacttacaagttacaaaaaaaacaaaaattaataaaataatcacagctttcacaattcctaactaacttgttttagatttcaaaccactatttagcatcatacacgaccatacattagatatgatacctataccttttttttactattaacaatggaaacttccattaattcaaaagatcatccaaacaaagggataaaaagtccgaaggagtactactctctctaataaacacaatgtagacgcaaacagattatttaacaaacagataaaaaaaaatgcctctaatatatgaaacctacactatcaaggaacctgaaaaagtcattagtcattcattaagttcgagtaagcataagatgttaggttaggagctcaatgcattagaaaatgagttaggatagaatgtaaataattgaataaataacataaataactatatattacataggcaagaaagcaaatagaactaaaatataaatacttataatgtaatatgaaatacaaagtaaaattcagaataaaaacaatgacaaaaaaaatgttttcattattttactaatctgattttccatgaactaaaggttggaccaatgttgaaaaaggctagtctaagccttaaggcattttacctcttgaggaaattacactctataccatttttatattgttctcttt

SEQ ID NO: 27072 - DNA, 1326 bp, Cannabis sativa
aattttcaaatatatacaattaaataatttataatcaaattttagtttatgtcaccaaatatttacgatttctaaatgcgtaagtaccagatatgtattattaaaaacacaagtaccaaatatgccttagggacatatgataaaattggaacaataagagaagattagcatgtccctgggcaatggcaacatgcacaaagcgggaaaaaaaaaagaaaaagaaaaaaacacaagtaccaaattgtatttagataaaatacaggtactaaatgaatacacaccctaactaaaattaacaaattaaaaagctttatccattggccctcccatgtcaacattttcaaatcacaaccaacataatgtaacaggaaaagaaaacagaaaagaaagaaaatgcaacatatttattaattaaagaatcaatcattatgcaaattgactagttaatattaacaatggatatacgttaaaattatcatttcagaaaatgaagatattcaagtcttgatctaacctgaagtccggcaccagccagaaatgcaagtctgatttcctttctcctaaaaacatccaagtacctaacatctctcttcttttggcgttcttcctccaactgagagttaaggtactcaacttcatcctctaaacgataaacatcataaatttttgtaagtacagaaatcgcctcagttttcctgtcctgtagattaaacattaaacaatcaaaatcactacaaacagaaagccaaaacaacaggcttttatttttaattaaaaaaaaaaagtagatgggatgatccaattacttcattaccttcataaaaagccatctgggggactctggcatacagagcatgagagcaaattggatcacagctggcacacccgcaactccaagcatccatctccaagtgccaggaacctgcatgtcaagtaactgaataacggttaaaacagaataaaggaaaacaacttaacacaaaaaaaaaaaatcaaaagcatgaagcaccatatgtacagatatttgtcttgacatgccagagtttacttatatagataaatcccaaccagaaaatatctagagtatttttcaaccacaaagttctaatatgaaaaatgtgcagaacttatttgatgttagtgacaggttaggatctcctaaactgaatgaattgtgtcaataagttctattgcactaaataaacatctccacgcacttctactctacatgattatttagaaagaaaacaatattgcatgacatttcccaaattattaaatcttatatttagtagcttataaaaacactagagagagagagagaga

SEQ ID NO: 27073 - DNA, 2470 bp, Cannabis sativa
ggttgtaattggcatgcataaagtttttcaattgctagttaatcacgttctatggtttcatgagctgaataaaattaaattgaagtgtgtcaagggcataattgaactgaaattctggaatattgtatgcataagtgaaattttcgtaatcagtactcaaagaattggctactaacaaatagaacaaaaagcaaaaaataacaagaatacaccaaatgtatagtggttcagtaagagctcaattttcttagttcactgttgtaaatattttagcttacttcttagttcactgttgtaaatattttagcttactttatttacttcagatcactccttcatatagaaagcaagtgaccattaggatttacataactaatcggttttagaactgtttcacaataaatgacaacattaaatcagaataaacgtttaaagaataaataaagaacaattttctttgtcctcaacacttagtaagatttcattacgtatggatgtgtcattgagaagagcattgctgagaaacttaaggtgcatgatgaccaagtggcctccatgcatggtggctgagtggcctccatgcatggtggccgagtgacttccgtacatggtggctgagtgacttgccaagcatggcggttgagtgacttccctgcatggtggtctggtggcctaccaaacattacagtcgagtggcttccatacatggtggccggtacctaccaagcatggtggctgagtggcttccatgcatggtggccaaggggcctacaaagcatggtgggcgagtaggttgcccaacatggaaaccaagtggcttaccatgcatggtggtcgagtggcttccatgcatggtggttgagtagactttatgctgactggctcgcacgacattcgtaaccatacattcagatggatctttggggtgtgtacccattgatattctggttaattgtcggctgatcttgggagttggccctgctaatttttgggtttaataagttccttggaccatatccaaaaatagtaaaaacagtttgcccgcacaaccaaaaaaatcaagaatgtagttttaaggtcttgaaatacatccatgacatcataaaatctataaatactggcaaattcatagatagcgaaaaagtaagtatttattatattaatcaattatgtaatatacatactaataaatatttacttgttcttttaatgtttggtagttgcaatacgaaaaaaaaatgacttgttaccgttacaccaagattgattgaggttatttaattacgatgattagaacatttatataagaatatctttttttagacaactcttaaacaattagagtaattttagaatattagtgtaatagatatacttaaagtaatgtagatgtatacttatttagcttgttattttaatttttacttatgcttattatgaaaaatttatacttaatttaaacgtattattaaaaataaaattatatattgttgatgcgattttttgtcaaattaatctaaaaagattgttaattcaagaataaattcaagtaaagaagagacgaaaataataaataaacaccatatatttttacatagttttgtagttaaatcaatatacttcacgagtcaatattatttttgagttttggctgtgtttataatttggcaaagtttctataaatcataattgtctccccctatttcccttttagtgaacccctatttataagaatgggatggtggttacttaatcttatcttaatgaaaagttatataatcaaatatttagataagtataaataattgtttatatttaaaatataaagaagtggtctttgacttggtcagaccatgttatttttgagtagatgcattgttgtatatttaatacgaggtgattcatcactgagtgtgtaatacgaggagatgcattgttgtgcatgtattaccaggagatgcgcatcactgttttgtattacgaaatgattcatcactgttttgtattacgtgattcatctctgctggtgtaatacgaggtgatgcatcactattggtgtaatacgaggcaatgtattgttaagtgtgtattacgagaaaatacatttgtgctatgtaatatgaggagccaatacgaggtaatgcattgctgagtgtgtacgtaatacgaggagatgcaatgctactgtgtaatacgaggcaatgcattgatgatggtgcattacaaggagatgcaagatctttgtatttcgagcaactacaagatctttgtattacaagcaactataagatctttgtattatgagtagctacaagatccttgtatattacaagcagctacaatgtccttatattacgaccagctataaggttcttgttgcaagatgttgaatgtttattgaaataacatcccgacaatgttgaaatacctcacttcatgaaccttttgatccttatttagatgagatcac

SEQ ID NO: 27074 - DNA, 3292 bp, Cannabis sativa
  modified_base (1418)..(1418): a, c, t, g, unknown or other
ttttttttttagtttttgattttatgtttgtgttgttttaataaattaagtaaaaaaaattagaaataatgagagcatgacacgtgtctcttatactaacttctgttagcgggtaccaataacaaatggttaaaattgagttttgagtatttgtgtcgcaattatttaaaattgggtacttattaacaacagaatgaacaaaatgaatatttatgctgcaaatttctctaataaaatagattaatataacgattaaaacctaaataacttaataaaccattgtccaaaaaagttcattattatattgaagctaaaaacttcatttactctatattatttttgctatttttttaatttttatatttaaatatttttaattaaaactaaaattatatttaaaaaaaattaatatttctactaaaaataattatataatgagcgttgataatctcgcaaaatatttaaaatgagataataaataatatgctttaattcataaaagtttcaaaatacaacattttcatgcttcaaataaaatacatttctgttacttatagatacatccaataaatatgtgcttttacaattttaccccactgaacaaataaattaaattaaaaatattaaatataaaaatcacacactaaaatgtacatatccggtcacaaaaccggtgtttttaagttaaagcaacaaaatttactgtttgctacagtaaaatattctttgtcatatgtgaggtgtgccacacacacctcaaatgcaagtgaggagctacataagccccttatattaaacaatatttacttttaatttataacagttctgtctaagtggtaacaactaagaactcggttactatactataattttgtagaagtctaaaacaacaagagtttgaacttgtaacctaacaaacacaactaaccccaagcttagttagggttacccccgaaacctccacccattcgagctccgctgaacccgccgccaacgaggagaacgactccctaaacattcaaatgattttctggcgatatcccgtcaccgtttcagacaatggctgatacgattgcgaaattccgagatatttttggtcagatagattcgtgttcccctcttacagattcgatagttcagacctatgtgagtttattttacgaattgctcattcatttaaatcgtttttttttcttattcgtatctaatacgaagaacttaaaaatatcagctttatgaggcagaaggaagatcccctcctgcagggctacatatttggaaaggtagtatattggacttttgacaatttcagagtctattttacttcacatccccaaagttttacgtttttgcatataaatttgctcgcactgaatgtgtgatctagatgcctgtaaaagccaaaaaaaaaaaaaaanagaaaagaaaaaaaaaaaaaggaaaaaaaaaaaggaatgaaactagggagtgagaataacatatgtttactccttaggctcattttgttaggttcaatattgaaaggtttggttttgtacttgtcagaatatctctccactccaatgccatccagtgcatctctgtttttataaatttaaaacaaattagtgtataatctttaaatatatatgcatatctaataactaaatacacaccttcattgtagaattgggtagtatcctctcactttcaattcgtaattccttacaattttgccaaaaccattctctgcccaattctcaccccaggagttctgcactatccagaaatgaatcttgtcttttccaattagcctaacaccttctccaactaatagcattgcatgcccgtaatcttcatctccttccagttcataatttggtcggtagatgctattagcatctaatttacgtaaacctttgtcgtagtgagcggtaatgaccatcggcccttgtttaagcatttcgcttattttgtcattgtcatatcttatgagtccccaattttccactgtgtacaaattttgaaactgaatttataggtaagttttagttttaaaaattattaataataataattaaaaaaaagattgaacagtatcacctcaggtatcttagttttgtcgaaatgaggatgacccttaaaagggtaacattcttcaagtgtaatcccgctgtctcttatgaaatccattgcccaggaaacttgaaaacttccgttaaccttatggttgatgtaagcaacatcaattagatgttgcggggagagcgtcacacttgtcccgcgcagtgctttacatgatgcaactgcatctgcagatgaaatggcccagcaacactctgcatgaaattaaaacgaaacatattatttgttgagctgtctaagagtgaattttaacttgacatatttgcataaaaatgtatatatatgtaggtatctcccaaagcttgtggacacacacaaggtaggaaagtggtgtcaagagaggaggcagtgatgaggataaaagcagctgtggatgcaaggaaggagagtggatctgacattgtgattgtggccaggagtgactctcatcaagctgattctatgcaagaatcattatggtgagcaaaagcattgacttgtgtaaagttgctcttcatgttcctaaactggtatatatatacacacaaataagttttgaggccaaattaatgagttttttcttttttgttgggtgatcatgtaaatgattatgtcatttattttgcttcaaggagggggaaagatgcccatactaagtccaaagtattggatattatccactttccttgcttggggtgcctatccgagcaatgcaggtacctatctaaattctattgaaagtgaaaaactaatggtttttaaccagaaagaaattataatgtatagaatttgaaagtgtgtggtttaaattgcttcctcatatatagcgtgtagaaaatttgtgcttacaaatacaatcaataagaagactatttttaattataatagcattgatcttttatttgttgaagtaataattaacgaagccagctagtacctacaaaagttcactgggtaaaattaaagcagtatgtgtatgagcttacttttttttttttttccttatcacattaaaattatattttctttctctacagtatgttctacgtacgatgaccatatatatatatatttatatataaaataacaacattttctttattatggcatctttatattatcaatgtttatagtatagagactgtatttgagctgtgcatgaaaatataaatgctctgggaaaacgacc

SEQ ID NO: 27075 - DNA, 2126 bp, Cannabis sativa
cggcccatactcacttccaatttttctaggttagtttgctacccctaaagtcttgtgtagcgatgcaagatttgtttcattgtgtcacactcctcttccctcccaccaaggaacacgaagctatcgtccacaaagaaaagatgcgacactttaactccattacgaccaaaccgaaccgcatttattctaccagcccactcagccgcatgaataaggcaagagaggccttctgaacaaataacgaaaaggtagggggacaatgaatcaccttggaaaagaccccgggttggttgaaacttccctatcctttcccccgttaataagaactgaaaatgaaacactagtaacacacctgatgatcttctcaatctactcatcttcatagcctaaacccctcatcatggttatcagaaaactccattcaacccgatcgtaggcctttgacatgtctaactttaaggccatcttcctcccatttctaaatctttttgtcttcatgcaatgaaggctctcaaaccctattatagcattgtcttggattaaccgacccccaacaaaggcactttactcttctgaaatagcttggtgaatgttatttttcattcgacccgaaagacacttagccacaatcttgtataccacgttgcataaactaataggtcaaaattctgacatctgggcgggcttttgtatctttgaaatatgacaaatgagagtatcattcagttcatccaccgtcattccatcattgagaatacccaaacataccttggagaccgcattaccaacaaccggccagtaattcctatagaagaggcttggcattccatcgctgcccggtgctttctgagggtggatagcccgcattgcttgatagacatcttccatggtaaacggttccataagatactcatttgtttcacgagatatcctattagaaataatgctttggaactcctctaattcctccggggtagctgaattagcagtaaacaactgtcagaagtagtcgcacgccacttgacccacatttttatttaccgtaacccacttcaagttcctgtccagcatccattatagtatttttccgcttcccattattagccttcctgtgaaaaatttagtgtttcgatccccctctttcagccctaaggctcggcttcgttgcttccaaaacttctcctctttatccaacaccgcattgtgtttttgctctatttctttcaagtgattccagtcattaggattcatgctcctggaaagagtagatattttatcttcgaattcttttaagtgcctgttcatctctttcttcttagtcttattccacctttggagggcatccccacacttagccaattggctctttagctcataagccgtgtctatatttccaacatccccacacgacttggtcacaatctccgaacaatcatcttccccgacccaagcactttcaaagtaaaatcgagagcgccactttaccacattatccattccctgaatcatatttgaacaagtaaggaggaaggggcaacggtctgaatttattcgctcgagatggctcacttttgctgctggaaacatatcaaaccactccgtattcccacaaattctgtcaagcctttcaaaaatgagattgttttgtctcccattacaccaagtgtattgacttccttcaaaatcaacctccctgagcttacaatcatccaaagctctccagaaattattaattagataccttgattttggatgacctccaacttctccttttgacccaaaatctcattgaaatcacccccaccaaccaaggccccgagtacatcctcccgactctagtaagtagcttccaagaatcagtccttcgacttggatctgggtccccatagaatcctgtaaacctccaccattggccctcctctttcctaatgaaagaatcaatatggaaaggggagtaggagaggatgttgcaaacaacattagaagaccaaagcaaaattagaccaccacttttacccttagcttccatcacgaaacaaccgttaaaccccaacgtaacccgtaaagactccgctcgcattttgttaagcctaaactctgagatgaaaattaagtcaggcttccaa

SEQ ID NO: 27076 - DNA, 1064 bp, Cannabis sativa
cttgagacctatggcttcggcaaggggggggggatcaactgcaccgtgagagagtacagttctggcttcaataagcacaccgtcatgatttcgggccaccaatcctataccgtaagaatttcctccattaaataaagccgcatctacattaaccttgagactagtttcggttgggggtgtccaatgctcattcccatcaccaatctgaagttcagaccatgatgaatccaaatttgattttctagcattcctccattgctcaaggtactttgttgcaaacacaactacattactaggattaaaaacttttccctgccatacaagattgtttcgggcaccccatattgcccaacaaacagctgccaaaatacatttctgctcaccatctgaccgcagaaaactgctggtgcaccactgcagaaacgaagaacctggtgcaacatttgtaccaattccaacacggttccaacactgttgaaccatattgcaagtgacaaggcagtgtaaggttgtttcttcctcagcttggtaaagaggacataaaacacagctcaccacttttttaattcgcaagtgaactaaagtaggaaggcattcggaacaagcacgccacaacaaattagctatcttcgggggaactttcaagctccaaagcttattccaaaacagggaggtttgatcatcataccagaatcccttatcttgctgcagaagaccatacgcactcttcaccgaataaatccccgacacttccttagcccaggatatttgatctgtagccgtgggcgcctgtaggggaatacatttaattaaaagttgatctctaacttcaaaggggtcttcaatgatatcattatcccaacccccattttccaaagaaaacaagtttgcaaccgtggctgtagcaagagctgggtgacttgaaacaacataagggttcaatggatccggcaaccaaggttcaccaatcactgaaatcgaaagaccattcccaacactccaccgtatagagtgatagagtagtgcccacacacagcaagtggtacatcaatcatagtgtggaa

SEQ ID NO: 27077 - DNA, 4215 bp, Cannabis sativa
atgttcgaatccaaaactgtgatccaactccatggtaggccgatcttctaacttaattgggcctgaaaatgaacccgtctcaattaaccttaaaattttaacagtacacgtgtaactaattcaattattcaaaaatgaaaataacaattatagtatttataaaacgctaaaaaaatatataaaattgatctcgtgctgcacttttacaaacgttattatttttattattacaatttctacaaacgttatatatttatatacacgcataaaacaaaaagaaaaaaaaaaggaaaaaatatagagtaatagtaaatgagactgagacagagaacagagatagtcatagataagaatttttcacatggtgaaacctaaacctgtggaagagaaaagagtgattataaataaggttgctggatacatagtaagtatattgtacggtacaatccatactatacatatttgaatcctacgcgcttaaaatcgagcgcgtggataaacatataagtgaaattacagttgtaccctttaaccaggtcgggagcttgggaagccaaaaactcagtgggtcccaccaagcttcgttggcattgacattttttttttcttctaataatttaaccaaacacaaaactcaaaaaacaaacacaaaaatcacattcccaatccccaaacaaacactctcatatttctctcttcttcatcattttcatttcattctctcttttctctcactctgttacagtttctctttttgttctcccatggaagataacgaaacccaaatcgccattagaaacaccacccatcaaaaaccccagatgggcaatgccaccataaacaactctttatcccatttgggtcagcgcagcagaatccgaagaaagtccacagagtttctcaaccgagaaaatgtgaagaggaggaggaataccggttctggttctaccagtactagttgtgagaaagaagaagaagaagaagaagaagaaggaggaggagagagtgagaaagaagaagtggagaggaagattaaggcattacagaggatcgttcctggtggtgaatcacttggtgtagacaaactgttcgatgaaactgctgggtatataatggccttacagtgtcaactcaaaaccatgagaactctagctgcttttgttgaaggtttggagaagagcaaatttggaggttgattttccattttaattattattaatatcattttaatcaatggggtttctttttttttttttaggagctttttatttggtctaaaaatcattgaccaaattgaattttctttttcttatttccttttctttgtaatgtttattattctcatatataaatatataggaacaacatcaacaacaacaacaacgactggttagtaacttttaagtaactattcttgttaattaattagtgcaaattttattgcatgtttttttgttctggctgcaaaagaaaacaaacaagtttttttatttttattttttgatataaaagaaattgttgggagaatattgtaattatataatttgaattttggaattggtaagttttttagatatgtacaaagataggaacttgttgtggtattaaaatcgagtgatgaagaagtataaagagtgatagttacatttcgattacatatgggtcatctttgagtgaagcttttctggaatctgacattcataaactcagaacaaccctgctaatttctgtgattcaaatatctttcttacattaaatcaaatctattatcttttaccaaaaaaaataaatctatatctatatttatttaccactaagggacaaaataaagttctcttcttcttcttcttttaaaaaataatattattaaaaattggtgtaatactgatttttgtggtagcaaatattaataatactagactatttgtgaccattatttcgaccttatccatttcatttcaactattaatatttcatgtgaggaaggcttgaaaataattgaatgtatcttaaaggtgactaagaatattattattacaattttttcatttgcttaaaaagtttttaataatgtttccatatgggagaaatgataataaaaaatatatatcatgaatctaagttgtgctaaggtgagatttgaaagaatagtgtatagattttttttaaccattgttatagcacttattttatcataattattattgaattaataatatttttaagtggtgctcactactcacaagtgtattttagcttttttttattattattatttattgaaataaatggaaggggaacatggctgagaaaagagtcatatagtataataatatttgggcatatttttcaacctaagaatgcaaatggggttatgatataaagtgctcaattggcctgcattagttgtaaaaaaacaaatatcaccaatactagtttgcttgatcataattatgttacaatgtgaattaatattattataatatttctaaagtgtacaaggaattggatattattggagaatagtgaatatggttttgtgattaatgggtattttttatttatttaattattttgtaaatttaatgagattttttgtgacaaaagtcaaaagccaagtctttgtcttggtcggactaaaagtagttttattgatttgctgtcagtcattttgctagagtttgggagacagaaaggcctaattaaagagcctaatttgataattgaaagagttttataagcttcaaaatcatataattaatttggcattagagtttgtgtacatatctatctttctatccactatcttcttttatatttctttaataatattctagatctgattttaataaatatatgtgtatatgtattcttccataacatggttctctaatgctttttaaatttataatattattcaatactaattaacaaaggtagattctccttttataaaacaattattaaaataaatactattagaccaattattttattaaataataatttattttttaatttttgtcaaattaaaatttaataaataacttactatagaacaatttttattgacttcacattagttatattaaaaaagtattgataaaaattaagttcgggatctattttgtataattttaataaacacaaaatttaaattatcatttatcaaaatataaaatctaaccaataaattttacaaaatatataatccaaaataatttctacccttacaaatatcacaaaagtgattccaaataaaaataaataaagtgcatgtatatcttaactttcaactaattaatactgtgttgactccaatagtaaaataataaaaatctaaagtaaccctcaattttgaagaaataaatacaatttgaaaattctctatgaagaacaaaaacaaggtgaagagataaccttagaatttagaaatagcaatgttattgatgataacatattcaaagttccaaaactattgaccattgtttgtaatgagaaacattttctagtcaaagccttaaaacactctttttggacttagaacattcaaatcaaaacattggaattgtcttttgtcacattcaaaacactcacaactttttaacatgtttagtcaattgattacacaatcttaaactttatccacaaaacaaaacaaaacactttgatttttcttttgttgatgacaaaacctgcaaaatgacctggataataaaagcatatatataggccacttgatatgagaataaactcattttggtaccaccctcgatgcatgaatatgtgtaccaaagatcatattatataaatatctttctatatgtataaaattgaaattaaagatggaacaaagaaacaatttcttggttcaaaaagagtactgccataactagtggtccaatggtaccattcatggtatttaggctataatgtatagaaatatataactgaaataaactctgaaaacaatggtggacaacctgtaaaaaaaaatataagtaaattcataaaacaaataaaaagaacattgcagttatcgcccattctcattctcttcatctcatttgttctgctagctaagaggtttcttggtccccttgccttataatatattcttaattataacaaaatttttcttctccttcaaatgttactgtgtgtaatatttaatttaatatatataaataatataatttttgtcaagactgatat

SEQ ID NO: 27078 - DNA, 2349 bp, Cannabis sativa
actatcgatcttatgaatattatgaatcatcaaacctacgagctctcttcaaatatttctatctacctttgattcgacaaagactgaataaaaagtgtcacaaatgtgtcgggacaggtagagtaggcctgagtccagagcccccacctcatttgaagagatgaaaccagtttggtaataatatccagatctggttactattaagttttaataatttgaaaaaaaaaaattagagtctattttgtactatattaaaaaactcaggttttgaattatcatttaacaaatggtcaaatcaataaattttgtaaaatacagaatccaaaaaatagtatttatctttttttttttttaactaaacactcctagaaattacttttcaacgcgagactcattaatgtcattatatcttattttatccatcaatgtatatacacagtacacctaacccaactacataatagttgtagagaaaataaaataaaaaaagtctatacaagacaaagagatattgatattttttatgctgatgcaacatcatcaatagggggtcgaagcgttgcagcaacactgaatgctcgagtagtagggcgtgcttggttgggccatgccataacatggagctgaatcttctccatttgctcaatggctgacatgagtgttgccctaatttcgttgtggtcgcaacaatttatgagcccttcagcgcacacgtgagaaggtattaaggtcttcttttccaaacgagatagcacaagtatgtgtccactcgtgtatgcttcatcatataagttgcgcaaccccgctctatcggctgctaaatcttttgttattgagaacacccaaataaaaccctagaaatgattgtgtaaatgtgtgaacaaaggcatgtatgtcaaagtttagcaccaagtacaagaatgtctcacatttgaatagatgtgagacttatataagattgtgaatttaattgattgtgaagtgattcagagttaaaactcaataggacttaacaaagtgttatagttttggaggcaattaattttttttttctttcaaaaaacatcaattttgttcataaattatctaattttgtatttcaaaataacaaacatattcttcttttttctttctatttttatatgtaactcctttaaattcatgtttcaaatgggcttcaatcaaaatttttaaataacaattcaaaatataaatataagaatattattaaacttataagatttatcatagactattctactcattatcaattaattttcttacctcttctgtgcgtttaaagtccattccaaatcgctcttcgccaagtttaggtatcaattctatagaaacctcagatacacctggtagaaaccagagccttacaccttgcaatactcggaaagacgtattttggttttgttgccgactccaattacatttttctttttctttttctttctccttttccttcaatattttttttttttaaaaaaacaaacatatataaaagtcaagatacaaaacaaaggaaattctacaatgtgagtatcatttttatttatatttttgctacatagagaaattataaccctaagttatatataacaaacatcctactaattttcaaaaacttacaaatattttgtagtgttaaaaatagagctcaaaataatcgatcagttacatcacgtgcaactgattattcgaatcctatttttcgacacaataaattattcaaaattttaattataatttctcgacataccgaaaaacagattcacccctattagtagggcaaaagtaccgaaaaaagggtcaataaatatataaatatagttaaatattaccaagttgagaatgatttgttcagtttggatgttaacaaagacaagaggaacaccagaagaaagagctgctgtaaaccaagccatggatcttgctattgttgtggaatgaatattagaggtttcttcttcatgaaatggcatgaacaaaatactactaatgactgtacaacgttggtatggtaagtgtttatctactttcactttccaatcatacttaactcctcttttgttgaactctctacacttggaaatcaccacacttctactcatttctgtttaatatatataacattcccaatcaaaaaaatggaggttaaactttttagatattaaattatagtctgggctgattctgaattgaaataggtgttaggaaaaaaaattggatcattaattacataaaacactaatttttgtaattttttttttactttttaacgtttaaaattttattttatattttcacggtattctataaaaatacaaaaaataacaaaaa

SEQ ID NO: 27079 - DNA, 2746 bp, Cannabis sativa
gagcaagaagaaaggattggaagtcgggtgaagactctcacttctcattcttttaaagattgtgtttcacagtgtcaactggaagatatcaaaagcagtggtaaattctttacttggtgtaataaccaacaggaggatgaccgcatctactctaaacttgatagggtaatggccaattgtaaatggatggaaacatatccgggagctgaagccattttcctaaacgaaggtgcctttgatcattcttcagctctagtgatttttcaccatcttgctgtcaatgggagaaagccctttagctatttcaaaatgtggatatctcaccctgaatactctagccgattgcagcatatttggcagcagaaggtatcaggtacgaaaatgtaccaggtggtggctaagcttaaagcattgaagccggcctttaagaagataaatcaagaggggtataatgatttgcaatcgacagtcatcaaagcagtatctgttttggataattgccaaaaccagttatctttggaccctctaaagcaggaacttcaacaaaaggaatcagcagcatgaagcattttttctcaagcacacaagaactatcagcaattccttcagcataaagcaaagactacttgggttagagatggggatgataatacggccatttcccatgcaagcctcaaagctagaatcaaccaaaacagaattctttccattgtggatccgcaagggaaccgagtagatgagccaacaaagatcaatgaggtttttcttgcttactacaagaaactgttaggcaccagaatggtcaatagaagggaagtattagaccatgtgatcaagaatggacccacagtaacgatgcaagaaagggtaactctgtcggctcctgttactaatgaagaaataaagaaggccatgtttgctatacctggcactaaagctcccggaccagatggcttctccaattttttctttcaagacaattgggaattgattggcaatgatatatgtgaagctgtgagatccttcttgcattcaggcaaaatcctcaaagagataaactccacaactctcactattatccctaaggtgaaatgtcccaattctccaagtgacttcagaccgattgcctactgcaatgtaatctataaagtggccactagagttctatgctccagactcaaagatattattcctgatattgttgctcaaaatcagggaggttttgtcaaagggagattcattgcccacaacatcatgatatgtcaagatctggtgagacattattgaaggaactcaacaaagtcgaattgcatgatcaaacttgatttacaaaaggcttatgacacggtagaatgaaacttcattgaggaggtgctaagggggctactttttcctgaaaagttcatttctcttgtaatgaactgtgtcagaactccaaaattctctcttttttaaatggatcccttcacgggttctttgaatctaagagatgattacgacaaggtgatcccctttctcctcttttatttgtcattggcatggaatatttgactcgcattttgaagaaagttgggaataaagcagatttctcttttcatgagcgatgtgacaccctaaagctcaatcacctaagttttgtagatgatgtgctacttttttgtaaaggtgattataagagcatcatccttatgctacaaggattgaaactcttctcagctacctcagggctacaacctaacaaagaaaaatctgtaatctattgctgcaatgtgatagaatcagatgtcaccagagtcctggaggcatcaggtttctcacaacaacaaactccgttcagatatcttggcattcctattttccataaaaggatttcgaaacaggaatgcgcaattgtatcagagaaaatgacagcaagaatcagatcatggagcactagacacctctcttttgccggtagggctgtcctcatcaattcagtgcttacagctataccctcctatttgtgccagattctcaagcttcgaaagaaggtaatagatgagattgaatctatatgtagatcttttctttggaagggtcaatatatgatgcagggagctggtttagtagcttgggaaaatgtttgtcaatcaaagattgcaggaggcacgggcattaaaagaataactgaatggaacacagcagcgctctttaagtatgtgtgggctgttgcgaacaaggaagataatctttgggtcaaatgagtacatacagtttatacgaaagatggaaattggtgggattaccaagcaacaaatcaagagagttggtattggaagcaaatagtggcagccaagaattaactcaaagaaaacacagatgtgcaacagtttgtccaacagaaatacaagatttcagatggctatgagttgatcattccaacacggagtagagtcacatggagcaatgaggtttggggtcatttcaacacaccaaagcacagctttattttgttgttggctgtgcagaatcgcctccgaaccaaggatagattgcagcgttttcagatgctagatgacccgagctgcagcctgtgctcgctgctgctacccgagacacatgaccaccttttttttttcaggtgtccattctcagaaggctgtctacaacatgtcaaagagtggctgtcgtggggagctcgttccagcaacttacagcagcttctcaagtggatacacaaggcaaaaatcagcaagtttagaaagaa

SEQ ID NO: 27080 - DNA, 1643 bp, Cannabis sativa
aagtggaaaagccagaacagaggaagattgaggacattaatgagattacaaggaccgatgttgggagtcgactctcaagatttgaatcgcatgggattacgattcccaaagtcggcaaaagggatgattgggggacgattaatatacagcatgtatattctcgtattttgcacgatctgaaccgaccctccttaaaaattcctcatacctgtccctttaatctcattagggacacgtgtacaccagggggaattacagctcaaatggatttgggccctagaattattttgggccgaaaggggttggatgataatagtatttttgaatctaacatggtcttggctggggataatagggagagggggcctttgatttattaccataatgggccatttaatatttttttggcccataaaaggattggaataaggcctgagataaagtcaccttttaatctcaagattcagagaatggatccgtgggctagtaaaggaaaagaaaagatggctatatgtgtaaaaaaaaatccagagcagattatcaatgatttttttgaagggagattaaaatcaattacaccaaagtctcaagcggattttagagctgcaactataatgttttgggcagattttgaagtaataaagaaaacaataaatcttctattctggaaaaaacaacagaggtagaacaagaagaagaaaaggggtttgaacagtttgggaaggtctatatcagaaaaagaaagtcaatgggacacaccagaagtgaaacagcagcatcagcagaagaagaattctactttgagggggaggaggctgatgtagagtcaattgaagatgaaatgttggggctaagttcagagagtgaatgttcggagggggaaggagcagattctgaggccgagaatagtgaagagaaagaagatattattggtgatatcaaataattgtggagacagaatgaacatgaaaggcagttaactactgagtcacacgaggagggacagatcacaagaccaaactatcatgaggatcattcgtggtctaacattgttcaatccatggcggagatgggaatggaaatcctgcaatataatgatgacaacaatttgatcaaaggagaaaggaagccaacgagaagaaaagtagagaattgaatagtctgactttcaatgtcaattatgatagaagcttcaaaagatcagggttggtcaggaaagtttaatgaagatcctctcatggaatataagaggtagtggggacaaggagaagagaagggcaatcaaagcgacaatatgtaaggctactccggatatggtgatcttacaagaggtgaagaaggaagatgtcgatagaaggtttatttgcagtatttggaggtcacggtttaaggcatggattttaagccctgccattggaagatttggagcacattgctaatatgggacacaagaaatatcaaggttttggattcattgattggtaatttttctatttcaatcttgattcaagctgagagtttagatccatggtggttttcgagattatatggaccttgttcgtacaaattaaggtcagatttttgggatgagttggctggcctttattctatttgtggatattcatggtgtttgggggggattt

SEQ ID NO: 27081 - DNA, 1747 bp, Cannabis sativa
  modified_base (659)..(660): a, c, t, g, unknown or other
caattaaaaaacaaccgtgaaatacagtacacagtataaactaccaagaccgacccaaacgatttaggagccttgggcgaagtaatagtttctttctaaaaaaagttgatcacattctcaccactagctacccaattgtaattaacgaatattagctatgattatactcattatgttatatatatatttgtttttttttaataatcaattagttgtcaaattaaattaatttatattgcttaactacatttttaatagcttcgtttattttatatttagtattatttaatttaatatcttaacgtaagatatactaaccgaaataactataacccaagttaatgaatttaattctttttttaaaagaaaaattggaccttttcaatgtttgggccctgtgcagtggaactgcctgcacaccattaaggccagctgtaggaaggtgttagatatcaataatgtcttttagcatttctcttaatggaattatttcaagaaaaaaaaaactataatagtgagactccattaatttttatttgacctttttgatatacatgtagtctgggtttaaaagaagtgagaagtagttagaaaaaaaatggagtaatttgcggtataaatatataaatttaattttcgattgtagataaatatttaannttaatttttgacagtaataatactcaagttatatttctaaaatttatataggtacatgacagttaagtgtaaaatcaatagccacgtgacgatctctaattagtttaggtgattaaattttatttttatttataaattaatttacctacacaaagttaataggaatataataagtagataatgatttgaaatttaacgactgatacttacaaaaattttaaaaatataattattactgtcaaaaataaatttaagtatttatttatatttaaaagttaaatttaaatatttacgtataatttaaaaaaaaaataaattaaatattgtttaatgtgggccagtagctcactactaatagtttagtgatttagtgggacccacataaggatgaaagagagagagagagagcatgtgaacccaaaaaaaaggtaacgaactagggtgggactctcttaactgccgatctcagaaagcgttagtagcggttgtcagttgtgacagttggcaaggaataagagttagaagaagaggcaagctttgtttgctttgcaagaaatactaataataaatatgaattgtttttattagaatatttaagatgttgtcacgtatctttcttacttttctagctgtcttacccttttcttgctttcctcaccctcaaaaattaaattaaataaaaatgtataatttaggtttccttcaatctcacgttaccaccacattttttggtcttgcggtgaaggtcttttatcttgttccaacacctctagaatatataccctttttgtacatatatgtatatacataatatagtttttttttctcctttatttatttatttttttagagagaaataatttatgaaacacttatgagcaagaaactttgatagatgcgccaggtccgtagagataccaataaagattgacatcagtcaaaatgagatttctaatacaattaggaaagttaaccactaaacatgaaacataaattgaggaatacattcgtttttttaatcattaattttaatatttattaaatcaatgtctcttaaattttattaatcgttaaaaattctcttgaa

SEQ ID NO: 27082 - DNA, 2084 bp, Cannabis sativa
atatatgatatagattctgcatattatattgatgtggtcttggtgtttataactgatgcttattatctttaatttcctacctcgttaattatatatatatcatatataattatcagctcatatgttgaattacattaattgaaatatattaatgattttaattaactaagctaattaataatattgtagatgagtaattataagtactatactctttgcaaataatcaaaagattatttaaaggggtgatgttttataatgtaggatcgatatcaccaaatttcaaatttctttcttgtattttttttttcttttttctaattccttgataggaacatatatatatatttattgataacctaaatgaataataattaattagctacttttctcttcaagcgatgattgatcctccttaattattttggttgtatcctccttaattatgagttttacttttttttaataacaaattatagagttttacacagatcgttatattttcattatacaaggtgtgtatataaatatgcctagcttatttaaatttataacatgtataagttaaaattaagacaaagtaattggtgctcttttttaaaaaatgaaattgaatttataaaggttattatatgtatatatatatgcgcccctagaatgtaaaaattcgtccaaacctttataattatttcaaaactataatttcttttcttttttcctttttgacttttagtaaaacttatatatgtagaaattaatcatttgattaattttaccatctattgctttgaaaaagaaaaaaaaaacattttatatatttttaaaaccttttatgttatagtatgccaatttattataagtttgctcttaataattaattagataaatattatggtatgatttatataaagaaaaacagattcgatcttggctattaattattatccttaatatatatcatagctagatagctgaatatactgtatagtttgaaatattaaggttgtttgcctttataacttaaaaattattttttttatttttaaaattgaaaatggtttttaaaaactaatagaggccgtttggcaaaaatttttaaaaacattttttttaaaattgagttttaaaaaactaaaaaacagaaaacatcaaaatgttgttttcaattttcaaaaacaatttttttttctaacatattatattttatatttttgctctcatactcggatcctagacccggaaccaactcaaacccggatagattcatgtcatggtatggtgttaaaacattaattttttttagtaagaaaaaatctaaaaatatatagttttaaaaaatttgtgtcaaacaccattaaatttttaaaatgacaaaaaactattttctatcttcacttttaaaaatataattttaaaaactgaaaactcaaaacactctgctcgtgaagatgatcaattaataatatatttctaaaccatgtgtatatataataaggttaaatacaatatagggagaagtacgacggccaatatttttggaatgaagttattatatattatgaggtaatataacttttttgatggaaatcatgtcaaaaggaatttaaggtctaggtttctacatgctaccttaattatatatcatcatcatcgtcaatcgttttcgttacaataatatagaaaactttgactttgatatattaaataataatatatatttatttcaggataattagtgagagggagtaatatgtatatgtttgtggtgtgtgtgtatatatatatatgtttcattcttggattattaattcattttgatttggatttcttgtgatcagatgataattacatatatatataaagatatatgtatatatatatatatataaatttatacatatggactggatcggatattaatgtttattccgctatcattttagatcgtccgatcatctaattatatattgattggatggttattaattattagacttatcaaatatagtatttaccaaagggattattataaattttatgaaatattccattttatacaaaacaaaaacgaaaaggtgataaaa

SEQ ID NO: 27083 - DNA, 4116 bp, Cannabis sativa
ggactattaccgccaatttttgagcttagggattaatctgtatcaaccctaagtttttagggacttttgccacaattatcacaaatgaaaatgtagaagatagaagtgaagttggaagtgagaaagattgtgattagtcacttcatttttaaagtttaataatattttaatagaaaaaacaaccgattatctatttgttttatactagttatccccgtacttatcccaaccctgaaatcaattaacttctcaatctaactactacagtacatttacggattatatacccaaaaatgcaatatggaaacaaaatcttgtctttatatatatcaataataatatcttaacaataaaaagttagaagaaataaaaaataagaataacttaatatagatatcctttaaaaacttaatatagatatcctttaaatttaattgtataatttagactttataagtataagagttgcctatatatatgaaaagagaaattataatataaaaaaataatattgtaatatattgtgcggtttgaactgtgattattaaatttaaaatcgtaaactgtacagtgcggtttggtaaaaacacaaaccgtaactaattgtgaagaatttcaaatcacattctttttatgtagtgtgatgtggtgcgggtagttttttatttttatactttaaaataatttttttgtatttttataaaattttacataaaaattcttattacaactggtgtgtacacggtgcagtcaggttatcaacttgcctattccttagccacacaaaatcaaactactggttctgactctcaagcaaaatggtggaaatatttttggagtttacagttaccatccaaggttaagatatttgcttggagagttttccatcactctattcccgtagctgctaatttatttcaaaggaaaatcattgattccagctcttgtagcttatgtacatgtgcgtgggaatcggttggacatgcgttattcagttgtaaacacgctaaattggtttggcgccactctggtttttcttttgattatgtagcagctaacagaatgaatgcaggggattatctaatacacttgtctcacacattcaccaaattggagcttgaacgaattatctgcttaatgtggtctatatggtcgaatagaaatagtgtggttcatcaaaaaccctgcaaaaaaccagctgaaattttcgctggttcaatggcttatctcagccatttttctcaagcctcacatacatcatctattgtccaaaaagatcctacagttgctgatcattctccgtggataccgccaccacctggtctgtgcaaattgaatgtcgatgcagctgttttatctgcacaaaataaattgggttatggggctgtgattcgagatcataggggtgctgttttggctgctctgtctaggcctgatgtgggcaatttcaggtctcaagaaatggaagctaaagctttgttcaatgctcttcaatggactttactgatgaacttgcagattgcagaaattgagaccgattctctgatgcttgtccaagctattagcaactttgcatcttgttctccaacttttaaagatttggtccttgatgtaaaaaatctgttatccaatttccctaatgtttgtgtatttcacgttcgtagagatgctaaccaagctgctcatggcttggctaaacatgcgttagcgatggattctgattctatttggttaggggagattcctcctactatattttctgttattttaaatgactctttgaatttataataacagaacttattctcaaaaaaaaaaaaaactagtgcaatctaaatttcaacccaaatttttttttttatatagaactaaggccacaaaaactttagaaactcaaagaaaaaaaagttatatgaaattgttttttccttttttttttctgactcagattgtgttgattgaagttctggttcctcatcgggaaaattactactcccaccgaccggagctggagctggagctggccgattccccagctcacaccgtttcatagctaaaccaccaccgccataatacgactcctaaaattttgtgctcgtttccaactctacaaacaaccccttacactcgtctccattccaggcctcgttttgtttttctcttctttggtttgttgaaaagaaaagccacttgatcatgtcttcttcgacttcaaagaatttgaagcgccccaaacccaaagccaacttccattccaatgctttcgattcgtcttctccttcctcaaactcaaagctcaactcatttctctgggaaccgcctgatcatatctttccctccaagaacgattttttcagccttattgctggtctcacaattgcagcttcggtcgccctggtctgccatttcttcgccaattctttcatgaatactcaccctaaacctttctgcgataccaatgtggattactcagattttctctctggtgagtctttctttctttcctgttctgtttggttgctaagaaaacccgggaaaatcaacacgattttattattattatttatttattttttttgcagtaatacgaatttgaattatgtatacattaacatcttagttttgataaacccttttcttttcttttttaaattgttgttttgtgttgatgtattaattataaacaaatcatatattggggaggtgattatggcataacaacagctttggttgatagtttccagccttagatgcatttcttattttgcagagcattgtgaaccttgtccaagtaatggacaatgttatcaaggcaagttgaagtgtgataatggctatagaaagcatggaaacctatgtattgaagatggggacattaatcaaacagctaagaaacttgtgggtttcaacaaccttattcattatggtatattatattatgagtattctggtatgtaaaaaacaatactttgcctactgttgacagcttattccggtgctacttttttgtcgatttgattgcagtcggattgggtacaatttcatctgtgtgaatcttatgctcaatacttgtgtggtggaccagagataatttgggtttgtttacctttacaactctttgtgactaatacttcgagttgtatttgctgacatttttggatctaatattacatgtgtgtttcaggttcaggagggtgatgtatggaatgagttagatgggcacaagctgattgaacatattggttctgacaataccattaataacatcacaaagcataaagccactgggatcattgaaaaagtattagagagtaggataaatgttcaggggtatgttgttccatcttggagtttggtatttgagaaattcattgtgccctttggtgagatattcccctagtggtgcacattgtcatcagatatttaatgtgtacagggtcaaagaatggaaatgtccggatgctctagctgaaaattacaaaggtttttcttgtcgtgtacatcaatggatctccaataacgtgctagtgatttttccagtttgtgtgctggtattgcatttcaaatttctgttctgtatttatgttttagtgccaaaaaaaattgacacttgttgactgtttaaaaaaatctatgcaggttgtgggattcattttgctgatctggaaagtccgtcagaagctatatttgtcgaaaagagttgaagagctttatcagcaggtattaaaggacactttttatgtatactagtcatttgattcatagtttttttttttggttctttgaggggcaatagtctctgatagataatggcctaagttaatatcctctatgtaattatgattttgagcatctattttagtataaatacaactagttgaagtaaagcaaaaataaggtcagtttattagttcacttgcttgttgccctcttcagcatgatcaatccaaatcatgttttcttcatcattcttgattgctatttctagctgtatagtatctcatgttgttccttgtttttcatcaaggattgcgggagattgttgctcttccttataatgcaatgctacagggctgatataatttgtaattttataggtttgtgatatacttgaag

SEQ ID NO: 27084 - DNA, 2007 bp, Cannabis sativa
ctctctctctctctctctgacctccagtccttgtcgtcctctctctttctcatagacgacgatccatgagctccaccactcgtctcttgtctctcgttatctctttcttgctttatctttcacgagctccaccatagatgaaagctcgttcaagctccaccatgatcgaccatgaccatgagctccaccaccgtcactcgtctctctctcttgtctgaagatagacgcgcaaccacgagccaccataggcaccgaccagtctctctctcttgtccactctttctcataacttctttattattatttttattttgagatttatgtaattttgagatttttgtttttaacaaatcgtcggagatctcagggttgtagttttggcagaactgtgacccaaatctcgactctttggggctcttaaggctaaacgaaactcccatcttggtctcgaggaggatgaagacgatgaattttttttgggtaaagccattacaatgattaacgacgatttaaaattgtcagctatagtacatgtcactgtttaaaactgtcagctataatatagtcgacggttttaagccatgacctatagtattgactatagctgatggttttcaactgctgggaattattttccctgacatttttctaccatcgcgtattccatccagtatttgcaacgctcgcataggtgacagttttatagaccgtcgagaagtttttacccgatcgtgtaaaaccatcaagaattttgagttttttagtagtgtataataaccctcaaaatataactttaacagtaatgtagtccttccatcacattttattcaattttattgtgaaataagtgaaattgtggatggtagttgataaattaatgcaaattaaatacgcttcaccctttttacgttagtgaataataagattaaatactttttttctataataatttatatttttagttttaatgcactataaatttttttacttttagtcacaacaaaacttgtgactaattataaattgtgattcctacgttatgactaaaaagtccgtggctaaaagtattaatcacaaaaattaaaatttattgtgactaaatgtatttttagtcacaatacttgttgtgactaaaactaaattagtgacaacttgtatataaatactatgtttagtcacaaaaaacttttttgttgtgactaaaagtcatatttagtcaaaaaaaatttgttgtgactaaaaagttatcactaaaggtgattttttttagtggtatgttaatcggtaaactaaaaaaaatgaaaggtatttactttgtatacatttataaattattatttattacgttattcatttcatgataaaattgaataaaatataatggaataactatgttattataaacgtcatatttcgaggggtattattaacgaaccgtataacacaatttgatagtgtaaaaaattaaagggacaaaaaatggtaattactctaaaattaaccctttcaaatatgcatacatcaatcttttatcttaattaagattctgattttgagagcacaatcaagaccctttggtgatccccttataataatattcaacaatactcatcacaaataatacttgtcatagttttgagtcttttatttatttatttattattttcttattattattacaccttagactgttttaatataaggaaaccaaatatcacacgacacaaaaatactactcatacttaaaggaagtgaaaggcactttcaaaaaaaattaaaagaaagtgagaggaaaccaaatatatagtaataacaaaaggtaatcaaaatattattttggctttaacgcaaagtgtgcatatcattttaacaaatgtaaatagtggcataagtatataaagttttacgtttgtaaacgacataaattcaatatttatttttagcggtataagtacctaatatttataattttcttccaatttcgtcagtacagactctgttttgaat

SEQ ID NO: 27085 - DNA, 3187 bp, Cannabis sativa
  modified_base (2533)..(2537): a, c, t, g, unknown or other
taaaataaattccaacaataatattatatgtaacgaccatgaggtttaactatttcagttttaatctataaatgcatctttccaacgacaaaaaaaaattacgtcactttattttttaaaatacatcaccaaaacttgacattttctattttataacacacttttatattatatcatacatcactctatcatttaaaatacatcaccaaaactatacttttactattttacaacacacttttacattgcaccatacatttacttctttaaaatacataactaaaactctatttttcttttttaaaaaagaaattattatattttattcatttcaaatatataatattaatatatacatacatccctataaaaaaataattattaaaacctagaacaattaataaaatatttttagagcaataaatagtattctataaatgtagagcatgaatagttttaaaaaaaattaaaataaaagagtttagagcatctgctgtaacgtatttttagtacgattttttattttctttttaaaaaacttctccattttagaaaagatgttgtgagtgatcttagctattattttacagatttaggtattttaaagaagttgatagaatggtgatttagcagtctttaattattattttacctcacacagttatattaaatcatatatcaacttttctatattatttttaaaaaataatataataacactaatatcacacatatattacaaaatggttttgaagtactgatataatattttatagcttaatgaatagtgcttttctacatgtagctaagcactattcatgagctaaatcttttaacataatagcttaattgatggagcaatattttcatcattttttgatatcttagctaaataatttacatttctaaaagcactcacatctcatgaggtaaaataactcaaaaggtaaaaatatagaaaagtgttaaaaaggactccatcaagtgagctaaaatagtttaaaattttagctcatgaatattgcttctctacatgtagagagaaatactatttattattcaaatattattttaataatttctctctcatctttaattcttttttatttaatttttaaaatttttttggtttataaaataaaatatattaaaaaatataatagaaaaacagatgtatgatgtaatgtaaaagtgtgatgtaaaataaagaaaatgagattttaatgaggtattttaaaaagtagaataaagaaattgatgtgagttatcttatccattttaactactttattatgagtgctcttaggaaataaactgagtttatatatacacatttagctcacttgttacacattagcttatatatttacctttagagctagctcactagttcagattgctcttagggcactcccaaccgtttctctcctgtaaaatatctcacaaaaatttaattttttttaatttacttcacatatttatatttcatcatacatcaatttttttttttttttatatttttctttataccatttaaataacatacttataaaatataaaataataatatattatacattacataatatatatttatttttacacttacaaataaacaaatatattataaaaataataaaaaattatagctaagccctaaaatcaagaaatttcttagtacatttagctaaatattatttatgaggtaaatttttaagcaattttagttcatttattggattgcttttttttatttttttttttaatttttttaactctgaacttttttttttttttccttttatagttatttcaaattagctattgtgagtgctcttatatatttatgtaatgtaaaaataatattatttagaaaaattctataacttccttaataggggtccaccaatgcattctatctgtttcgtcatttgagagaatttttagtccaattcttttatggtcatttacgttctagttatttaggacaacctgcaaaaaatttaacacaccgaaatagggtttaaacagtcttttcacatgcatataaaattaaggattctcactaacaaattgtttcaacactattttcagcgtgttaaattttttcgaatctctcaaaatttggaacgtagatgaccatggaaaaaattggactacaaacttctcttagatgcaaattcatatagggacgcatcagtgaaccccttttaagaagtatcctattatttattagaaaattataaataaaaaaaacgacatatgtaaatggaaaactctacaatgcaccccttaaaaggggtgtatcaatgtacctatatttgtttcggtatttgagagacttttttagtctaattttttttatgatcgtgtacattatatttatttaagatattttgtaaaattttaagaaattctaaaaaacttaacacgtcaaaaatataattcaaattgtttgttgtacgtttgtcaaataaattatttgaatattattttttagattgtaaattatttatttttttaaaattttatnnnnnattttaaataattataacgtatattattataaaacaaaaaattaaacaaaaatatttttaaatagatatgagtgtatcactatgttacaagcatcaaaaattaaaaaaattcgtaaaaaggtggagcctgttggctgttttcagtttttaaaattatatttttaaaagtgagaatagaaaacagttttttgtcattttaaaaatttaatagtgtttggcacaaatttttaaaactatttttagattttctcttactaaaaaaattaatattttaatatcataccatgacatgaacccatctagatttaggttcgggtatggtttcaggtttatgatccgagtatgcaagcaaaaatatataaaatataataatgagacaaaaaaaaaattgtttttgaaaattgaaaaacaacattttgatgttttctgttttctaattactcaattttaaaaaattatttttaaaaaattttaccaaacaacttctattagtttttaaaaactgtttttaattttaaaaaacagaaaacagtttttaagttatacagcgaaacagacaactttctgatttatttatttatttatttatttttttacatttttacaattttctatagaaacaacacaaaaataacaagaaaactatataa

SEQ ID NO: 27086 - DNA, 1297 bp, Cannabis sativa
aaaattatttatattttctgtatcgattcgtattaggacttgtcttcaagttggttatattaaaaaaataattgtcaaaaattaaattcagtgtcctatttttaccattttgaaaaatataggtcaaaggtccaaaatagtatttacacgttaaatatttaagacatattatgtcttaagtttacttaaataataaagtaaattttattatttcattaaacataatcaaaagatgatacaaaattgttttcttaagaataaattaattaaaattattttaaataatttgtgagcgtcaaaaacatacgaatttgctcttatggaaagaaaagaagatggagttttaataattgagtatgaactctttataattgtatttaaagatactaactaatattacacgtttctataatatttttctgtgcagttggaaatgttgtgtagatgttatttacaagagggaaaacggttgtataacggatacaaaccaactttgcaagtacataatgagaattcctggacttcaatcacttggcttttacagataccataatgaaagaggcattggaatacttggaagagggaatatgatcttacctatttcgtctagcagctatgaattttcgacttgtgcttgtagatgatctggcaacgtcatcagtagtcattactttcaaatattatattatgtatgatatatgaaaggcttatttaactacataaataataataatataaataataaattttctattattaacaagaatgaactgaaaagacgtgagttcctatatcagatactggtgcttcttaagatcaagctgctaggaagataatatacttgtgtagaagagccatcccaatcactactaatttttaatgggaaaaacaaataaatataatcagtttcaatgtagggtcatgttttgtttaaccttttcaaaagacgagcatttcattgtcatcttcatgatacaaaactaaatgaatcattaaacaaacctagcttcagaagaagaattacacatttaacaccattcttggtttggttatcacatatcaatgcccggaccatggtcttgagttttgacacattaaaccaacaatgattttttaacaaatattatgtaaaatgaagaaccaatttcaaacttcatttgagttgggatgtgaactcaggtcaagagtcaaaacttgcactgaaattggatattgcacgacgaagttcacccaagaaatccatttgtgagccaggagacccaggtcgaccagttggagtcataaactgaaagacatt

SEQ ID NO: 27087 - DNA, 2888 bp, Cannabis sativa
atatagttttacataaaaatattgcataaaatacaattcaatataatactttacaatacaatacgacttaatacagcgttccaaacgagcccttaatgtattaaattatgataaaatgatgatgatgaattaataattagtaccacgtttcatgttgtaaccacggttttgaagctcagtgtacatttgacacaaaccacagggtccacaaaagctatttgtcaaacaatcttggcaagagtctcctttgagacccaattggtctctcatccttgatctatagatacatgaatatatgcaacccaatcctgtcactaatgatatcaatgtgtacaaactcccacttgctgcacatgctgtgtaattaatgaatttataatctcaattagtaatatatatatatatatatatgattaatactaacaaataattcattaattgttacttacatatggatcctttgtctatgatctcagcaactcggccaaaggtaacacaagggcaccaacaagttaagcaacctagtaaatagaaatagttaagccattaattagatatttttcaagttcataattagggttaatacgtttttggattttgtattttgtaaaagttaccgaagtgacagattgaacatatattttctaaaactgtacaaatagtatcctgaactcaatttttgataatttctaacacgatgaatatatatatagggttcaatttgttatttgacaaaatatagtatctaatcaataatttttacaaaacacttatttatcttagtaattaattagtagtgagaagaggaaagatgacttacaggtgttgaaattggaaaagcagtcacagagaccagtggaccatggagcttgagaggaatgcatatttgtagtcattaatttcctaaggaaaaataatgagatgagatgagatgttgttgtgttgtgtgtgtactaaagaaaagaatgagatattgctcctatttatagtacttctactacattatcttctttattaacttaaaataataattagtaataaataaaatatcaactttctaggcggcctagctttttgatagtgagtcttttgtgtactaagtggagcattattattggatactagtagtatttagtatctctaaatatgtcgttttgcgattaactaataatactctttaaaagttattatattaaaatatatagaactcaatacttagttggactaatagcaatattaatacatagtagagtgttaggcaccatttgtgtcttttcgcatttatcatttttttaggtgattctattttggtggaaatgctccaatgggatctcttcatcatcaaaaaataattgtatttgttctgttttacaatcgttcatgtgagtgttatttgtggagtttatattatacttagcttgtatttgaaaataatttaaattacaaagtgttaattacatatgaatttctaatatcttgtttgacaaaatagttagtaattacacaggtaataatatttttttagtagttaatgtttaaatagattacttttagtaattacactcaattctcatgactctgagagtgtaattagaacccctcaattacctccaattatacttgttacactttaattccatagtcaaacaaatatattaaattgtgtaattacctctaatcatactatggctttccaactacgctcttaaaagttaccaagacgtaatcttagagttttaataattagataaatatttattttgtataattaaatttatgaatatatatctctacttcaagttcaactcacttaacaaacaccccgttaatttagattttttttgtcaatatctaggggtattcataaaataatcaatgcaatccaatctatatgattcaatccaattcaatctacaaagagtggatatttggacttgtgcagatcggattggattggaaaattcaaaatctgcacttgtgcggtattatctggtataaaccagtaagaaacagagaaaacagagaagaaaatgaagaaggaaagaaatcctttattgctgagattgaaaaatgaatacaaccaacctaaaaatacaagggaaacaatcactacatatagctgtcaataacagaattgttacagccataacaaccataaccaactctaactaactgacagctaagaccaactaactaacttctaacaacttcttgatatgcggagtgaatgttgattgacatgtaaagtaactgatcttatccaacccttacatatttatatatttaaaaatatatatatacaattaatattttaatgttaaaaaataataatttaaaaatataatacatacaaaactaatatattttaaaactttaataaatcaaatatatattacaatcttatatataaagaaaatataatttaaaacaaaattaaatatgtctttctacatacaatttcttttttcttcctttgaataattattagttattttatttattttaatatgttgttggagcataaaacaacaataattatgttattttgttgtttattatggtaaaaaaattttttttaataaatattaaattattcaatgttaaaaagtaattaatctaaaataatcgatttgatctgtacttttgcggattagattgaattttagatctaaaaaataaaatccgcacttagtgcggatcagatgcactatgagtaaaataatgcagattaaattggatgaacactcttttatatctatactattttatgtatttatatatagagaagaaaaaaatatcgatccatataagtaaatatgagagctacaactttagtctaataaaaaaggaattatttaaaaaaaaaaaaaacacacacacaaaaacaa

SEQ ID NO: 27088 - DNA, 2132 bp, Cannabis sativa
  modified_base (26)..(35): a, c, t, g, unknown or other
ataaaatggattacattgaaatggannnnnnnnnngggcataaaacccaacatgaacctctcaaactctaactctctctttctcattgtttataggtggcattcgagctcatcggttgccttcatggagcacatctctgccgccctcaccctcgccctcgccctcgccctatctctctctctcaaccatcttgaacctatttggaaactttcttaattctacataatctgccactgtagattccaatcttacaactgtgaaaatgtgtttgtggctgtctctagggtttctatgatatataaataggaccaagagagcagccaaactctttcacctctcctagttttatttttcatattttcatctttgtgaaaagagagtatcttttgtaaaaacctaaagtgttcagataggttttagtgtttgttgttttttattattcttatattgttcgtaaaattggttgaagaactatgtttgaacaagtgtggattttttggagaagactttttgaagtctcatttcgggaggaaatgagcatatatgtttgggagaagatttgtttaagccttacttcaggaggaagtaagtacacatcaatggctgaggggagttcactacttggtgtgtttcagagatcatattagcaaggtgaattacaagggttgcagaaaatcattagagggagtctaaatttgcttaagtcaattacttttctaatctttgatactttactaattgatttcattctctgggcgtggctctgtggactaggagtgttcgaaagaacaccgataccacgtataattctcttatgtcaagtttttacattctgtatagttgtttctattttgattatacaaattggtgttctgctatgaccggttttcaatctgttactgcacactattaaagttgtgttttttaataactgaaatttaataaatatattggcatatgctaaaacacgggtttttagttggtattagagcaggacactaaattgttagtgtagttatttaatgttttttgtgtttttgcaacatatttccctttgtagacggaagttctattgttcgtcctctacttctcaatgattctaactatttatattggaaggttagaatgagggcatcatcaatcccaagatgaaaagcatagagatcaattctttcaggctcgtctcattcggttgtggtagattctaaaggtaataaaatgttaaaagctaaacttgaatggtttagtgaagatgataagttacatgcttacaataaaaattttacatgctatatttaatggaatagatgaagtttttatcaaacttatatattcttatgaatctgccaaagatgcatgaaaaattcttcaaaccaaattcaaaggaataattgatgttaagcgatctagatttataatgcttcaaaccaagtttgatgatcttagaatgtatataatgaatatatgtctaaattttatgaaagattatcttatattgctaacgaatcttctcttaagcaaaaaacttgatgaatcggtgatagttcgaaaaattgtgagagtccttcctaacaaatttgacgttaagttattggcttggagaagtaaaagatttcaggaagatgaaggtggaggagttgatggggtccttgcgtacctttgaaataaattaataaatcaagaaaaaagacaaacccaagtccacagttgatagaggtaaatgaattacttttaatgttgctaaaaaataaattttagatgaagaagaagatgagatggatgtttcaactaaaaactttcaaaaatacatgaaaaagataagtgacaaaaataattttttaaatttctccaaagttaatacttttttaaaatcttcaatgactaacaatcaaaagagaattcaatgcagggaatgtgaaagctttggtcacattctgtctgaatgtgcaaatacactaaaaagaattaagaaaagttttaatgtcacatggagtgatgataaaactgatagtgatggagataattcttacaatgttgtagtaacctcaatttcttctagtttgttttgtgattcataggtgaaagaaagattgatatgtttgaattagggctgtacaaaaattttcgtaaac

SEQ ID NO: 27089 - DNA, 2347 bp, Cannabis sativa
gatcaagacgtttgttggtttggggaaattcccttacctattttcacttctgttgttaatgactgctgttgattaataatattagtgaattttctcaaaaaaaaatattaagacttgttgtgttagtggtttttaaaagttgcaaactcgaataaatacttcccaaaataaataaaatataattctatagtagttatgtcaaacctcgtgatttgcatgtgattctcatttgtaatgtttttacttttatttatcccatctttccatgtgcttctcattctcttaccttgttttttttttttaattaaaaaatcattctaaaattttttggattaaaaaataaaaatttgttttttaaaattaattgaaataatttaaataattcttaatttactagtttttttttaatattaccaaacagtttggaaaatattttttattaaaaaaacttatataaacaattatacaaatagtcaaaataagttaaaaaacttatagctattttatactttagtaaaaaattaaagttaaaaatagccaaacagtacgtcctataagatataatccataccaaaaaaatgtacgtataataatatgaaagaataaattaatttagtatcatatatacgcatatcaatttttttttttttttttgaaaataattgaatgatcaaaattttaattattttatttaatttctataatttcaagaataacaaattaataacaacaataattttgtttagttttttttttttctttttttatgttgaactcaatatgaccctatcaaattatatgtatatgtctagttaaatacatgtgtcactcttcaaaaaaaaaaaaaaaagtaggtgccactcacgcctatactatacaatcatacttaccaattactgttaaatgctcaacacacccattatatcttgcaaacatatgttttaatcatatttatagacaatactttattcctcaaaaagacacaaagcaaagccgcaaaataatcttttctttctagaaaaaattaaaaaaatgtaataaaaaaaatatatatatatataataaggcaagtagctagaaaatatgtaatgtcgtggcaggccgttctaaacattttagagccacttaccaaaaaaaaaaaaaaacattttagagccatgttctaattttaaaatttgagtcctaaaaaaaatataatttatagataatatttttaaatattatcatttagttatatattttacaaaacacaaaaaaattctcactatttataaaaattgttattgattccaataaaaaaaaaaaaaagaatataaaagatttgaaaaaaaataataaatagcagtaatgaattttttttttacttaaaagcattaatacaattgaaaatggactttgatcgaattaggatggacgtcactactgataaattgttagtccctttaaaaattaaattcattcaaaaaaaaattattaggcgaaaaaatatattgaaccctgtgcagtagctcaacttgcacaccgttatagccggccatgcacctagtcctgtattattatataaatatatccattgatatttaagaggaatataaagagagtgagagcagtgtaagatgacaacacaacaatgaggtttatttttatttttatttttgttttttttaatataatgtacaatacaaagcaaccgggtcgggtccacactgttgggtctcatttccactaataagtctctttgaatcttaatataatattctttttacgtgcttacattcccagttcaacacgttcacgtacagttctatgcacccaaaaaagaaaagaaaacatttctaattaattattagagaaggaaaagtgtaaagacttattttattaagatacatataattcaacacattacaaatgaacataataaacaatgatatcttaatgaatgattgattaattttcttagatgataattaactgagaaaacccacggaattaagttttctcttttttctttttaatttctttgctaaaattcgagtgtttatatgatggtaggatgtatagatactactacagttatagacttaaaatgctattttttctactccttttataaaaaagaaaactaaagcgtgtgagtcgattttttggtaaaaacagtaagtaaatatattattaatatcttttaaaggtagttttagaatcaggtatttagagtgtgagtcgagccatctatggcgtcggttatttaaaaataaccgacgtggctattttaccatatggcgtcactactataaaaatggattttcccgacatttttaaatagtcgtttaaagtattcctgtcggtt

SEQ ID NO: 27090 - DNA, 1430 bp, Cannabis sativa
atttatttatttatttagcttttcgtagtgctttactataattgaatctttgtggttgataccaaacgggacccactctagagattcacacatgtcctagtagcaacaaattgttggattacgacataaaataaaataaattggtagtgacgtggcattcaattattggccacctataataatggaccaaatttataaaaaaaaaaaagttcattatttgataacaaaaagagaaaaaattagcaacgtcgtttcgcagcttccaccatcaaaaaggaaagattttgcggtttcattttatttttcttataacaccttttcgaagactgcagggccaaattaaacacaatataataactctctctctattttgtcccaaattattcaatttaatcttatctattatatatctaatattgttgcatattcattcatatatgtgtgggctggaatctttgataccgcatagcgccatacatttaagattcgtttggtacactatgttgattatattatattatattatttaatataatagtatgtttagtgttgatttatattaaaagattgtgtgaaattatattatatttatcataaatccgactcttgctccaaactcgaacctcggctcgacaccgaccataaacccaaaccctagccctagtctcaaactcagaccctgactccaaccttagcctcagaggctcagacttgtctcctcatccaagatcctcaacccagatccaaatgtcagatcttcactttctaaatattataatataagataatatgaatcatttcttatgtatgaaataatataattcacacaaaattttgttcaaacaattttttttcttatttaatgcagtacgatccttatatggtttaccaaatgagtggtacaccgtattgtgttgtgttgtattctatgatttttggctatatggtattatttaatacaaactttattttgtattgacttgtattaataagttgtgtattaaattatactaattaccataaactcaacctcgaactcggtccggttggggtccatgttcgggtttgggatcaggtctaaggccagggatgaggtagggtccagtctgggtcccaaagtagggcttagtccggggttgggctgagggcggatttgggtctagggctagagtcgggtactaggttcgagtttgggtctgcggtaggatcgagtatgtgttcaggtccaggtctaggactggggtctgagttcagaacttggactgggtccggggctggtgtttgacactaggttcgagtcttgggtcgggatcaagtccgggtttggttcgaggccgcgtttagtttggattcgggtctgggtcgtggctggcactgggaccacttttggggtcgtgtccgtgtttgggactaaggtttgagtttggaat

SEQ ID NO: 27091 - DNA, 4594 bp, Cannabis sativa
  modified_base (2703)..(2715): a, c, t, g, unknown or other
aatgtataaattctattaagtccagaacatatatgattattaatttaatatctcacactcacaaagtgtaactaaacttttatatgattagttgttaacttgaccaaaaagcgatactttgtattttcaaataaaaatatgagatatttaagttttaaaattataaagatgagaactgtctcataggctcaatgaaattgactcgataatgaccctaaggtggcaattaattgtcaaagaattttattgtgtaataacttaaatattattttatgtgttttatttgtatgcgctcatgcatcacatttatagtcattctaaaatgatatttattattcaaatatattcattatgttatctttatttattttagtcatgtttactataacaaattctcttattgcttcattagcaattaaaaaaatcaatggtgaatattccataaatggaaatctaattaatatgaatttgatgctagtttgcaagaaccacacatttatctttactaaggagtgtctttgtagaaactcatgtattacacatgattgagctaatacatgaggcggagacacaaggtaacatgtggtgaatatgttagaacctggttggagcatattccccaaataggctgactagattcctcccaaagataaatttatccaagtaaagctatcttgcaaccattctttgaacgaagctagtatcttgtgatatgccatgcaattgagcatgtcgggctgaatatattgttcgtatacatatttatggtgggaatagatcttttctagattcttttctaattgctcccacgacaatagaaaccataatccctattcattcgggattaactcgccagaccgaagattcatgggattgttagcctggagtcgatcttcaactgatttcaactaaatagggaatttaatttactgctagaacttaaatgtattacctctcccctataaatagtgaaaccattcggtgggggagggaccttttttaatgctcttaacttgcgattattttgcagaaatattttttacattgctcatttagtcagaccttgtgatttagtagtttttttttttaaaaaaaatgatacaattaaaaggggagtaaactattaccattatacggagctgaatttctataaattttgtatgtcgttttatattattgtttttaccattaatttattatcattcttgttgttttaattgaatttgtgtcattagctaaaagtgagatctaacatgttataaaatattaaaatttattatagatatggaaattgatcaatcaaccgcataatatatgtctgttcaagggtcaaatgtcacgtgctttaatgcacttcaaaaggatcaatctttggttcaaaagaaagaaaaaaaaaagatcaaacttaacatgtatatatatgtacgtaattagtgaatgttcaattaaatgtaattatatataaaaattatcaaaagcaatacgtattattttgagatcatgcctcatgtttatatatattttataaaataaaatatataaaggagttcgcaggctgaattagggaacacacaataacttttgcattgtgttttatatagattgttgggttataattaggagtttataaaaatcattaatttgttaattagatgtcaatacaactacatatcgtggaatataatgattgccaactcatacatataattaattatatatatatatgtttacaagtgtaagaattccattgattaagaggcaaagaaagcatagtagtattctttctttctttcttttatatatatataaaaaaaatactagtagtaaatagttatcacaatatgcaaatgagatgcaactcatcgcaaatcctaaagcatttggacttttaactttgtaatacgaaacattcaataaagccaaatataacaaatgaatgaaattcaaatgggctacaataccacaacaaaggatggagtacgaaagtgatgggccaactcatacatatatattatcattaatattgatttagatacacatttcatgaataaaagatctccatatatttatatagcatgatcatcaaataaggctaattataatgtattatatattagtttggttagtgagcaaagtactctttctctctctattaattagcaacgtactcttagaccgttcttaatgcaaaatggtctgcagatgctggacataatgtcaaaatactaaatgtttttagtgcaaattaatttttgggttgaactagaagaaaaaaaaaatgtaaattagatgaaacaagaacaaacaaaatttaataaaacaataacatagtactaaataatgactgtatatgcttataattagataatcatatcaaaaatttcatttacatacaaactccaaaaagaatttatagtgtagatttatgttcgagcaatatatcacatcacatgcaacaggcaaattcggatagtactactgtattagaaattaaagagattaatacgaatttagtaaaagtaggactgaaaatttgcctagggtttaactcggactcttgttacccgtttggatccggactcatgaacccgtactatacaaagaacccattaaaatactcacgagtcgggtctaacctgtgtacatttacaagtaggttacaagtctaacatgtacccgtttctttttattattattattatnnnnnnnnnnnnnattattattattattaaatattatgagaaatttataattttatgtatagtacttaattatattatatgtacatacaaatttatttataatttattatacattttattaattatgaattttattaattatgagaaacatattcttaattttatatacaaattatatataattaaaataaataataaagagatcaataaataataataataaatttcctttactcaggtaaaatattgaaagaaatcaattcaattatcattattttaattttgaagaataaatatcctgcaaatgttagtgaatttcgtcatatatcttattgtattgttatttacaaggttgtgactaagcttatctgctctcggcttagacttgtgtttaatgatttgatttctcaaaatcaaagcgattttattcatgatagatacattgcttataatgtaatgatgtgccaagaccttgtcagattttatagaagaaagaattagaggcctaattgtatgattaagttggatgtgaagaaagcttatgataccatataatagggattcattgaagaaatgttgcaagctttcaattttcctcagagttttatagatttgatcatgatttgtatccgaacttctcagttcaatttgatacttaatgggcaaatgcaaagatttttttggagctaaaaggggtctttgtcaaggtgacctgatgtctccattgctttttgtattggggatggagtacctatctcggattatgatgaaggttagctaggaggatggatggtttcaagtaccaagagaggtgttgtggccttcagttgaatcatttatgctttgctgatgatgtgttgctctgcaatggtgatttcaagtctatctattttatgctccaatgattaaaacttttctcttctgctttggttttacaacctagtgagtccaagtaagcaatttattgtagtggaatggaagaagttgaagtccaaagagttctagatgcttcagggtttacaaggagttgcatgccttttgagtacctgggtattcttatttgtgcgaagagactgttaactcctgaatgcttgtgtatattggaaaaaatggtggctcacattagagtttggagctcaaggaacattttctttgctggaagagtaactttaatcaactcaatcttagtatccattcattcttattgggcacaaatcatgttattaccgaagaagatactgaagcaaattaatgctatgtgtagagcttttctttggaaaggtaaagaagaacataatggttcaggttatgtatcttgggcaaagctttgtaagtctcggaaagaaggtggcttgagttttagaatgttactaatttggaatcaagcggctcttgacaagtatgtgtgggccatttcttcaaagcaagataatctttgggtgaaataggttcataatgtttacttgaagggttaaaattgatggaactactcttccaacatgcagagtagctggtattggaggcaaatagtggttgtgaaggacaaaattaagcagttttgttgtgagcaacaattcttagctcacccatactccatcaaccatgcttataaggctattcttcctacttatgagaaagtaaattggactaatcaagtttaggagagactatccattctaaagtatcgttttatactttggctagctgttctacaaaggttgcaaacaagagatgactaatgaaattcaatatttgtcaaatgaatacatgtctattgtgtaattttcaggctaaatttgtggagcatctttactttaactgtcatttcagcatgacttatttacaagagattaaaaagtggcttggttggagatgcatgggctcagatttga

SEQ ID NO: 27092 - DNA, 2371 bp, Cannabis sativa
taattttttagttgcttataatatcattaattacgatactataatcagggtataagggtttcctaacaattcgtattttattaaaatacattgcctattttgtttactacgattttaaaccgtcgggaatactaaatttttcccgacagttttaaatagttacttaatttttttagcgatggtctctgaaaaaaatcgtttttaggaccgtcacgaattttgatatttgtagtagtgcacaatttataatcatggctctaatttatgtgaatgacattgtcattagaggaaataactctataaagtttaacaactccattcaaaggtcgaatatggccttttctcttaaagatttgggggcactaaactacttcttgggaatagaagtttatagagactcaactggaatgtacctatcttaaggaaatacataatagaccttctccacaagcttaacatgaagaacatcaaaccctgtccaacacctatggttggaggaaaacctctatctctccatgatgggactgtacttgaaaatccctccaattataggaggatcataggagctatgtagtaccttactcatacgaggccagatataacctttgcagtaaaaaagttgagccagtttctcaaagacgctactacaactcacttgagtgcagccaagagaatattttgattcttaaaggcacaatacattatggaattcacattcattaaagtgatcgacttgggattgtaggttactcagacgcggattgggcctgctgcactgatgatagaaaatccataggcagatattgtatgtattttggagaagcattcatctcacggtcctccaaaaagcaatctgttgtctccaagtctagcacagagtcaaaatacaaggtcgatgctcatgttactactgaaatcacttggatttagtcactgcttaatgaaattaataaatactcctatagtgtggtgtgataacatgagtgcaagctcacttgctataaattcagtctatcatgcaaggactaagcatatagatctggatattcattttgttcaagataaagtaattcataagcaaattaatcttagatacaaaaggtctttcccactctcagtttcaattcttagttgacaagctcggtgtgatctcttcaccctttcgcttgagaagtggtgttaaaaattgattaaacaatgtaattaggctgctaattctttttgttaaaggtagtgtgctggtgcacacactactgaatgtaagaaaattatgttatagcctttttgcttgaattggttgcattgtggtcctatcttgtaggccttgccatctgttccctacttttgttctgtattgtaatccttcattatataatgaattgttctttcttagcctccttttgagttgagttttctctattggggcatttggcagtttccaaactcaatcataaaaatgtgactcatactaactgatgagcgattctagcaactatcaatgcatgaaaagtcgtttcatcaaaaaaaaaaaaaaattgcaccttggacatgctctactaataagtatatgtttatgctgaaattggcacaagtgggaagagaattaaacgttgttgataagtatatttttacttgttcaaccttatttctcgaagtaaatacaataattttaaataattaaatatattatttactactcaaatatttctagaagaaattaaaaacaacaagaagatgaaatatgatacacaatcaaaatataagaaatctatatatcatgtatggaattgaataatagtggtaacgtaggcctgtagaacgaacacgcttatatcaaggtaaaattatatttaactattgaatagaatatgaattgtacacatattttaattgtaaatttattgtatatttggaatatttaaatatcatttcccctgaagataatgaatagatataaaatttaatttcaaagaatatagattttacatatattagtaatgccagaagttatttcattatttcttaaaatcaatgatttcaaactattgttgctataagatatttatatatatatttcaagtgaatacatattggtgtctaacatattcaatcaagtgtcaattttgcagatttattcacaaagttattactaacatcaataattgagaagacgacatacaagattggaatttattgatttaaagatctccacgaatgcctaaacaaggagaagttaattcatactacactctttgtttttgaccaagtttttttagcaggatttttaatgagtaagtttttatagacatccaaggaggagtacattatgaaatattatatatgaatatgtctaaattatcaaattaattat

SEQ ID NO: 27093 - DNA, 2486 bp, Cannabis sativa
attttaaatattgttttaaaaaaattaaaaaattaataagtaatttccttctaatttataaattttaataatacacataacaaaaacaaaaataaaaatataactaagtatacgtctaatgcacgtaataataacctagtatatataataattgctctcaaatataatggtaaaaaaaagtaaaatctttatctaaccttaaaatactattagatgattctacaatgcatcacattgatgcaccatctagttgtttcggcatttagaaaaaaaaatagtttaattttttttatagttatttaagatattctacaaaattttaagaaatttaaaataatttacaatgtagaaagtaatgttcaaactgtttatttcacacacatataaaataaaatagtcacatgtctaacacactttttaaaccctatttttagcatgttaattttcaaatttctcaaaattttagaagatgacttaaataactataacgtgcatgaccataagaaaacatctcactaaaaaattattttgaataacaaaataaataatagtgcattgatccattccttttaagaattttccattattattaatttttttttttttttgagaaatagtaaaatattttatgattgggctttttccttttggactcctttgcctgttgggagcaaagcccatacatgatcaccctctcaaatctcaatagtccaccttccttcctctgctttttttcttggacataagacagagcagaagaagacacgttgcttcatcttcacttttcttggactgagagaagcagaggcatacttcctcttcaagctcaacccttacatctctcagaccttatagtcttttctttccaaagaagccctcaccctttagcccaaaccttggttgaagaaagagaacatttctgcagctacacataaggttacaaatctagcaaacatatacattatatattttctttctaaatattgttgtgttaaattttacatttgtaatccatttattctctcatacaaggcagtataaaaatatagttttattgctgagttataattatgtataatatttaacggtataatttttttcttttacagtacaatccacctcactcatggctgaaaagagccgtataaagaagagtggtcttccggagataaaaagaatcaagacgacattaatggttgaggctgaggacagaatatctaaattacctaatataattattgtacctattctgtcatttttctccctactaaggatgtggttcggacatgcatcctctcaaaacgttggaaattcatatggtattccgttcccaaattatttttctctgatactaggcgaatttcaaaagttccaaaattatgttgacaattgcttggaacaccttaggagaggcatgtattttattgctgattcagctgtaactactttcaagcttcagatgaaatgctgtcgaaaaagcaagactggctgtctagataaatggttaaatttggcagttgaaaataaagtcacggaattgaatcttgagttaaagccgggaaaaggtaagaattacgattcttactactactataacagtactcaacttaacagatttgacgattttggaattgagttgggttactcatttagttttccatccttaaaatcattatcattggaggacattgggcttgcagataatgtgaaaaatgatgtgttatccaagtctttcatggattgcccttctcttgaggagctgttgttaacttcttgtcacaacttaagtactactcatcatccgctcttggtaaaaaattcaaccctcaagttcatgaaaattacatttgatgtatcccttcaagttgaagccataaatcttgaatctttagaactatgttgggcttgccttgggaaaataaatctctcttcttgtaaagcaattagaaatctctcactatcttattgtgaatgggatacgacaacccagtcatcatttgaagatctcatttcaaacctcccactccttgaggatttgacttttgataattcttataattataactcggggctgaagcatcttagaatctcaaatcaacacttgaaaagcatcaagttgcttaatgtgaactccgagaatgatatgatcaagctcattacaattaagtcagtgccaaaattggtttcattttgttgtgaaggtaatatcaattgtaacagatcaatagagtcacctaatatattgaatggaaaatttgtgattagagatattcatcacaactataatttacggtaaaacaacaaattacaaatattataatttctataaataattaaatattatttttatttttgtaaaagcaatcgtatctttcatatatcttttttaagtttggtgtacttagaaaaattccccattttaaattgaagatttttatactttttaatttttaagatattatcttacaaaataagatatttttaat

SEQ ID NO: 27094 - DNA, 2885 bp, Cannabis sativa
gacaacaccatggccggccagcctcctccctaaaggtgtctggccggccaagagaaggcatgcaggatttcttgtgcaattctatacgtggactgcatagttgggatgcaaattgggccctacaagcccaatagaatagctgaataatatatatgttcaagggtattctggtattttgtaattaactaattaaatatacaaatatttagtgtttcaagttgtaaattagggtttaggcttcctatataaaggcgtgaactctaacctagaaaacctaactctctaagcctgtactagccttcaagtgacaaattctaggtctgataactctcttcctcgctctctctcacacacccacataagctttctcatcactttagaattgccaacctcaatttctactttgtattcataaggtgttatatcagatcccacctatagtgatctggatagtattaacctttggcatcaatacaactaaaaggggagtaggtcattacccgttatctaaaggggccaaacctctataacaattctctgtgtgctttactttctcattctaattgtgtagaatgtggcaaacatcagatttatataatcttgttgttggttgatcaatttttgaggtcaacagtttggtgctttcattgacaattgttgatatcatatctgatctaatgccatggttaacacgagaagaagccaggtcgcaccgtctgcatcttcaagtcttctgcaagacccttagactgtagatctggatgctcagattccaaccacaactagaattcctatgaacagtgcagatgtcctcaatcctgtccccataatagacacaacaagtctggccactacagctggccaaactgatacaagcattccggtggatctaaatagtaggccctttcctccaagggagaaccctccattggcgcctcccattgaaggaaggactcatgggcaacaacccccaggaacaacaaccgtatctcatctttggtactatgttggagagacaagactaggagttggtgagccccgtgtcgacttagaaaagatctcgagttagccagacttagagaaattgtaggccaagccagcctaactgaagaaccacccgctgctgattgcgatatatttactaagaaaagatgtgaaatcctaagatggatggatgaccaggagtacatccttcgatctcaccaagcatagttggattgtcgcaacagagaggccaacaatctaataaggcagttgaactagagaaccgatagagtccaggatctcatccgagatcaacttcaaggaagactcattgatagatcaggaagggtttatcgacaagctgaccaacctagttcctcaggaactaggacagatcttcccttgctatagggaggacaagccttgcctcaaaggtctaatagtgagaataggtagatcctggcaaccagcggcatgggggttggctagggatctatagcttaacagcatcccccattatgcagcctttagttggccagccttctgctggagtatccttggccagccaaaggggagcactcctacctcgaggggagcgaggcacccagaggtcaatcttcaaccgaaaaggatcgagagcaggtggaaacacccaaaacggcgattcgagaagtgaaactcatcaattcacacacctagaaccaccaaactcaagcaattgttgtgatctactgcctgtcaacacacaaccaacatcagtcaacctaggagttgtggatggccagaccctgccttttgcatgtctagtcggcaatggaggcatcacagatggccagaccttgccctttgtaggtttgcctggccatgaaggggtgatgggcaactagaccatgcccaatgtaggtctgcccagccatggacatcaaccaagtgtaggcatggcgggccaaagccaacacccatacctgggagttgccggccagggtctgcaatttaacacaggtctggctgacctccaccatacacactctcaaagtatggtcaaccagacccggtcgcacaaaaatccataacccctccaaggagggccggtcagtcaagtcccaacaacaacagatccttttgtgcaagcatagttggaccaacttagggacatggctcaggcataactggtccaaagccttcagatcttgaattagatcggtcaaggggatcaccattctcgacatacataaatgccttgcccttgcccaagttctagatgctagtatgtggcaagaaggaaaattatggaattgagtagccccagatcatagcagttgacctgggaagggtccctagccatgtgcccaggtcgacattgggaactttgaaatgggtgtttggatcctaccacattgtttcgaactcaccatctttcagtcttttgaaccaagaagtcattaagaatccaagttcgaagcctaggaacttaaaagagtcaaaatagcctcttgaaattcaacctaggtgcccagctcttaggttgacaccctactacgattttagtttttgggtctgccttagtgcaaacgactcaaacattgtgcctaaacatgaataagacatgtcacggacatgttagaggcaccaaaatcaaagttggagcacttcccgtttggagcatctagaaacccgatgccagggtcactcgatgatgcacccaacacccaagttgacatgttatcaacttggggcacttccacccacaaaactaaagatgtatcgtgagcattttctttgtcttcatccaaaatgaagaaacaagtgctttcaggaaagaaacagatcgacttgatggccaaaattgggacccaggccccaggttgacctcgtgataggtcctagtgcccaggttgaca

SEQ ID NO: 27095 - DNA, 3160 bp, Cannabis sativa
actgggctcacatgagaatgtcacatctgcccatgcatgaccatcattttcatttacaccacccattttcttaggcatttcttgttgcttttcaaattctatttgctgccctccatgttcagtttctatctcctgtacagtactaacacaaatcggagaaacatcacaagtctcagtctgttccaagttctctataggcttaaggtgctcagcggcacctgaaacttcagtgttgaaatctaaagccttttcatgtcctccatcagaataaacctgatcactatccttcacttgtctatctatttcccttgcttgttctacatttgactgaacgtggatatcacaagccatgttgtcatcaaagtattcttcaggattcaaggtctcatctttttcagaaactgaaataaccttagattctactacagaaacttcattctcagcaattacttgagtctgttggagtgaggactctgattctgaaatcaaatttgtgtgtttctcggtgctttcaccagttatcgcaatcttcaactgctctttctctactgaactgaaattttcaatgttattagagtctcaccaaataaggaaaagaagaaagcaattgactgaactttttaagatgatctctttacttatacacttaacacacatgtataataaataatatacacacacatatatacatgtacaaacatatacatcggattctccccttgcaccctacaatatttgagagagaaaattctaaattgtaaggtatcccccacaacatattgaacgccaaaagtcatggttgaaaactatagctaattactacaaatcaccttgggttatgttttatgaataaagtgtgcaataatttccataagtttgttgctaatcacctatagactatagttacaaaatgtaaccactaaaaaaactcatccatacatatatattcccttatctccttatccttatatataaaaagggcctatgtggtgtaaagaatttgttggtttaacacttgttatcttaattttctgttacttaacgaagaagcttaaaaaagtttaatttgttaactataatacaaattagagtgacaaatagaaacggactagagtttgttttgctaatttgctgtgttattactctatttgttataggctttttttctttttgagatagctatttattacaaacttacggttatattaatttcattaaatactaaaagctaataaactgataaagagaaagtacataaactaaagacaatttcataacattaaaaaaaatgagaaagctcaaagactcaattacatttcattacagtaagtaaattgataaaatgcattatattttaataataaaattaataataatgcatttgtaaaataattccgattccaccaaaacttatgcaaaataaagctgataaaaaataaaacggttttctttcaaattaaacaaataaaacggttcgtttcagcaaccgtttccgtcacatcccttgaaaggtttatctcttttttgacataacaagatatttaaatttccaattaaaatacgagaaaagaagtacatagttactttggctgctaaagatggtcaagaagaaacttccaagcaaaacatcggtatctttggcaaaacaagcaacttcaagttatgcatccaggtttcagccttgcgattgtgacactgaattagtctggatgccatgctcgttgttaggtaaattacttaactaagattattgagttatgctaatttttccaaagtttctgatatatgagttatgcgggttgggaaaggcacattggttttggctctagatatggtcttctatctcatcctatgtcttgcaatgattaatctactaacgtggaaggtacaagaccagtagatggatgagatacatctgtaacaaacttgtaagaataccttgatattatttcgaagaacaatagtttttggagggcaacacacacggaatcttaagagattatttggtttcaacatgtgattttagtactagtattacattaacatttaaaccattttgaagctacgaaattgtaagatagtataaattagtgcttggctattcatgagtagaaatcttcatcttgtcagcatgaaattttttgtcttaaatcagatttagataaattgttagcttatattaataagcatgaaaaaatgctaaacgtgcattggatgttgctgccgtctaatatgtttatatatataaacagtagagccttattaagttataatctctccagaatttacttggtcaagtgtattatctaaggttctaatatatatatatatatatatatatatgtgtgtataaattgatattatatatgttgaacataagagaatgtccgcaccttgcacttatagacttgtacatctgttgagctccatagtagttaccctcttcaacaactttctttaatttctcaatattctgcattttaaatcgaaaaaaaaaacagattggaattactcattcaattcaacttagcttttttttttttttttgttgaaagaacattcaacttagctaataaattaagaccacacgaacaaaaaaacagttcaactgcaccaaatttcaataagaactcctttccatcaactattactaaccaaattttcaacattcaacaaaattatgcatctaagtttgtacgtgaaattgaaatcagaagcaaaataggaatattctaatacagaaagaaatcgatgctgatgagagtttaatcaaccgagatttgacattttccaaaaggaccatgcaccagtacaaaacgattaggtgatcaatttttcatagaacaaataacgaataatgcttcaaaattcaagtatttggatccaaataacaaacacccacaagacccctccacccctctttttcgcttccaatcacttttcaggtaaacaaacacaaaatagagagaatggtttctcgggaaaaccaaaaccaagaggtaaaaagaataaatggaagaagatggattacctcttgagccggaggcagaacacctcttctaggtctctccccggacatgaccttgcttcttagaattgaggtatttcaatggcagagatctgggtctggctcaatcaagcagctgtgttggaaatgaat

SEQ ID NO: 27096 - DNA, 3330 bp, Cannabis sativa
ctttgtgttttctaggatgtaatctgaaccatcaattcaagcgtcacgtagattgtcaccttttccttatatatagagtaaaaaatttccattcaccacttttacctgattttagttttgaatttgaactttttaagagaaaacaaagatgaaattatctctactgaattaatcactatttcgacgagtgccttctccttttacatcagattcaagcatgagaaaacttagaagctccacgctcacacttgatggttcctcctttaagcccatcgagaccgcctgatatccagacaaagattgacagacttatagcttgttcccaagctcttcatctttcccaaaatcttcaccttcatcacctaataagtatcttttaggcttctagaatttcgaagtacatttgagggatagggtagaatgaacaatttgcttgagaatttacttggctaactttcttgcttgcatgtctactgtaagagattattagtgaataggatttaggccttcctagttattttggacatccttataactgaaatgttgagttaatggtatcatgtttgtagacaatgttaagttttatgaaactttgtctagttagtgattttctgatgaaatactaaacttagtaaaatgttgttgatcatggctgatatttaatcctcttggtggcacccttatggtcttaggtgaaataccatgagaatatcttgtcaaattcttgggttcccggtctgattctgaggctaagttctcccaggatttttcttccaaatgatgggtctagggggacctctccaagaaatttttggggaggactctcctattcacatgctatttgtttagtctgcttattaacttctcggtttgtttctttttctttctcactcaataaagtggcggacatcatccatcttgaaaatataattaatataatatttaaattttaataatataatattttatttacttacaaaatcttctacatcgacttcattgataaaaataccagatagttatttcgtatgagccaccctccatgcatcaaccgcatgctctttgagtggaccaccctatataaaaataaacaataatatagtttataatgtattttaagataaattattttttaaaaataaaggataaatgttattacttacaaagttgtgacgtttaaaagtcaatgatcttgtgccttgcgtcattagatatttcatcagctacctatttgctttgtttttttttttcgagcggttcaaattttttttactgatgaatagttcgcaaataggcttcaaactcaccttattcaagtggtcaggggcaattcaagaactttctctcaatctttttatttagtgtaatgttgcttaaacaacttatgtctgttagtctttcactcactatacatcttcgccgtctctgtatatagagtcccgattagtagctctcgatggggattctcgacaatattaaaataaaaatatatgataaagtaaataagaatttatattaattcttaaatgaccatataaaataattaaaaccataaataattgaaaaaaattcacccttattcgattaaacacttgatctttatattgttacatcaaaaaagttataatgatgaccttgacacaaaatggctacttactctaaataagcttgtattttaggagaattctaaagtatgtaccactcgactttttaacgagtgttatgatcaagaggctttataatttctttggtcaagggacgacattgagaattaaaaactctaagagtgtgagagacagcagttgcatcttcattgcaattaaaatgattaaatcttattttgtaccctttaaagtacattgaacaaaagattaccgcctcatctgcgacataacctttggtgatggatccttcaagacgtgccttgctaaccacataattcttcaacttttttatgtacctctcaaaaggatacatccacctcataaatattggactacctagtatagcttcttcaggcaaatgtaaaactaaacatatcgttatgtcaaaaaggacaggagaaaaaattaattctatcttgcacaatatcaaaattagatccttttgagcatcctctatatcttttacatttagagttcttgaacataattgtctaaggaaattacatagctgagtaatagtagttgcagtatcacatggtagatatttgcaaataccaatagaaaaaccacgctccatgatgacatgacagtcatgggattttattcaagaatatttaactcatatagagaaaatttgttctttaaatttgaatagaagccatcaggaaacttgattcctataactgacaaaatagttgtcttttttcacgaatcaaaacataaggaacatgcggtttcaacaaacttccattcccatcttcataaatccacaatgattctctaatacccatcttctttaaatcatgtcctgcattggtggtatccttagatttatcattatctaagatggtgccaaggagattgtcacacacattcttttcaacatgcataacatcactttaaatatttgtgctccaatacttcagctcgtaaaaaatactttttttcctccaattagaatatgccacaactcttctacatttcatgcccccaaaatcttgatgatatcttagaatttgcggttccagagtattaacttattctaatatctcctcacaagtaaatcgtctcagaggaggtcttttttcaacatttccatcaaaccaagtgtcccttctcattgcgcgattacttggcaagaaccttctatgaccaacataagaggtcttcccaattacttgaatagaagttgtgtcttcattataagtaggacaagctttataaccttaaccactctatccaaacaagctacaatgagcaggaaaatcattcaatgtccacaaaagcgatacacacattgtaaacatcatgttggcctaactatctttggtgggtactccattattccacaactcctttaactcgtccaccaacggtcttaaaaatatatccatgttttacctagagattttgcaccaagaataaggatggttagcataaaataattatctttcatacataacaaagatggtaggttatagttagccaacaccaccggccacatacggtatgcaatactcatgttgccaaatggattaaatccatcagcaactaaccccaatcaaatgtttcttggatcgcttgcaaactcaggatgctttgcatcgaagtctttccaagaaagatcatcaaccgggtgtcacatcaccccataatcttttgattt

SEQ ID NO: 27097 - DNA, 2610 bp, Cannabis sativa
atgagataaaataaacaattataaaattaaaaagaagccgaatcacttggttatgtgactgtatggcaaaacgaaaaaatgttttttttttttggtggacattcattcttctattaagtttatagctatatgaccactcattcatatcatacaaagatagatatataaataaaatataatgatacaaattgataaagacgtacctcttgttttatggttgatgaacttggtgaaatgctaaaggtgtaagagaagagagagtgcgttagataagaagaggaagaagctatttatggtagctcatcagtttagtgctcaattgaaaagaaaaagctggaagtggtatttcttgcttagttggaattgttatctgaggacctaaatttaattatttagttttggatttggagatagatagatagatagcttttagttcaattttgcttttgacacataagagacacgacatcaatactttctactagtccatccatttgtggtttattggcaaacgtctcttcctcctttagttcaagccccacatatatttttgttaaaagaaaattattttcaaccgttagatttttaatctgtttttattattattattattaaatatgttgtaactattttaaaaaaatttaacgaaattattttgacaaaaataaaattcaaacaattacacttgaatctctaatctctattcatgatatgaatattgtaaattaaatttaaaaattatcctatataccaaaataacaagcacctagaacaaaataatttttgaacgtgcctacataatattctactaacatgcgattcgattcagaacttactatataatgtaatgttataagattatacataagaaaaatttaaatttttccagcaaaagaataaacatgattttctccatgtttataagtaggataaaaatgtaattttatgtaagcttttttcgattatattttgtgccccaatcaaattatgcacatctaatctacaatgtatgattatgcgtgtacatttatatttgcatacagagccttcactaacaatgctattcaatcaagacagacttgactgctcttcttttaaacatgatgatgcctaataaaattcaaattctatatggtgccttttgattaccagtcatgtgctcaaactcccatctcgatttggttacctgactcgatggtaaaaaaaagttgactagtattaggcaataataaacagttagaaaaagatgtaagaataacaatatcaatacaaaatcctcgaggaagagatgcaattacacagatttcctcactctaataacagttgtaccgcacaaatgtcaatgaccagatatatgccaaactgagtaaaatagcattcgaccatttaccattttccttctctgtcgaaacaaacgatgaattgatgcctagagtttttttagaacagttccaaacatctcatgaactatcgaccagcattagtacagaaacacagacgttaatataataacctctggcaaacctctcttcttcaaattaatcgctttccaagtcgatccattgatccctcatctttgagttatttgccattgaaattcaacaagtgaggattcttattgactagagttaaccaggctacttcacttctcctcgccgttccccgagacctccttagcatctccaataggaccgtcattaccagcattttctcgaatgctgctttcatgtattgttgcattttgatgatttttgacattcatggctatctcatcagtggtcatgtcatcattagccacttcatcaacagagttttgaggcacttccttttcctcagcaaccacctcgctcataccatctcctgtgccattcgtactggagagttgaatgttagaaccgtcgtaaccattgccttctgcaggatttatttcatcatgagctgtaggagattgagcatgttcttcaatagatttggtttgctgaccagcattttcgtcacgagatgggtcaatggacatagcactaacaagctcatctgaggcaactgttaacacagaatcctctgtgctctgtgcaacagactgatttgctgcagattcagccaactcggtatcacaattatttgctgctatctcttcttgcttttgtgcttgcactctgtattcatccatttgatgccgtgtcctttctagctcccctaacagatctccataccgcttttgtaaagttcgctcaagctccttttgcttcttaacctcctcccatatattattaatccgatgtgaggctgctaattgctcttgcttttgtaacgcttggaagcactcgagttctttcgcagcagtatccatctgtttgaaagtctcctcaatttgtggccaaagactctttttagcccgcaactaaacaacagatatgaacactagttagtaaccggcctaaatatctgttcactttttctttctccacccaacgaaatctttggtaatgcataaaacaaacaacagaagaatgaacatatttaaacagaacttaggtggcatttggttgggaggaataaaaatataagaatgggaatgggaatagaaatagaaatggaataaaatttaaa

SEQ ID NO: 27098 - DNA, 5185 bp, Cannabis sativa
  modified_base (1735)..(1756): a, c, t, g, unknown or other
atatttgttaatcatcaaaacaaggagatctaaaagtttgagttaacatttctaacttggaggaagaggatacagaaccgtgtgtgaaaagaattatagatgcatagttgccaaaacacttcaaaatgcctcagatggaattgtgtgaaggaagaacggaccctagggaccatctatccaaatatagttgaatgatgtaggtagcaaaagctagggatgacgcaaaatgcctatgcttttcactaactttgtcaaaatctacggaagactggtggatagattatctcctgaatcatttcgtaattggaaggatttacaaacaatattcgagaagcaattcatagcagtaaaggatttcgacctggaagttagttctttgacgaacatcaaacaacaaccagaagaaagcctgaagaagtacatttagtacatgatggatgtggctgcaaagacaaaggttattgatgatatgaagatggtggctttgacatcaaaaataaccactggatcattgttatggggagaacttcaaaggaaaaggacagattctttatctaacttcttatccaaagcccaaggattcgtaaacctggaagattcttaccctcaggcatatggagtacacctactactaatacaataactactccaactatctttcctccgacaaccacattcacaactgtcagggtttatgtcttgaaaagcttataaagacatttttgatatatttatgaatgttaaattattcattattaatatttattattgattatttttatataaatatcagaaaattctttattcatatatgaggctgtgacttgtagttgtacaaagaactaagatcacttagccatgaataaaatagtcagtaacatattatagtttgggaatctttaattaatggttgctagtacagttcagtgatgcccgttctttagtgcaagtaatctcatctcgaattacgaatataaaatgacattaaagtgaatgtgttgtacataatagagattacatataacaaggaccgatatgaatgaagttgtctttatctaacatcttgtttactataaaggcctaattcatatcatagcaatgatgaataatagattgacctaaatcctgagttatcatgaactcttgttcatgttattagtttatttgattcactcgttaaagttgctcacagaagatgattcttacaatttttactttgggaatccaataatatggatggctggaaacatgatctacaattatggaatcctgactttcttaacagatcgaatgctggttccctttaagtgttaattctataactaaaaagttgtgcacaaatatagatgagatctaaattatacttccactagtaaattaatggtactaaaggataaaaaaataattagaagggaaaatggtaatttaaacaaaaataatttcaaaccaatacatggagagctaatgactggaattgattatattaatggacattgcagtaaaactcaataaatacaattctataattactaagagtttaattttatatttatagtggagtaatcatgaaattcatatataaagaatatttagttgatgagactcaataaataatctagtttattggagtttagaattataggtccatggttcttgaatcgccaccttaaaacactatcaagggaaaggataaagagtactataattttattcggaaaaatctattttgaattgnnnnnnnnnnnnnnnnnnnnnnttgtaataaataaataattttttaaattaattaaatagagaaaagataaaaaattattaagataaaatttgtcaagacaatatttgttgagacaaaaattatcagaatataaaaaaataccatctttgtcctaaataagacatggtaggcatttgtcccatgaggttgtctttttaagttaattaattaataattcaatcagataaatatttaaatttgaaaagtaattaaatatatttcaaaattgttgagatattctctcaagtagttgagagattctctcataaatatcagtaaccgaatttggttgtagatatttatttatttaaataattaaatatgatttaattagtgagatttgactactataagtagaaacttgatttaagaaattaaaagagttttttcataacattattttcaaaatacaaaagagataagaaaatagttttctctctcaattgttcttgctcatgtgttgagaattcaacaagaacaatgcaagctccagctatagaggccccttaggaggtacaaaatgccccagtggcaagacctattattatttgaaatttggtttaccatgatcttatttactactcgtgtatgttaaattaagactaatctaacatcctaacatggattcctaaaataacaaaagaaatacatcaaaggactacaaaatctttaagtggttgcaacgaaataaactttctccttccgttcagttttctaacccttaatcctttctgtcgtagagtattgccaataactgaacttggatcttctccttctttgattatgctcattatagtcttccacaaaggcctgagtatcaccttgagtagtgtgggatgatactcaaacacctttggaacatatttttgagaaagaatttagggaatttcaaaaattatgaagaaagaagagaagagagttgtttgacattgaattagatcagttcaatcttctcatcactttttttaatataggcattcacttagtgtaacgccctaataataggaacaccacgtattgcgactaaacatatactaatcctgctaaaccaggatttactagagccaatagcagaaatcaaatttaaaaaaatacatgataaaaataataacttgcaattattaaactttacaaaatatccaaaagatcacattttagttcgggatctcgtaattttttttctttagaatattacaagttattagtacacaccgacctaagcaacaaaagtgaagattacaatattttctcctggtagacccaactcctatgatctagcttggactgaacatgtataatacaccccaaaagccctcgatctcatggttgatcaaccattgacttaacctttcctacacaatagagcacatgtgagccaaggtcccacaagacagttaaaacaacaatatgaatatcaattaaaatcacttaagtattgatgtcactgcatctattgtctatttgacatagacctacgtgttatgctcacacatctatttacaataaggccttagattggtttgtcttggttctgattgccaagtctagcctaattatgccttacgcgcataattctttatttcaatatatacaacacattattgcatttataatcacttaaattctagagtaataaccctagatcatataatcaccaaatcttaaggtaataatcataatctcagtttatcacatagcatataaataataacgtacatgagcaccactgtgctaaactctatgttcaagtttactatctaacctggtaatccaagtatatggagattccaaatccctgagtgttcttgagcaagcaccggtaaccctagtcacacattctcgagatttcacaaataaggttaatcccaaattcattttcacatatgtacataatttgaactccaattacagattaacacatagatcccaaaacgtgcttttcaacgatataaagaacgtccaaaacagagttttgagttaaaagttatggcaaaaatgagaaaataaaaaactaggaaaacaggggtccttgccgcggcgaccaaggccctcgtcgcggcgacatgccatgaacccccaaaaatccaatttttcatatcttcaaaattcaatcaaattcaagacaagtctcatccaaaatcatgcacaaaccaatcttttaatcaatagcaaaccaatataacattggtatacaattgagcacaaccgaaagctcaagatcaaagcaaaaaacatacccaaagcatgctacacaaaattcaaaattgcacataaattcacaagctttgaaactcaaagcttcaaagcacaacccacaaattcaaaggatttttccaaaagttttaacatcaacaactcactccaaagctcccaaaataatctaaatgcatcatacataaacctaatagcacaatcccacaataattaccataatttctccttaatctcaacaacatgcaatcatagacacaagaacatcaagaacatcattatgaagctttaaatatcagaatttatacaagcaaaatagattatagatcactacttcaagttcctcaagctccaagcaagatcaagcacaaaatcacacccaaaatccaagctcttcttccaaaattaatttgaaaacacaaaaatggagagagtgagagagaggcggtttgggagtgaaaaaaccccaaaaaatgaaattaattttggctgaaatgttttttttgttgaaaaaaatagcttatttggtcaaatgaccaaattgcccataaggcacacatataggcataattacataaaagggtaaatttatcatttccattcacatatatatcacataaattcaaattttctcatttaacatataaaagtcataactaaatctaaaaaatatattttgggccccaaactcagttcggtctaaaatactcgattgggactatagcgtgctgacttgtcagaaatcacatgcagaaagacagaatacacgtactatataataatatagtccataaacacaatagattataaaattacagttttacccttcttgggtcaaaattatgaaaatatccctgacacaccaacgggatcttaaaatataataaatcataataatttcacatattaaatcatataataatataaattcttattaacacataattaacctagttaggattgctaatccggttatttaactttagggtattacactaaggttaggttaagattagatggactaaaataaagataattgggatgaaattaaactatagggccaaaatccacttatgggctttagagtttgccactttatttcaactaatgaaactaaaatatcttttctaattttaccacttatctcatctaattatttaaataccaattttattctaataattttaaataattatcaaa

SEQ ID NO: 27099 - DNA, 2608 bp, Cannabis sativa
caaatctgggatttggggaaatcgtgatttggggaagatgaagttcgatggttcttatgggaaacccgatgaggtccgatgtatgcttaaaaaattaaattttattgtgtccgatgggtccgattgctacgtaaaaattcaatctttttgtatttgtgtctaatgggtccgatggggtccgattcatgtttaaaaaaatcaaattctattgtgtctgatagattcgatgtctaacccgatgggagggggggtccgatgcatgttttaaaaatcaaaaatttaaggtgttcgatgtgtaacccgacagagtccgattgctatgttaaaattcaattttttgtatgtgtctgatggggagaggggtaatgtaaatgggagtattttaggaatattgtaaaatgtgtcatatcccacaaatattatatgttatgtgtttaggagaaaatattaagtatttgtaagcataaaaagtcaaatttctctaaatatatccgtctttattctttgatgcattttcaatgctcatatttactttagaattcaaagtcaagtttagagagaaattgtccaagatcacaatatgcttgtgtgtggagggatgtaatgagagtatcactcttgaagttaaagtaatttccctctgagtgagatatattttacaattgttaattgtattgagttgtaatcttagacatatttaattgtgtcatacttactattcttatcaataaaaatttatgattcattcatttaaagttagttttgtctctcaatttgtggtttgtttcttttgattggttttagtcttggtttgtagtttttttaacactactattattctaatagtggtatttggagagtgatctttcaccacactatctttaatatttatttagtgtagtgttaccttggagatgagtacgtaagctttttctttcccctttgatggagttacgtcatcttttttcatgctgtactaatagctttaatgctaatgaattaactactttaaaaacaaatgaatgagttaacgagtctctataaaagagtttaattaatgtgaacgaaaattttcaaccaaaaaccaagtccaagttctcaaatacaaatacaatagcatccaacaaaggaggcggcccttttaggctactcaccgcttaagtcctatgttgtgattggccaccaatagaggaatagacatctttggctaatacattccaactgccccctaacagttttacctaactgtcagttatgacagttaggatcgggtctttaacaaaggctataaatagccaattgctatagcattcgggttgaaaacagagtgggagtttttgagtgctagttcagtgtgtaatagagagagattcttggtgagatgagttattttgtaattaaagctttgcttcatgagtgaatgtgtcaagaacactttgtaaacaattttataatcctctcttctagcatcaataaagactgaagccattggggctgttctggctttagagtaggcaagtgattcatcatcacttgttcgaacctcgtaaacttgattgtgtttgatctttctctcctatttctattgctcttaattacttatttatccttgttcaaattctggttcttgttactagcttattactggtttatttgcatttgttcattgctgtactattcaattttcatttgttttgcattgttcttgattaatcactttagtttgtgttgtttgcgaggtgagtgatcatgtactgatcacatcatcctatttaaaaaaaaaattaaaatatagttaataataaaataaaataaaactatactcataatactaaatgtatgttgcagttcagtaaaaatttaattagaataatatttaagaagttaagtattcaaatcccaacaactttacttttttattaggtcccattttttatttctgtttaaggtccaaattaatatgggactaaccctaaatagcatgtaacatgagatttttaacatgaacaattagaattattgtttgaattttagtatagtacagccattaaatcaaaatttctcttagttaggcttgttggaaacttggaagggtgtccttacagtgtattaatgtcatcctagctagtgtgttttgtgttagcagtgtttataaaatatttaatccaatctaattcgtatgatctgatccaatttaattcgcaaagtgcaaatgtctatacttatgcggattggattggattggattagaagatttaaatctgcacttgtgtagattggatattgattgacatgcaaaagtaactgatcaaatctaatccacacatatttatacatattttaaaatatatatacaattaataccgtaaaaaataataatttaaaattttaatatatatgatacaaatatatattttattcttatttgtaagatttttgtttgaactgaatttataagaaaatatgatctaaaacaaaattaaatattttttacacgtacagtttaaattttttcttcttgctttgaattttttattttttttattttaatttgttgttggagacataaaataactataatttattttaggggaattatcctatatat

SEQ ID NO: 27100 - DNA, 1831 bp, Cannabis sativa
  modified_base (1340)..(1345): a, c, t, g, unknown or other
accgcgaagaatttcaaaccgcattttttttgcggtgcggtgcggtgcgggcggtttgagcggtttgagcggtttgatgtacacccctagtttgtagtagcatttttatttcagtgtattgagttacatgatagttaacttatactattaaaagtcatctaaatcaattgtaaaaaagatgtacttatggtatatggacaaaataatagtgcttattatagaaattttctatatatttaatatttatgtgtgtttagaaattattttgtgtgttcagagaaaagttatatatttaaccaattgagaaaaaaaaattgagacgacaataaaatcagaaagtttttttcttgaactttcacataatttagggaaaaaatattaaaaaaaaaattgaacatttaaatccttaatatcgttaaaataattttgcaaagaaataatatgaagtgcgctctcgtgattgttcttattttataaatttaatagataagtaaaatatcactaatttttttttataattaattaaagaaagaatgaatgctgccaagaatacattcaccaacgtgataaaaggaaaaatcacaataaaaaaatagtataaaactaaatactaacatgctctacaacacaacataacaccatacaaccaagctttttaactaatataaagcataaaaaaataccctcataggtgagagaaaaagtgattatctcacttaagaattttccattaaatatatattaatatatatactatttttttacctctaaagttaccattaatagagcatgacttgatagaatattgaattttggtaccaatagattcacaattgcgattgaagtgtgatacatgacttgataaagcattgaattagcttcaaaatgcaactggaattgcgtcaatcagttcaatattgagtgagttatgactgttttactaaagatagttcatgacccatcgcctaggttgaatccaacacccagtgttatagtgcggatttctcacctaagaatacgagagcagtctcgtataaaattgacatgtggatctagttctcgagggaaatatgacgtgttgattgatgactcccatagagttttcctcgcttgatctgaactcgtgagatgatgcgactgtgatagggatgcatcacatagtcaacagcagggtcggccctgacttttagttggccatagaaaaaaaaattattttgggcccttatttagaaaaaaaaatatggtatttttcaaaatcagtaaaaaaaatagtataattttaaaaggtaatatttttttttgggcccctaggataggtgggccctaggcacaggcctagnnnnnntatgcccagggccgggcctggtcaacagtaagtaggaccaagaggatttgataacgactttgaatgtaatgacgacaacaagtaagatacggtgataaacaatagttttgaaatgatatgataagttttctataaatcatcaatatatcaatatatatatacatatatataaaggagaagtatgagacgctgacatggtgctttaaaatctcttcaaatgattttatgtattttctccttaattttttcattttttattagtttataaatatttatattgattaattaattaaaaaatattcataaaaatctatatattcacatatgtggtttatgtttttttcttaattattaatatgtatgaccgtatatacatattatttagagtatttatcaatctatataatacacatgatattatcaattaccctaaacctacaaatatacatctctctcaccttttttccactctctctctctctctct

SEQ ID NO: 27101 - DNA, 1120 bp, Cannabis sativa
aggtgattggtagagtgaactgccgtaatgggccgtccccgggatgggtccactcattcccggtgacggaacactacgtagtggtacccgagatgccactgaggtattgtgctcagaatctactcaaggctgagccaacacctttgtacaagtttcaatggcatcctgaatctaaagccttcatgcatgtgatgtgcaagagcagtggcaaaattgtaattttacataaaaaaaattattcctctttcttttttattatgatcaaatacatatatatttatatactaattaatgaattatttatataaataaaggtggcgagtgtggaggtgccactattcataacatttcatttcataaatgcttatgaagagaaagatgaagaaggaagagttagggcaatagttgcagattgttgtgagcataatgctgataccacaattcttgataaacttactcttcataatcttcgctcttataacggccaacatgatgttttaccagatgccaggtatataatctgtcgaaactactagaattcaaacagtttattattaacttgcttctacaggttgataaattttaatcatataattatatatgtttttatgtatgtttatgtgcaataagctataattttgattggacactaaataatttataattttctaaaataactataatgaacaccattcaaaaaaattaaaattaaaattttttatgtatttaagtcaaaagagatacaatattaatgcattcattttaagaatccaaccaaataatttactttttgatttatttatttttcatatcatttcataatgtcattttaaaaaataatttttttttttgcaaaacaattatatgtatgtgtatagaggcggacccaaatagaagtgagatatagggcaatcgcccactaaaaaaattgaaaaaaaaaaataatccatttaattagttaccacatatatttataataaaatataatatttatagacataatatttattttggtataatagttaatctagattgcataatgaaaaaatcacaccaagattatttatttatttaagtttatttttgtccttgctttaaaaaaaattatgccccttaactt

SEQ ID NO: 27102 - DNA, 3670 bp, Cannabis sativa
tatattataaggaataaaaaaatatttttttaaagaaaaagatatttaatataaataatatttaaatttcttaattttattttgttttaaaataatattttatatttatatttatattattaacaaacaacactaacctaaattttttattattggcacgattatttgttaacttaatctaagaaaattattaattcaagaaaagaagagacgaaaataataaatgaatagcaaatttttttacatagttttatagttaaatctacatactctacaaattacctcagaggttgaatcctgaatcttttcaacctatcccacaatgtatttgttacgagaatttattatttaggccatgtggtatacgattcgactttttcattaaatagttcaaaaaattagtataacacttataaactatttttttacaagtgataaaatataatttcaaatattatactccctagtccatgagtcagttgtattggccatttaggcaagtatttggataatacaagtgtttacagtataaaccctaactttgcactcctcttgtttctcttgatgaagaagaaagcttgtaggaatttttgcagaggttcggctagtttaaaattattcaccctttatacataaaaaaatgagggtattataggcttacatgtgggtaagggcattccctttacccacctaggctttcgtactaagcatgctgcaagagcaggcactacaacatgacgatctgacagctgggtagtaggaaactttctcatcgtgtggtgtacggctgtagtgaaggatctcatatggacaagggcacgtgtcactcaaagattttaccttgaaaaattgtttcctagacaagctgttggataaaaagggggcttcagaggcacgtacgcacactaccatggtctgacgcaggggacaagatctgattcagtgtcagaggatgggtaaccatcgtttcgggttctggatagaatattgtcgaatgggcttcgagatcaacgagccaaagcctttttggatcacgctgacctacaatcttcctggaatacttgaagctccgggtaactctgatcctcctcaattacagatggatagtaagattcctggagcccaatccttacttgctaacattgaggacctttgattggcttccgaaatataatagtctcctaagtgttgtttagtggaaattatatactgatcacggatggtctagagtggcactcttccatgactgccacgtatcaagcatctaggaatacgaataatatttacctcccaagctctcgggactcttgagtggtgggagcttccagcttccttctggatgcttgatttattattatgatatgccagacatatcttgaaatgtggaagcaatctttcgtgttactttggacaactgaagagttgatatatcctgtggtacaactgtcattttattgaaacgtggtgtctattttgtgaagccgtgggacttatgcgccaggctcagacgtgttccttgtgggaagtgaatggctacaggacttgaatagatagtaggtttgtgatgcattggtcttgctgtcgtgaaatgataagtaatgaatgccccattctctctcccaaggtgcattaaatataaactcttgaagtctcagccattggatggagcagcttttaatcggtacaatctggactgtccatttcaaaatgcactaagtcgttgccacccatataaatgaaaaacttggcgaaaaagtccatttttcccttctcactttaatatgcaagttttaacccacaacattttcccagaaaactctcgacccaaaagttcacttgcccttaaatacttctctaaaccaaagacctcatctcctttcccagccttgtcgctagatttttccaatgatcgaagctcatacaagcgacgagttcttcgtagagacgagtcacaaccagaccctcgagcggctcatagactttggacagccacacgccagcagcgattcttcctcgacccttctacaagtaagtatttcctccttttagattgttatttcttgctttgattctaaaatacggtcttaagtttgtagaaatacactttttttcatgcgtagggtttaggtctgaatattagggttgctgtgtgtaaaataggtccgcatgaatcttgggagaatacctttggaactagagttctgtatgaacaaagttttctgtttctgacatttaggttaagcgtttctaggtttaggcaagtttccaagacaatcctcttttctctcgttatttttgaaagaaaaacctagactttttatttttgttgtattcttggattcctaattcgtcactataacagatcgctctgtgagggtggccttttatgtgacgagtccggtggggagatctccaagtagtttgggggaggccttcctcgataccctatttgtcatttggatatggggtattaattgcttaggttttctttttcttcccatttttcagtgtctggtgaaaatgattccatttggaaacgtgggccttgaagaggtccttggaatgtctttagcgaacgcatcccctgcatgtttgtgccctaaagacccagctctgggagaggggccttctgaagacatctaggttgaaaggaaagtaaaggacaagggcaaaggcaaaggcgaagctacctctctatcccctttgacacttaacaactctattttggagatgaatcaacgacccaagttgaggaattacgggttactggaggtgtattccaatgatggtggcgtacgaaacattctcgaacttatgtggcttaggatgttcgtcgttggggaatctctatcccagagtgtgaaaggttttggggcatggagttggtcgcatatttcatgcgaagcccaccttccacttagaacatattttgctcagttttgcgttaaggcgagaattgcatctttccagcttcttccagtttcatacaaactactatctggatggtttgtattctgtaaatctaggggaaaagttgctccaaccccgaaggagatactacaatatcctagaatttttattaaaacatcgaattcattccaaccgggcctgaagatttatccagatgtatttggaaactgcattcctaatttcttgttttgatatagacttcagtaattttgtattttgaaaatcagaaatagttttaggcacacaagaaagaacctccttccaatcaactagttaagctttaaaaagttcttcaaaatagccaaaaattacattgataattcatgctcccagtccacagaagcaccatcgtccctcctatagaactagctcaagcgtgaaagaatttaatattttgatccctaacttggagccatagtttctttggcctttgtttctaatacacatccttttaattcaacacctcagataacctcttcttatcttttccataaagtctcatgccttcctcatctctcctaccctttaatctcttatgagctaagttgtagctcttaattttttcagaaaaattccctgcaactccctttccccaatcagcaagaacctcgccacacatacaaattttaaactggagtgtgaagccttcacattttgaccaacacacctgaatgatgttctcacaacttggttctcctat

SEQ ID NO: 27103 - DNA, 2059 bp, Cannabis sativa
actcattatttttaatatattttacgaacattttgtatttaattttatttttcataaaataattaatctattttttttttaatttttttttaatattttataaccctttatattaaacatctttttttttttaaaaaaaaaatatgatttatttaatttaattatatttttttttgagaaattatttaatttaattatataaaacattatttattgtaccatttgaataaaaaaaatgtataaactaatataaaattaagcattgtgttttacactttttaatattaatctagcatatagaaaataaatatattggagtgggtgaagcgtggtaaccacgcggaaacgtatcaatcttttcaggtcattctttataaattaggtaaatatatgagccattagattaacatgcttcttgagctcttttctctctctctctctctcaatatatttatatatataggtacacatgatatagacacacacaactaagcttagaaattaagctttttttatatccctttctcttctttcttctctttctatcgttattatatattgtgaattgtgatctctacaaattaaggagatgaaatcaagtatagagttttattataagatcaaacatatatgtaaagatcaagagaggttaaggctttgatgggtatgttgtttggctcgatatcacctacaattttcatttaatatatatttattatatgtatatgaagatgatcatgatgatgaatgttttgatcatatatatataaatgaaaaagaaaatatacaagtgatatcggaccaggcttcattcccttcaaacgatatatcctcatcatatatatatatataattattctcttttcttatttgtcacaggtagttctctctctttctctctgtcaattagtctcaattgggaatagaaatataggatagtttgcatgaaaccagtaaggttctaaacaattagaaaacgacaataataatttatatatataaatgtcttcattgacattcatcacaataagtttgaccattagctaacagctgttgttttcttttaactttatttattttagtgtaacgttcattaactctctctcaaaaggaaacagtagagatattggcattattcatttggcaataaatttaaagagaattagctatagtaatggggtgggggtgctggtactgcatgtggtacatatataatttattggtaacaaacaaattttgacaaatactactatttaatatcatgaaataaagtcaattgtacaccaataaatatatattttgaaatcaaatccttggtgtagtacaaatatataagttagggtttgttgtttggtacttcgtataagcctttcattagtaaaatattacgtttaaagcataagttgtattgttttagttatacaactaatatttgtgatacaactcattgggtattatgataaagacataagacatgggggatataagcatctatcgtaatatttataaacttaggttgtattgtagtaaagtcgaagttgcggtctagggattgggggcctggggtctaggtccaaggtggagagtccggaggatcgaggtcgggtccgatgtgggtgctgaggttagggtccggggtcaagattatggggtttgaggatcagggttgggttcggggtcttgatctagggtcgatgtcaaggtcagggggtctagtgctagggtcggggtcgggtccggggtcttgatctagggtcgaggttagggtcagggagtctagtgctagggtcggggttagggttccacgacccaggtttggggtcaggtctagggttaaggtcggggttagggtccgaggactgggttcggggttagggccaggggtcaaggttggggtccgacatcaaggttggagttttgagtcggggccacggttaggggttggggtcggggttagtattacgtatgatataattaatatataggataaataccattttggaccctgtgttttataaaagttaccaattggaccatcagttttgttaaatgacaaaat

SEQ ID NO: 27104 - DNA, 5477 bp, Cannabis sativa
  modified_base (5374)..(5374): a, c, t, g, unknown or other
aaaactcaaaacatgcaatttttcaaaagggtttagtacaattatacccctatgatcatttaaaaatttctttctaaattaaaaaacactttttaggggggaattcttatgcctaaaattcagctacgtattagaagctgacacgtgtcctacagaaggaatatgaatcaacttaggaaatataataaggaaattatatcattaaatgcagtttaagtaattcgtttcaatttaatacaagtttgatagaaatgttcaaacttgctgactacttagtcttatgtgagacaagaatagaaactattaaactaaaattaacgagatttatatccacctcaggattgagtaataaaatgtacgagacaacattcaaccacctcgcattatacacaacacagtgatcatctcgcattactaataaaaataaagggatacagcaatttaccattagtgtctgaagtacttgttgttcatctactcataactggtgatttactgtaatatcctaagattaaagaaaacagattagcgaaccctaactaagttaaatatttattattatggaattatatcattatataatttattatatgtgaattaatatgatgaatgacatgttaagaccccattggtgagccaggggtgtttttgtaatttttacccgggaagggtaaaactgtgaattttatattatgtatattattatatagtatacatgttttgtctttttgcaggtattttcttacaagttggcgcgatatagtcacagtcgagtatttcgggctgaattgggttcgggactggaatacatcttgcaaatcaccatttagaaaagtatttttgacatcgagttatctcacaccccaacctttgaacaaagctagagttaatacaactcttatggtgactggtttaactacagggctgaaggtttcaatgaagtcaaagtctgtttgctggtgaaacctttttccaactaattgagctttgtgcttgaaaacactaccatcaaggttttcctttctcttgtagacccatttgcagcctatggcttatcgtccttcaaggagtctaactaaaacccaagttatgtttctagcaaaagctagaatctcatcactcatagcattattcaaatgctcttattgaagtgcttccttgagtgatgttggttgtcttgaagccaagaatgcttttggtttaaacactcctaacttagattgtgttgtcatctggtgcaattgttttttccaggagcattaagacatctagcaataagaggcaatgcaacaggggaagagcaagctgggaaaggcctgggatctggtgtgactgacactctctatggtggagcaatgtttgtagcaggtggatttggttgaccagcttcatcacattgagttggtgaatcatttggtggaacagtagagaaagtgtttccattgttagcaatagcattaacaatatcatcaccatttgctcctgaggtttcacctatatcaaaagttgaaggcaagtctggaaaccagctgttagtagcgaaattgcaaggatcaaaattaggtgcaaggttatcagataaagcattttggtcaatttgaacaattgtagctgcagcattagggatatcagcatttgagttaatggctggttgaactaaatcaaacattgtgtaaggttgtctcaagtgagaacaaacaggtatcaatgctaaaatagaagatggaatctctttggttcacttgttaacattgtggtcagacaactgttcatatgggaaggaaaattcatcaaacaccacatctcgagagatgtataatctacctttggaatctaaacacttttaacctttataattgagactgtaacccatgaaagtacatggagcagacctaaactctagcttgggtttgttgtaaggtctgatatttgggtagcatttacagccaaatgttctaaaggttgtgtaatcttgttttgtgttgaataaaattttcaaaggtgatttattttgcaacaagcgagtaagaagtttgttgtggatataaacagcagccctaaatgcctcatcccaaaatttgagaggtaaggacacttgagcaaggagagctaggccattttcaactatgtgcctatattttctttcagccaagccattttgttggtgagttgtgggacaaggatgtctatggtgaatcccattgtcaggtaagaagttggtaaaggacctatattcactccttcaatctgtttgcaaagttttaatagatttttgaagttgcaattcagcctcagctttgaaatgctaaaaggttttgagagcatcagacttattgtttaacagatacaaccaagtgaatcttgaataaacatccacaaagtggatgcaatatttgtatccattaaaggatgatgtgtgtgatggcccccataaatcagaaactaccaatttcaaacagagctcagatagatgacctagcctattatgccaaaaagtggaactattttgaacatttgtattacatttaaaacattttgacacacaaaggtattatttagagtagcaacataagtacacttaggcttggatttattgttggcactcctgctggtttgaagctggttaagctgtgagcatttgttgctcataatggggtcatggctcgattaaacagtgccaatttgtgatggatcaaaagtatataggccattcttgtgcatctctatcagcaaagtagtatgactcacttcctccttaacataacacaaatcatcatgaaattcaaaataaacattgttatctttggcaaatttagcaaattgataaggtttttttaatttcaggcacatggagtaaattatttaggacaagggagtgagatgcatgccgaggaataaagaaagattgaccaatatgctttattgacaaacatgtaccatctcccacatacatttgatcctgaccatcatagtcatagcaattagcaagattctgagcttgaggagtgcaatgattggtatcttctgagctactattattagcaagattagcatgtggttgcggtgattgctgagatccaccactgttggtgcttcttcatgcttgagagcctgagaaggacttatcaaaacaataaaagcaatcgtgtgttgtgtgaccaaaatgtaaacacaattgacattgcactttcttattcatgttcatccctgacctaccacctcgattagggtaaaagttacctctaccaccagagtttagtccaggtgtgaaaccatagtcatttccacgattgaagcttctattgccaaattgattgccaagctgacaagctccatggttggattggaaatttccatgtccaaactgttgttgcttaaattttctctaagcaagattaggttcaatcatggaatcttgatcatcagtgaccatattagcagtcagatccacctccttacctaatttttctattctggatttagaagccaaaagtagagccttgatttctcctacagagtattgctcaactcgagtattagatgagatcacaaaggtgtcatactcgcttggaagaccctgaagattgcagcaacatgatcacggttacttaaggtttctcccacagatgcaagaagatcgaaattctgctttaattttagcaggtaatcattgaggctcggaattcctttcttgagattctgaagcttcgtgcaaaattctagaatcttaaaagaaacttgtaaggtgatgatgtgcttttccaaagttgtccagatctattgtgtagagttgcatcccaccattcttgtgagaagactttctatcatagatgacagtaaccatgagatagaaggtgatcttgaacttcccagtcgatgaaagcttagttgactctattttgagtttgatcttcatcagtcgaaaatttagctagtggtggttctttgatgtacctcacgagtcgattccctctaatggcaggaaggacttactgtttccacaataagaagttgtgaacactgaggcgaatcgagatgctctgattgaaatacattggttcttgagagagttgagctctggtctgagtagcttgagtgttattgaaggttgaaccatttttggagattcttgcagtaccaatagtagccatgttagcattgaatggaggaaaatgctctaataccatcttgaagttacgagccattgacaaagaacaaaataggaaacaaggaagaagaagaaagagttgagaaagaaacaaagggaaagaaatggagaagaaagaaagatctcattgaatgaaattgagtacacagtatatatacatcatgagagcaataccaactaattgactaacaacaacaataaactaacctccaaatataaaaaaaaaaaaacaacaataaactaaccaacaactgttacaataaactaactaactaactaactaactaactgttagttgccttaacaatgaggttcttgttggagtagctgacaaagtttgagtcgtctttgccatgcttcttttggaaaccaaatcaggaaaataaagaaatagagcaaagaagcaaaactaaaaatatgagaatgataaaatatattacaaatgtgacatattttaatcataatcataaaaatataaataattgtaaaagtctatagcccaactgcattaaaagatatcctataaaagggtaatgccctaaattatgaaaaacttacaaaaatactgacttttggactaatctttataaaaatattgccacacggaaaaaattacttttatagtgtcttgaccaattttttttcttttatattgtaaataccaaaaaaaaaaaaatgaggcctccatcttccacagccacggacagaaccaccaccggaacaccataacaataagaaaataaccattaattccagtgagattgagaaaaaaaaaaagtgaaatcgacatcaaataaataattatggcaaaacaactataaaataacattaaacaaatcaaacgaaagaaaggaaaacatgattaaaaagactaaaaaatcttctgcatagcctcaatacccaatgcaatagcagttatatttgcaagctcaatcttaaaaaaattagaacaaaaaaactactaaaacaacacaaaaataaatgtaaaataataagcagatataaccacttagaaaaaaaataaaagaaccacacacctcaaaactttttttctaatgagctcgtgtaatgtatttttaggagaaccaaataataaaaaataatcacaaaataaccatagagtaggaagaagagatgtattttatagcctccatcttccacactcacggatagaaccaacacagcactacgagaacacccagaaanaatcattaattccagcaagatagagcaaaaacaatgaaatcgacgttgaaaaataaattatggaatacaaccataaaaaaatactgaaacaaacaaaaaaaaa

SEQ ID NO: 27105 - DNA, 2717 bp, Cannabis sativa
  modified_base (519)..(539): a, c, t, g, unknown or other
gtatcttattgataaacattatatattaattagagtatgtacaaaaggactcacataaaaattgtttcatagtttgtgtcataggatcggtatgagcttgctgtttagcaaaagaaaaaaaaaatgaaaggggcatgtctttcgttaggttggagtcagtactaatatgataccctactaaacatgaattggatggagcatgtacatgtatgttcattttcaaacactaatataatataaatgtatatccatatatgtttttataggtttcaaacttagttacgcttttaaatgtgtggtgatgatgaaaactaatatcacaaattatgactattaattattattattatacaatttttttttttataatcaatattctaataagtttcgctacaaaaaactgttacttttaatgataattttttagtcccaacataatttttttgtgacaaaatatgacttttagtcacaataaaaagttaattgtgactaaaacataatatttagttacaagttgtnnnnnnnnnnnnnnnnnnnnnaacaaatattgtgactaaaaattatatttagtcacagtaaattataatttttgtgactaatatacttttagtctcggataatcacaacacaataataataatttataattagccacaatattttattatctttagtcacaaattttattgtgactaaaagtaaaatttttaattatttattggtaaaattaatgtgttgcacagtgtgagaaagggaagggagaacaaaaaaaaaaaaaaatacatcacacacaataatatttatctcaaatattaaataaacagagttataaatcggtaatctttttttaaaagaaaatatatgcaacataaatacttaaaattttaaaatttgtaacaaacatagacttaatgattttttttagaaactaaaattcttagtgttagtataaattataatttttgtccaattctgtcattacgtttgagctctgttagtatatatattaaatttgtaaccaaatttgatttttgaatttgttaaaagaaattttgaaagtatattcatcctacacatttttgttttaagactcattaatttaaaatttgagtcctacaaaattacaattctaataatactagatatactttactcgataagaacaaaaacatcaagtttgtacaagttagaaacttaaacttttggaatatatgccgagaatatcatttttacaattatactattatttatgagatttttatatggtatactgtagttttatattttgttacttttatactgccacacagtatttattacaattttattgtatacttttatactgtctttttaaaaccgtatgaaattttcgtttatcccgatattgacacatgttttatgttatgccatcttttatatttttttttttttaaaaaaagttattgatgtgatgtttattatcacggtcatggcagtaccttttttttttaaaaaaaaataattcataaaaaaatttcatctgatcactttgtaaccgccacagttatacacttcttctttgttaactttttttttagtttttgaaattttaagcttgtgagtcgtgtggttagttttgagcagtttcttaatagttgggtgttgagcagtttcttttccatggttgtcacttaatctaagtcttcatcccatgtagttagaaaaccccaaaatactcgtaaatctaagttacccccgtcttcaatgtggaaaaaaaataaaagaccatcctccaagtcctacttcccctactccttccaaacgtaagttagatgttcattctccttctaagagggtttctaaacgtcatcgaactatggaggaagagtttgattccgattttaaacttgatgatgagttcattcaattagctaaagttgtcaaggtcagtcgtttgtttttgtgttttttttaggatttttgtgttttatttttaaatttttatattattgtattttgattttttaattataatttaatagtattttattttaaatttatatttgttttttttttttgagttgatttataccttctatagcagttgtattcttctctttcttttacttttatttttctgtaggggaaggggaaattccctattctaaatattcctactaaatttgggtttgaagagccttttgatgatattgttgttgaggtgtgtggactttttttaattatttcttttttttttattattattattttctagttgatttggtgttatttttgagttattttgaaatagatttgcatatttatttactcaggactggacatgtaaatataggcgttcacaacattatcattctaaagtaataacttcttgttattattcaatcattaacgatattaaaactattttaaccccaacccagttgaaaatcttttcccaaactgtttttggtcactttcttcgaattccagagtacattattcatttccaagtcttgcatggtctattgttaagggaagttcaacaacctaataagatggaattctacatatctgttgctgggaagtttcttaaatttattgtagaggaatttgccttagtcacaagtctagattgccacattgagtctgatatttttcagttcaaacaggataagaatatgctagttgaacattgtttaaagggtaataaaaaaattaccaagaattcgattcaagtt

SEQ ID NO: 27106 - DNA, 999 bp, Cannabis sativa
catttaatgagttattccattctatatttaatgatataaatatcgatatatttgttgatttatattccctgagactgacatgtgttaccatctataacacagtcaaatttttggtataacaactaacaactagttgagagtcattatgcatgtctaggtggtcagcctgcacttcttgtgctagcctatagctagtaataagagcttcatattcagcctcattgttggaggctttgaaattgaccttcattacaccgtgcagctattggccctaggtgttctgagggccatgcctacaccaggaaggtggtcaatgcaccttctaggttaaattgtcttgcttctactcttgctctcgcttcttttttggctcttacttttctcctaaatcttgagagattctaggagacgtgctcgtatattcatccatgaagttgaggagagcttggccttttttatccatgctctattggtcgagcttgatggcccacctgagtggtcggccatatgcttcaagttttggtgacaatatcgccatggttggttggcatgcattgctttgggaattttcgtaagagagtgaagcatgtatgcttcccctcttgctccctttgattttatggcctaatggaattatttaatttccctctttttccattattttggccagaacccactgttgttgcgcttacctccattatccttgttgttagaggactaacagatattgtctgcgctggccggcaagtcagacagtacttgaggcaatatgatgccctgtgtttgtcccacattgacctgccctcttgtctggctaactggacaacttcttctaacgttataaaaccatcaacttgctcaaggaattctttcctactactcattgagatccttttgatatctttctagaattcactcactgaaaagattcctctgagtatggtcgtatatcggccttctttagtcaggcctttaatcttggtggcctcgtccaaaaat

SEQ ID NO: 27107 - DNA, 3751 bp, Cannabis sativa
taattttcataattaaaccctaattatctactaatttccaaattaaactaagcggtctttacagctttcttacaataagatcatttatgaagctcttaaagccaacaaacgcttgtacatgaattgatagtgatacaaggcttctaatctagaaaattaatatttaggagagattcaaagttctatggtggcaaaatatttttgatatgcttacaacaagagctagattggcttggattctcccaatccatgatagaaattttttgttgtgtaaatctatggaggagaatgcaactcatttttttttgggaatgcaactacacgttttcatgcatcttcgttccctttggttgattggagctcgtggcttagttctttgtattctcaatggcgtaatgtaggaacattttccaatggaaactttaatgagtttcttcaaaactattttatcatctttgactcaatttaaatggaaagaaataaggcccttaaacaaaattcatgtagaactcctttggagttggaaaaatcaattaaggctcgtcaagctgaggtatcggaggttatggactcccctttgttgtactcatggcatcctcctcctctagtttgggtacttctcagttctgatattgatgtaggtacttctcactcttctttggctattattgcttgtgactgtcatgaacaagtgcttgggattttgtgttgctaaatctattgtgtggatcatactcttgctgaaatcaaagccattattcgagttgttgaattggggtggaaaaatcttggaatgtggtaatctttcaatctgactccaccattgcaatcaataccctgtcctatccgaaccaacctattgagttgccttttcaaagatcgtgcatgctcagttttgggtagtttctttggaaaaatgggaatggagaatcagttttgaaggacatgctcatcttgatagtttggacctgagaatgttagacaactacgtggaatatttttgagtttattattatttctttcttagtttttttttttaatttttttcggctattgttactgcttgtttttttttttttgagtttttgttctcgagttttttgtttcttgttgtttctttcccttcctattgttgtggtttacgtgaccaggtttctttatttttttttttgttgcatggctccttctaagagttggcaggtgtgttgctgctcttttatttaattatttatttttgatcttagttctatttgcccctccaaggggttcttcctaggaaaaaaatgaataggtagctttacttttaggagaggtgaaatgtcacctgtccttggaaaaaaagaaagcatagactagattattaaaaaataaaactatgtttttattatgtatttatcgagtatatatacaagtgtagtagccaaagtctgttactaatagaataacaaaaaatgttctctctctataactatttcctaaccaacataactaactatgtaaaacaatggattctacccccacaagatgagctatagagatttattacacttattttggttaagagaaagttgtgttaggttagaaatagtgctttggtcatgatgtctgcaatattatgccaataagggacatgtatgaacttgattcgattttagtgacttgatctcgaaccacatggcagtcaatgtctatgtgcttggtgggctcataaaatactgcgttcttggagatatacatgtagcttggttgtcataatagagagtagctagagttgaatgagagatgccaaagtcttaagtatgttgaagagctagaggaaattgcacgttgtgttagccaaggacttgtattcatcttctgtagaggattttgacacaatggtttgcttcttggactttcaagatatgagagaattacctaggaaaatgcaaaaaccagtgatcgatcaccttgtatctggacatgtaccccaatctgtatcagtaaaggcatggaggtggaaagcattatcttgtttaggaagagaggagttgaagagaaggccttgttcaggtgttcctttaagatattgcaggatcctcatagaagccttcatgtgaggttgtcatggatcactaagaaactgacttagacgattaataacatatgttatgttaggctgggttattgttaagtatagaagttttctaatgagacttctataagaggtgggatctcaaatgggagccccaatgtccttactgagagatatgttggcatccattagtgtggatatagccgttaagccaaggagccagattcagtttagatttgtagagtgaaaggcctttgagacacaactatgcatgtttttaatctagcaatttctaggccaagaaagaatcaaggatagccaaggtattaagttggaactttgagtgtaggaaaattttgaatgtagaggcatctgtgtcattattgctggtaattattatgtcatcgacatagactaagagggtcaggaaggcattaggagatggccttatgaagagataagggtcattatgtgactgtttgaatccaatgctaaggagagtgaagcttagcttggtaaaccattgcttgtaagactgtttcgaaccatataggctcttattgagtttgtaaactgcatttgggggcaacccccctttgtgcacataacctttaggaatggacatgtagacatgttcttttaaatcaccatgtaaaaaagtgttttttatgtccatttagtgtagattccagttgttaaggaagagttttagggtattaaattttgcagatggtgtaaaggtttcaacacagtcaatgccatgctgctggttataacctttcataactaaacaagccttatatctttcaactttaccttttgagttctatttaattttgtatacccatttgtttctaatgacatggcagcaaggtggaagtgaaactactttccatatgttgttttgtttgagggcaaagaactcattgtccacagcttttagccattgagaaattttttttaactataggaggtaggttcgagttttgtgtatgcttgaagaatgacatttctaaagtttttgtgtaacctgtcataggaaccctagttccagccataggccggtcagcctagggacatagttcccatgaccggctagaccccatgaaagccacccatggtcggccaggcttcaaacaaagcctccttggccgactagcatgtccatggatcaaacatgtgatttttcaagaactcaaacattgttcttcgtattcttcgtgactcaaagagccaagaatcacaacaaatgtctgattcagttctttttcatctataaatcacacattatttatccttaggctattatgcggatcaaaataccgaatggactacaatctactggcagaatcgaagcatgttcaaaataagaaataatttcatgcattcatgacgaaatcaattaaatcaagtgaaaaagagggaatagaaagcttacccacaacaagattccaatgaagatgaagatgagaagcttggattgttaaaataacgcacaaatcccaaggagaatggagccaatagtttggccacctagagagaaggaggagctttttcaagagccaaattctagtgagagaaagtaaaagtgaagaaaaggatttccccccaaaactcacttatgtagtacatgtgggccctcctttttctcacttacttcaccaactcatcataaag

SEQ ID NO: 27108 - DNA, 2674 bp, Cannabis sativa
ggtaaaatatttccaacaataaaagtagcataacaaaccttaaatattcgactaaacttagctgattataaatctaatcagacttatttcagcatttggacctcgtcaggtcattctccactttctccattcattcttctataaatgatttccctcttcattctagtcttgcttcatttctaagaactgataatgatatatatgagtttgggcgcgtagtaacaatgaaggagataagggaatgcaagtgagaatcacagagagagaaaatagagagggagactagtaagtgaggatcccagagagagaagatagtcgacgatgggtgcgctgggaagaagatgacgaacttgatttttcccttcaaagagagggaatcgtgggtgagaggggaacaacgggggttgaatatcgctagagctaacgaggattcagcgccggtttaaagaagttgaaagcatttttgtgagtgtttataactgattgttaatcatattcaacctttctaaattgacgcaatataccaattgatttttttaatattttactttttcatgccatttttgtcagtcctgtctaattagcaatagacacaaataatgttttctttgccctttctaacttaacttttctggtttaggtcttccacaaataatgtttttttagtgtcaatttgaaacacttacataaatatatggtttactattcacgtcggtcaacgaggtgaatagtagcgttgaccgacgtgaatagtataatttgtagaagggacaaaatgatcttttcccaccgtttatattgcaagattatccgaactcaccactactactcccactactattcatgaaattgaggtaattattaattatatattagcgtgtgaccccacaaaacaaccctccaaatcaagtacccagtaaaagatggaataccatcaattaaaatattcaatgatctgagcttcttcttttacttgcaattgaagataaaagaaattaattttaccacatatccattatgagtccacacacataataacaacacaacaaccgctgcaatactaatgttcacatcaaaaacaacagaaaattgtgagattgcttgagaacaacacgccaatgaccgaattatacacactagaacaaccagcagaggaagaagaagaaacataaacaaaagaagataacaacaaccaatttgacatagttgactatgcgaatcttgttgctgaagaaatgctagaaaaactggaaaacaatggtaaaaaaagatcaagagattgacatcagcaacgcaaagctcataacagataaattctaccctaaagttgaaaaaggacatgcatacaaagacaaagaaacactcaagatggcactgggctactatacaattacaaacaactttcaattcaacgtatagaagttttgctctcaagaatagtatctgaagtgtgttaatgaaagttgtaatttgtctctaagatcatcaaaaaataggccaacaaatacattcataatcaagaggttctcaaacatccacacctacacaataaatgttagtatgaagaccaaagacaagcaacaacaaaattcataggagaatgcatcaaacccaagtttttaaatataaagacaaaagtaacaccactaaatataactggaaaattgaaacacaggtacggaataaagatgaactacataaaagcttggagaagtaaagagcatgttgtaaatgacttaagaggaaaggctaacgaatcatataacctgataccaagtttcttgcacatggtgcaaaaaacaacactagatcagttgtggatttgaaaacaatagaagacaatagtttgatgtttgtttttctggctttggatatttcgataaaaggatggaaaacatgcaggccgatattagtgtttgacggtacattcctaaaagcagcttacggaggaacactgatgtttgcatgcacaccagatgcatcaggtcacatatttttgcttgcattctgtgttgccaattctaaaaaagacaaatcttggaaatagtttttcaaaaaattaaaagaagcatatggcgtgaaagaaaaatagtgtttgatttcagacagaaacgagagccagatcaaagcaacaaggaaaatatacacagattttccactaatataatactactatcttattcatgcaaatagtcaaataattatatattaatatattcttaatttatagcttttatttttcgctccctagctcatttttaaattttttttttatattttgaatgcatcaaataagatgatgaatgaagagaaaaccaattaaaagtgcatgtagagatattatatatataggcagccaattttgtgcccagaattagaaaacaaggaatgtaatccgttgtatggcaggtgggtcccacggtatctaaaaattttaaatttatttatttatttgacaaccggttgttgtaggtttgtttaccggttgtcaatttgatttttttaattaaaaaataataaagggacaatcaatttactgtttgtggtagttaaggtactaaaaggtacaacaaagttattgtttggggtagttaatagtacaaacgtattgcagagagtgggtccatgttgtcggagtgaggttattttcatcttttcattccttcatatcttc

SEQ ID NO: 27109 - DNA, 3637 bp, Cannabis sativa
ataggagaatttccccataaaatgccatgattgtgactgaagcaaacaacccaatattatttattttatacctgctcaattaacagactaaattcgtcttcatttcacctggaatctttataaaagacaatattgattatttattttattattattatttctgaaaaagacaagattaataccccaaaccaaactatatatataaatttcctgagaaatttcctctatacaactacatatataatttgcattataatataggggctcttattccaagtataactaagggcacatatcgagaaagctcttcactcttttgaggccatattctctatactctcttctctttcttattaattgattttgtttttcttttgtacgttgccttttcagttgttacaaaatcttttcttgatatgattttgaagaattattattatgccatacatgtataattgatgataatgttatttgattttttaactttactttaaggtgaatattttttcacttgctagttaattaattattatagtacttttgcatgcatgcattactagtactactctttcaactgatgatccaatattattgatgatgaatagtacaagatttttccaaatgagattacaaaattattactgtggtttattagttttgtgataattatatatgatatgatgatcattacgaaaacagggctcaatatgatcacatcaactggttgtttaatcactataaaccacttattgatcatcatattcatatatatatatatttacttgcagtaatcaagtgtacattccactttcaactttgcctttttttttaatgtagatgtatacaaaaagaggtggttagtaataatgagtagcctaagatttttttctttttttttgagtcaaaaagagaccataaatatagctcaactataattgtcactacaccaagttgggaatgctttacttttggtcaatatacatgcatatatatatatatacacaaaaaaaagaatacatacatttgatcatgattatatatatatataatataataagctaggtagtggatgacagaagacaatctcaagtgcttcatgtttctgaatccttaaagcaaattatagtacttcttccacccactatgaatagtacaaaatcaaacacaatatcctggtctctacagaaatgttgggtgagctatagcttagccagaggaaagagctttgaaaaaagctttataatttccactactttctatcattgtaaattgagtaatcagatgacttattttaaatttatatatagtcaaaattatgttattatcttgtcatatatatgtgaaccatatgtcactagatataatgaaggggatatatagtcaatgtcttaatttgattgtgttggtatttggtaattgatcaattacaagctaaactaagtaagaattcataactatattatagagtccctcttctttaaatttgtgttagtatatgataatgaaggttggcatattaaataagttttatttttaaatggcatgattagcttggagattattacaaaaacaatggtatatattaattggcatgaaaatgggagacagtgtattgtaatatgtgaaatgagagaatttgttattattattgatgcttttgtgtttttagaggagggtttagactatgaataataaaagcaaagaccccttttttagcatagaaaaataagatcatgcattatatataagaagcaatattttatatatatatatatatgacaaatcttgaacccaaaatatttgaagttagatttaaagaagtaggatatgtattaaatatatatatatatatatatttatatatgaatgaaatgattgggacaacaccctcaaattatatatacttcttacacgtataattaatcaattaaaagtgataggatctcacttaagaaaataaagtacgaaaaaaaaattatttttagtgaaaatattttagttataataaattataatttttgtgattaatatttttagttacaatataagaatgataatttgtaattaattacaatttttttacttttagttacaagttttgatgcaatttaaagtaaaaatttttatagtaataaatgacttaatacatattgtgtaattaattatatgttttgatgtgactaaacgtacaaatttttgatgtgataaataatttaatattgtataattagttataagctttgatctaaattttttttataatgattaatgactttatattttgtaatttgaatgtgcatccaacgttcctcatatatgatattatatcccatgggccatgatagttttatatgtatgtgtataaagcatgatatttatatataagatcaatcttgaatattaatttagatgattgattaatactttgcatgaataattgtttatcaaaactagctagagtagtacaaaatatataatggaaaaaagatatatagatcattgactttgttgcatattgtatagcaaaagccaactatagtctcttgccaaaatggaacatgaaattttcagctgcgggtctcacaatatgattagttttttgctctattaatggactccacaaaagtcttcatgatataaatcttagtgggtcaacattaaaaggtttatatatttagtcttttttttttttttttaattttattttttaagattgaacaattcttagaaagagaaatcagcagggtacgtagaattaggtgtgtgtggggctaaatatgaccatatatgatccaacaatgagtaattaaattaataggacatgtttgatgtttttttgtttgtggttagggtgtcattatagagtgatcataatatgtttgacatcatcataattattagatctcatgttataataaacaaatacaactaccggttcttttaattgatagttatttcattaattaattatagttataatttagtatttttaataatgctggctatcactataacctagcttatgatcacctatatataatacataaatatatattatgaaggaacaacaaaaaagggaaataattgttgatgaagctattgttaatttggaccactatatatatatatatatatttgatttttgaagatattaattaccacgtttttctattgttaatttattatgatatagcaatatatattatgagttttaatcaaatacacataatacatattatatataatcaaccattgatattagtatgtaatattattgttgcatacatatgatataggtggagatggatcgagtaataataaaagtctgcaactatatattaattatcaaatgtatagggtttctttaagggtacttttttttttttttttgatatgtgagcatgcagtagttgtaattttaattttatattgtagttaaaattttaagaaatttaaaataatttaaaatataaaaaataagatttaatcagtctattttacaaacttataataaaataggcacgtgtgaacaaaatgtttcaattttgtttttggcacgttagatttctttttttaattttcaaaaattttataaaaaatctatacacctcaatcataaaaaaagttaatatcaaaa

SEQ ID NO: 27110 - DNA, 3702 bp, Cannabis sativa
caatgaccatatatttagatatgaaaattaacaaacaattagtacattattagtaattgaattactgttttgattatatgtgtcttagtagaaaattagacctattctcataaataggcattagagatataatttttcaattatggagattttattagatttctagtgtgtcatgcatgtcatttatgaattttgatattttcatgttttatgaccgataactgtgaaatcaaagatttggcagacaatgtcaccttgatatggtttactatgatagaattagcgagacaagatttatggtcagttagaatatcaaagatatatagggttattggttattatgatcatttacccttacgtgaaaatgttacttcatagtgaagaaatgatattttaagtttgtttaaagttaattttaactctttgtctagtaaaatcttagatgtaagattaaattatactgagttagttaattaagaaaataaaacaagttagaaagtagcatatatcaaactcctctatgtatacccttttctcacttttgccctagaagaaccaaagaattttttgaattttccagaccaaatcaaaaagctttttattaggaattcaagtgaagtttgcaaggaatgatcaaaggtaacctcagcctagcttttctctttgaatttcttattttatagcttggtatatctctacgaaaaagccctcactatatagtctctagtctaccaacataaaacaaaggttaggatgcttttatttttgtgattggtggtaactggatctctatagttattaaccctggagtgttcaagttcacaaaccaactatctacttcaattcattggcctactggaaatttctcttaaaactgtaggttcacactcttaaaatcggggattatccattactcaaaagaacttacataccatattgatgatatcttgagtgaagaggtatttggttgtttaccagctttgtgtggatcctctattgttgatatctctactcttaaaactatagcaatggttggaagatctatcacaatatattgtctaccaactatgagatatttttgaatcaagtcaagtttaaaaatgactcatgcatgggttcttgcaaaatttccatctgctcatattgaatttctcttaaccaagattgacaaacacgacaaaaatatttctaaggaccataagcctatgatatttagctttgtagtctccttgactgaagacgaagtgttttgattctagtggctttaggcttttcactttagaagaagatttggccaatctttccccaagttttattcagcttgatactgataatcaaccagttgtagtgacttcaactgttgtcacttgttcctatatcactttaggcccactgtcctcaagtttggcccctataaaagttcatactgagcctaaagattcctgatgttctttgaagagaaagtccattcatgaaacttggaaaggccaagctcctctgaagagtatgagtgtgaagaagccatcttctgtggttggcacaactcgccatcaacataggttcaaaagtttttaggaagccccatcaaaaactttgacctcagctgcccctggttgtaccacatgccttttgggtctcgtcactcattcttctggatttactccacctttctctcaccaagacaatgcaagtcaagcagtattcccatccaagttttacctttagactctgtagcagttcattttgagagtaagattagtatagttgattacgagattgatacaaactcactagcttttggagttgtagcccaacagaagcatctccaaggtgggataatggagtcctttagatttgttcccatggaaattggtcaccctcagttgccaatatgttgcaaaatttccttgttattccttcttcccaaatctcctttatctttattggtcctttagatgcttcttccatttcatgttatattaatagtgttagggttttaaaccctaaataagtaattaattgttgtttcaattcttgtaaactaatctcacatttatcaatccacaaaaatctttgattctttctagttaattctattaattatattgatattttgaaaaatgtcaaacatcccttgtaattataacaaaaatcttttattctttctagttaatccatctttctttttaacaaattgaactagaacttcctaaggcgactcactgggttgggtaaaccaaatgtcaaacatcccttgaagttataactttagttcttctagttctattagagcaatctgataaggtgccttagaaattggctccactcctagtttaaaatcaataacaaagtctatgtctcactgtggtggtaagctaagtatttctttgagaaatacatcaaaaaaactctttcactattctgatgtcctcaagctcaactatttcaggtctgttggtgttcatcactcctagacaccctatgcatccatcttgcgataggtctctagctttcaattatgaaatgactgggatcgagaaccttgaactaataccacaaagacaaacagttattcacccttgagttgaaaagttaccatctttctcttacaatcaatattggtcacatacttagataggaagtccatttccagaatcatatcaaagtccgctatgactagcctaaaaaggtcagcactcaacttcctatcatccaactaaactggcgtaatagacctaatccaccttttggaaaaagcacaatagggttccaaaccctaattcaaaattatcacaagggctacttagtttattacttactctagcccctacatacgagtgtgtagctctaaagtcaaataatacaaaataaaaggagctactgataagaagctaacatgtcaccactgatgggctagccgcaacatcgacttgattggcaaacacctgggcaagagttagtttttcctcttctttagattcttctttctttagttgaggatagtttctcttagaatgcccaaggagtccatactaaaaacatgccttactgttacactctcctagatgacgtttcttgcaacgaggacactatggaaaagtacaatgccctttagggctacccaactgacacctcttgtacgacagcttcattcaattaccagcaacaaactattctaatggcaacattggagcaggagcaacgggaacctgaggaggaggtgcaatagaataaccccgatgccataacctgtgaatctcctcaacttgtctctaaattctggattttatttttgcaaacctcttctcccaatcttgcagagcctatggcagattaacattgcccctaccatgagcccaccaaggatctcgaccttggccaggttgacgagggggattctaacctccccaaccaccactagtctcaaccatattatattgacctctcatgttttgtggatgtccattctataggaaaattctaagaacccataagtcaggtcggtcaagcaacgatcaaaattgtaatctaagtaccacatacatggaaacttaaacatgctcataatatgatataaaaatgctaacatgctctgtaatacccgggattaagaaaagaattagcaaaaccctaactagataattatgagttaattgaggaattatattattatatagttcaacatatgtgaaattatatgaa

SEQ ID NO: 27111 - DNA, 1333 bp, Cannabis sativa
tgtttctctttcttaagcatgtgttacttatccatttgactgagaaaatatggcgaattcctttgcacaattagtttaaaatcaagaagggctgtctcaattttgtttcatgtctctatcctcgtatctttttgttattttataatggactaataagcatgcctagggtgtaaattgagagccttgtttacttgagtcccattgatagaagtttgtagatattaagccattagaggaagtatgtagatatttctatttattttttttctgattctaattaacaattgtactctgtttttttagatgtttcctgttgttgaattgatggaacttctagaagcttttgaaaagcctcgaccaacttgtctccgaactaacactttgaaggtgtgtggaagcattattattattaaaattttgattactatatctctattacttatgccctgttctaaaattgacaaattttgtctttgaatttattcttagactcgaagacgggatttggcagatgttctaattaatagaggagtaaatttggatcccttaagcaagtggtctaaagtaagttactttttattttgttttttcctttctctgctttcattttttgccttgttatttaggatttgagaaccttcacaggttggactggttgtgtatgattcacaagttcctattggtgcaactccagagtatatggcaggttattacatggtatgtattttcttctcattcaattttttttcggcaatcttgttttttgaatacttggtcatttatgttttatatatgtttgtttagctccaaagtgcaagttcctttttgcctgtcatggccctagcaccacaagaaaaggaaaggattgttgatatggcgtaagtgctgaacttttatttacttattcataatatatctttgcttgtagttaatcagaatacgcctattctctctgttcggatgagaacatgcttgttgtgctgtaaatatttgcgtatttttcatatttcacttgtactttttacaaatttacacaatgttgtgattattgtcattggctatactatctgattacaattctatcttgttgcagtgctgcacctggtggtaaaacaacttacattgccgctctaatgaaaaatagtggtattttatttgaacttttttccattttcatttatttactctgtatttataacgttgttttgacctaattgcattgtataaaactaaactagaataggttggttacacagccaaaaagtgatcataaatatgctattaagttctgaactttttttgcttctgtttctctacttagtatcctatattt

SEQ ID NO: 27112 - DNA, 5865 bp, Cannabis sativa
agattttcatacacaattgaagattaatactgtgaaaagaggaatatgaaaatctactaatatatatatatatatgaaaataattaatattcatataaataaatattattattaaaattatttttatgaagattaagataagaattattatacttttatttacgaaaatataatatatataattttttatatatttaactttttaaatttacctcgtccaaatacgattttaattgaagtgcactacatgacaatatatttgaatgccatcctttttagctactcattttacaacaagaaaattaatctttttttatttgtgcattattatctatttaatgcccgtatttcaaaaaaaaataatttttggactatgtattttagaaaaaaaaaaaattaaatgtatgatggaagctcctccacttttatcttttcttaagccaaaaatttcattaatttaattatattaagaaatatattttttatggaaagtctattttaactgttactcaaaatattaaaaaatatgaaatctaaataaataatgatacaaaatacatatttttttttttcattctaacaatacaaaatatagattgtgacttcttgcaagaaatgatgttggctttaattttttttttaagaaatttgtggatttgatcatgatttgtgtaaagaccttcaggttctctttgatgacaaatggctctctctatggtttcttcgcttctaagagaggtctttgacaaggggatcttctatctcctctcttgtttgttatttgtatggagtatctttctcgggtcttggcaaagtaattttgagggaaaattttgcttttcacaataggtgtaaagatttgaaattggcacacatttactttgcagatgatgtgattttattttttcacggtgactttacgtccattcttttcttgttgtctcggggttctctagaagtaccttgtcattcggtacttgggagttttgatttgttataagggcatttcaaaagatgaatggtttgtcctcgttgagaagatgactcaaagaattatggtttggcagtcctaaaacctttcttttactggtcgcttatgcttataaattatgtctcgatgtctattcatttgtattgggctcaaatgatgattctttctaagcacattcttgatgagatatacaaagtttgcaggtctttcctttgaaatggctactatttcgcagggttctagttaagttgtttgggatgatatttttcggtcaaaatcttttggtggtcttggtgttcgaaataccgcgaagtggaatattaccactattagaaagcatgtttggtgtattgtttcgaaaaaaaagacaatttgtggataaaatagatcaatcatgtgtaaatattgcttttgcttttcacatatttacatcatcaaaaatcatctttagtcttttctaatttgatagctgcaattggtgtagcatttgtaaaggacactaataattttacagtataacctttttatggacacgattttgtcccatgatgtactttcacggaatctaatccgtggtacattagatgtgtctcagggtacattagatgggtctcagggtacgttatcatttttaaccctaattacccctagatcaaccccagccctcagatcaaataactctcctatctaacagttgtcgtacatcacggaatacacttcgtgaaagtacatcatgagacaaaatcgtgtcccaatatttttattcaattttattttttttacattcatttgtaaaggatatcatgtattttttaaaatagtataaatagtattttaaattaattttttattaaaataaaacttaataacaatttaatgtagacatattatgacaaaattaattatattttttcatgtaaaaaattgtcaaaaatttttacaataatattaaccctatatttttttaattgatgtgactagaaaattaaatttcaaaagctgaccatatcatactgaaacaagatgaagtactaaaatcctaccacatattatttcatatggtaatatggggctaccaatgaatagtatagttttgttattatatataatatatttaaaaataaaataaaataaaattatgtggtccattgttatataataagatatttgataatcccaattatatatgtataaaaaaaaagtttctatatttgttaggagagacaagacaggtaacactattgactattgtaacactttatttttattattgagatttgagatcctattactttcactagttggagcaacttgtacattttttttataatttagtgatatattaaataacctaatatataatatgatttgtaatgagaatttaatcaagattttcttttatatatttttaaataatataataagatatatttgcctaattaaatcaatggttgtgacaacattttttgacataatgtctattgttctttgtacttttttttttttttaaaaaaataattttattttaaagtttatttagttgttagccttttcttcacatacaaagctattgggaaatatatttatttatgtatgactatgagtatgcattttccaaattatatagctaatatcactatcttataattataggaaattttgtaaatcctttaaaggaatattctagtagatttttttatttgtttcacatttaaaaaaatttagtctaatttttttatgtatcaaacgtgtaagaaaatatatttatatgtgcaataaaatatttaaatttatttttgtattgtaaattacttgaaattttttaaaaaatttataaataattttaaataactataatatacacaataataaaaaaagataattaaaataatctactaaataccaaaacaaatagagtgtatccaaatattttaaatggatataaaaaaatatgggagtgtgagtgtccaatttgacaattttattgtgtaatgagaagtaattgttctcacataataataataataataataataataataatatataagtataaatataaataattataaatgtaattaacatgatgagacaacaccaagataaggtttcaatcaatttggggctacccaaaaaggataaacatgattaagattctttctaactacttaatttaaaatgtgattattataataagttgccaccaagactaatatatatatatataaaagtgtatatttatgtatataacattagtttgaaaaagacattagaggaattgaaattttcattcctaggcaaagtaattttaatattaatttacattaaatttagttactttttgaaggacaacattaaaaaagtatttaattcattaaaaaaaatggaagatttatgtattttaatagtaataatttgatttgaagcactttgaaaaatatttaataaaaatgtataatttgtgtttttgtgggaccctccaactaatgctaatttgggtatatatagttgttattgtcaagaatatgactcttgtaattggaagttgctttcctcttcttctttcactcacattttttctaattattaatttaggaaaaaaacaagaaaaaatttgtgatttgtgagtgttgaaaagggttttggccccatttttataagtaattggtcaactcaactcaactccacacacccaatacatatggaatggttaggaccacacctcaacttatggaatggtaatggttaggaccatttctaatagttacttcgaaatatgtacatataaatagtggtcgattcaagattaaattttagaatagacataattataagttaattatacataaaaaaaaaaggtgaggggattcaaaacatgatttactatacaaattaggggtgcacatttacacccgaaacttaaaacccacctgacctaaaatctgaaaaatctaaaaaaaaaataaatttcaattttagtaaatcgggttcgagttacattcaattcatcactggtagagttcgagtttcattaattcaaaactcgaaaaaatcaagttacacatgaaccaacctgaaattcaaatatatataatttttttatacattttttaagacagataagcttaaaacaaataaaaaaaaatacaattctaaacaataaaatatcattttatttaaccagttttgtgctgacacctctaagtcagattattattaaattttattttgactaaaaatcattttaggatcctatttgtaccattttagaaaatacatgatttattttgtcatttaacaaaacagagagtctaatctgtaaattttgcaaaacacagagttcaaaatgatatttgccctaataataaaccagctcattaattaaacgacagttcgttttagtgattaaaaagttagatgtcgtttttatagtttattcagtttttgattgttggggtttaagccaaggagatttcagatttgataataaagttttctcttttatactttcttcttcatcatcatcataaacccttactcaactcccccttcagattcacttcccaccaataatgatggcctctcacaatcttgcttccaaagggtttgcttttttctatcatatgcccagaggtaaaccctctcctttctttctctctctctctaaattgttttgttttttttggtgcactctaagtgtttgatgaaatgtcaattgatgaatttttatgcagtgaagcctgttgatcattgggtttatccatttcgagctcttttctcgacccacattgttggcgatgaaccaattctcgtaagcccttttactctgttcaatttgttgttcctatttgtttatgtaatttccagatatgatggttctttttgttttttggtaggttcgtgatttcatccattctgcattgtatgatcccaaacatggatacttctctcaaagatcgcggtctgttggtgtactcgagagaagtattaagtttaatcagcttgaaggtaccttactggtagaattctcatttctgtttgttggaagtatttgtttttgagcagtttaaaaccgaaatctttgtctgaaaatagtgtaagtttttgtgctaaagtcggaaaacatgttttgtacttcttttagaattgaagtggtgtaagttggtttctttgtttttgaatttgtagctgactggctgtctagtgtgatgccattattaacatctttatatgagtgtaaatgtaggtgcctctagttcaactgaacccattgttgtttatggcaaataaagtgtaaaggatttcaatgaaaactagagaactaatcatgtgtttagattaatgttgaattttattatggccagccttacttactttatggttatgataggaagtatgatctcgtcgaggaaaaaagaaagaactggttttagtatttagactgcctttgttactaactctgtacagcctatattatgtgtatatattatgtactaaatattttgtgtattttacccgcggctgacaaatggtatacaaatttgtatttctagggaggcaagcttacatgaaacacctagacaaaatttacaaggacagtgatatatcatggtttactcctgttgaactcttcaaggtaagaactctttcttccgtcttccagtattaagaggtcacagtatgtttaattcaatttggatatggttttgaagtttttattatcttaaaaataaaaattgtaacggaatcaattaactgaaagcagccggttttgtttaagttaaatacattaacaaaatttcaagtagtttcatgaaaacttcagctgaatgtctcgttaaacattgtgatataattctgatggattatggatt

SEQ ID NO: 27113 - DNA, 2916 bp, Cannabis sativa
acagtatttttgtaattttgtaaaagttcacctaaatacctaaattttagtatttttgtaaatttccctatctcaatccatggatgtttgatggattggatatgattgaaataaaatttagagaaacttacaaaaatactgaaatttaggttaatttttacaaaaatactgttgcacggattttgttttttttaaaaatactttatttttataaaacaacagtggaatacaaaatataacaactaaaaacaatagtggaataactaaaaaataaccttaaaataatagtgaatacttaatacagcatagtataaaacttacacagtattttttagaaaaaaaaaaatctgtccccagtacaaaaaataaaaatgttaaaaatttcagtggtgtaaataatcctaaaatttaagatctaatattacatgtggtccaataagtcattacatctggtccaataataaacattaaacacaccgtgatcaccacaaaattatcacacgctatatatacataaatatcaataacaaatacttgttaacattccagcaaatactatataagggtattatattcatacacaatataaggaaaatatcaatgaaaaatacttgttagtaattttttttttgtcattctctactctaaaataaataaaataactatttacatcttctggtgtgagtgcttaatagttacttttgccaaatgaatttttgttaaccaagtaaatttctgatatgcaaattggttcattgatttattattagataggtcctgaagagatcttttatccatttataaatacttgtcatattactcacatatcatcattcataataacttgacaaattggaaattcattacaatattacacaaaataaagttcatcatgatcacacttataataatgcgtgtgtagtttttattctccaaaagcaataacaacttattataaatatataatgaaaatggcccatacataaacatagggtggtgtagtgttaattattataatatttagaaagtagaaggtaagagttgttcctcgaaaaagaaatggccagaagtagaaagatgatttggcaagagtgccaatctcaatggacctaaagctcctttggtaacactcacttcaccagtgttgcaagttatatcggtcttgacatagccagggtgaacactgttaatacaaatgtttgggtacttgttgggcgagatcctcgtgtacgcgttcattgaagctttcgatactttgtaagccgacagttgtactggccaatcttttgcttctaacataccttctttgaaatctttaagaaactctcttataacctcttcgatcccttcttccgttagattattttcttcatcgcctaacacttgtttcgcccatttattcggaatattctatacattataatatgataatatatatgagacatttatagagagagatgataatgatacaataatatataattgattagtttaattaaatatatatatatatatatttatatacctccaattgtccaaggaaagaagaaatgttaacgactctgggtgaatcagacaattgaaggagtggagcaagtgcttcaaccattgcctttgtaccatagtagttcgttttcaagcattcttcagccttttcgtagctttctcccataattatttcattccaatttttttcgggctacataaatacgtacaaatgagaaaagtaaacttcaggttttatgaagagattttttctatttttcaaaaatacttattactattttttgaacggtttgttttaaataaagtttttattaaaaaggaatatttttaagtacagagccgtaagatgataattatgttttttatttttttttttttcaatatttcactgttttcttttttgattttgataataaaaactgacccatttacaaccggaaagctcaaattctctggaaaaagcatcagcatctagcataactccgccaatccctgcattatttatctgtgaccaccaaaatattatttgacatgatcctaagtccaacaataaaagaaataattaaaaggttttgatgacatatttatgtatatgctaattaattattactagaatatcaagcttcccaaagtggattttgatgaaatctgcaagagaagcaatactagcaggatcaacgacatcaagttgatggaatacgacatgttgatgagaaaggttagactctttcagtaatttctcaacagcttcaacacctcttttctcatctcttgcagttaacacaacttttaccccttttgaacttaattgcttgcatatttcatacccaatccccttgttcccgccactcacaacagcatacctgaacccaaaacctttcaatttttgtttattttaaaaaatatacatatatatatataatatgttcatgtacatcataaaataatgatgaaaattaaaaaaattacataaatgaatacctttctgtggccaaaaatgtagaatccatattagctagctagttaattgtttccactttccaacgacaatgagtgagtgtaggtaggaaatgagtaacaaatttagtccatatatatagtactacgtactattagtctaccaagttggaataaatttaccacgtattattacattattatatttagggatagaaatatatatttagatagaaatgctaactatccagttttatatattttaatgtaatgatttttaggtaattaatatcactaatcgtgatttaagtagtgtcatgcactaccaatagtaatacttcatataaatataaatatggatttggcttgaatgatttttttgatttattattattattattattattattattggggtcaagtactacctaacatttgtttaataagaataaa

SEQ ID NO: 27114 - DNA, 2223 bp, Cannabis sativa
tgtgcctagggcccacccagtccaggggcccaaattttttttttcctcttttaaaattatacatttttttttaccgattttgaaaaataccatatttttcctaacataagggcccaagaaattttttttacctatggcccactttgttacagggccggccctgattctaagtcctagaatttggaaggggtttgaaagggaaaagttgaattatggtgaacgcaaggtaacatttggtggttgcttcttcttttctcatggttgcgatggtttgggcaaaagaatgtgatgggtaagttttataatactactttcaaaactttttgaaatttttttatgagtttgaggtttgattgtatatattgattatttgtcgcattttattatttctgtatttaatcttattttattttttagtataattgacacaaagtatgttttacttctattatcagggccggccttgaaatttagtgggtcatagagaaaaaaaatatttttgggccctcatttaaaaaaaatgtggtatttttcaaaatttataaaaaaaaaatgtgtaattttaaaagaggataaattttttttgggcccctgagctaggtgggccctaggcataagcctagcccgcctatactcagggccggccctgacttctatattgatgtaattattttagtttatttaatcatttacatatttttttttgagaggtacatgctatccattaataataactaagcaagatatatgaatacaaagtattctcatcaatgtatatagatactgttattttactttattttcaagttttcaaactggttaatatataaattattgtttgattgtattcttgtttgaatttaaagaaaaacacatcctatcatatataattcaagcacatataaattgtttgtcttaatacacttcctttgcatatcttataaaaacttgtcatggtgatttggtctggtaatgactttgattttggaggacaaaagatgagttatggtgagctctgattttgtaacacttgtctttgtaaattgcaataaagctgaaaaagagaaattaaaaattcattaatttaaataatgtattttctttgcaggcttgccagggttcacacacatgcagtgtttacaaaagagaccatgctttagtaacacataaaagttaagttttcagccctttactagagtggtatgtttagctccattttgttgttagattacagaaatattatttgcctcttttggtccaatgataataataatcagcaatgtttcctcagggtaaatacattagcagcctaccttattacaccagccatttgcatttcatactttgcaaagatgcaaaggttcgtcgatgttatactttttctttttttggcatcttagctagtcatgcatctatctactaatatattaaattttatttctatgcatatatataattgcttctaaggtgaagaggtgttcattaatatgctaccacccactccactttctaggttgtcaatatagagtatcgttgtgataattgtgccactatgaaaatcaataatattactttgttatctatatttggtgatactgtaatatattaaattaatatgtacatcaaccaatatttgaagtaatagtactttatgacaactcttttgatcaatttatatgaactttctccaagagagttaccaatttaccacatttttcttttacttttttcaatgtatatatatgcgtgttaatgataaaaatttgtatatatctctatttggagtgattttacagattgtgattagcagtcaacattcaattcaattagcataaaatgatgcttgcaacttctatgcatttactcatatagctaattcaaaattagctaatcaccattatatttttttgacttattctataactgtattccatctcatttcaagtattaagtaaataagattttattggttttaattgtttggctgaatcaattaactttggataaatgaagggttttggtttcaaagggtatctatttgccatatatatagtgcattattctcactaatttatatatttttttcaattgcaggataatccatactagtattttctttttgcaagttgcaaaatgttgaagtacataaatgttttttttttttttggtattaaaatcattatccctatgtaatgtatacagtggcggatccaggatttaagt

SEQ ID NO: 27115 - DNA, 1397 bp, Cannabis sativa
  modified_base (584)..(597): a, c, t, g, unknown or other
  modified_base (1352)..(1361): a, c, t, g, unknown or other
ttttcccattcaatattttccaccaaacttataatatgattttcattgctttttatattgtaattaataattaaagaattcttctttaactttatttattttggtttttgaaccatataattttcaaagatgatagggtttcaaagatgttaatgatgcttatggtacatattgacatcatcttagatagagtggccagcaccaaaatctttccatgtcatgttatagcagattaattattaaaacccagccccactcttaaaagtctatagctagctatatatatatatagtaaattaattattaataaatgtaatacataatatttgtatgtatatgaccccctgtatatatagctgcaaggctatattattggcatcacatcagcatgcatgatagtacatattctcatcatctaatattttagaaaatgctaacggcacctaattaagttccaaatcaaaaagtgtgatattattattagtataaattaattaatattaaattttatatattttaatttaataaataatattaaaaaatgttaattactaaaaaataccatttttattaattaattaatnnnnnnnnnnnnnntccaattttatatttaattgaaacatacctctttttatatatattgtacttaaaatattcagacataagagagttacatagagagtattttgaagtgacagtagaaaaattggtacgatgtcaaaaaaaaagtaaaaataatagactttaaaaaatagagtaaaaataaaaaaaaaaaaaaagagaatataaaaaaggtataaagtataatttctcctaaaatataatatattataatatgatattagacatcttaaaatacccaataataatattttattattttatgtttaagcctaactatataatattaaaaaaatttataatactttaccaagattacaacgatgcactctttttgtatttttaacattcaaataatttaattttaattttttatatgatagtttacagcataattaattagacatcttgtaaattaaaaataaaaaataaataacacatcaaaaacaaaagttctcatgagttgcacttttactttttttattttataagtatgtgaaatagactatttaaaccttattttttgtattgtaaattattctaaatttttctaaactttgtagagtgtcttaaaaataactacaatatgcataaaaaaaaatatatatattgagattataattattcaaatattagaaacataataagaatgcattagtacatctattttcggggaatataccgtagaaccacttgttagtattatatataggataaatactattttggannnnnnnnnntgtaaaagttacagattggaccctatgttttgttaa

SEQ ID NO: 27116 - DNA, 4655 bp, Cannabis sativa
aaatatgacccgaaacttagactaattttagcctaacagtagcatccaccagctagtcgattcttggaagcggaaagtagtcctttggacatgcttttttcaggctggtgaagtatatgcacactctccactttttatttggtttgggcaccagcacagggttggatacccaaagtggatagaatgctttggtgataaagtcatgggcctgttgcctttcgacttcatctttgagcgcttgggcacgttctttgtctaacaacctccttttctattgcacaagtcagaagtttagatcaatgttgagagcatgggtcatcacagagcagtctatcccgaccatgtctctatgtgaccatacgaagaggtccaggtttgcccttagaaattttatcagtattgattttatttttggcactaaacctttcccaatcttcagtcttctagctggaaaagtgggatcaatctccacttcttccagttcttctacaggtccaaagctatctacgggatccccaaagtgaggatctatgtttgcatccccacttttggttggactttattgccctttgttgggctcttcattagggctcttggcaggcatattctctttcttagctttggacaaggccaagttgtaacaatgacaggcagactgttggtttcccctcaaacatcctaccctatgccttgttgggaactttaggcaaaggtggtagatggatgtcactgcctttaggttgtataggtctagatgacctatcatggcattgaaagctgagggcacgtcgattataatgaaatgtgcctggttgttggattctctccaatagttaggggtaataggatgtaccccatgggtgcaatgtcttggccaaagaagtcatacattacttgtgtgtagggtgccaaatcggttagctggagctccatctcttcatatgttgatctgaaaagaatgttggaggaggctccattgtccaccatgcatcttgcaactgtcatgttcccgatttgtgttgtaatgactaaggggttattgtgcgggaaattgacttgagtagcatctccttctgtgaaagagatggtgggttctctaagctttggttgcttagagcccctttattcgacggtcagggtatcgcttttaggcttatgacagagtgtttgagcatagcgctccctaaccttattggtcttgcctgcaatgtggggtcggctgataatgacccctaagtgacccgccactggaggtggcatgggatctccattttggacaacttgtgcttgagattattcgttctgcacataatgacacaagtggggttgttcttccttatgaggaattcaagtcctcatactcaatacgagtaacatccatatcatcatcattttcagaagtgcggagcacatcatcaaattgtgtaccagtctagccaataataacagacatatctttcttcaagtcctcatactcaatacgagtaacatgctcatgcacctttgatgatgatggactaagaaaatcagcttccacagaagaattggggacgaatttagaatcttgaccatacatgcctttacctttaaccttaataaagtccaaagttgcatcaccctagaaatagttatgcaagttcaaacttactctctgcacagatgttggagaaatgtttctcagttttaatttcaacaaaacaaaataaaaaattatagacaaatggaagaaactgaatataagaacaaaagaaaaaataattgtaaaataacaaaaaaaaaatatgaaaaacaaacaagtacctccttcaacgatcggttaaagatgaagttgttcacattatccatcttcagctggggtacttttggctttggcattttaggccaattaaaaagccttggaatgccaaatgtttgaatacaacgtaagtttcccaatagcataaagacaacactcaaaaaaccaaatttgtaacgctaacgaaaaatccaataacctataaaacccaccatcttcttccttctgcttaaccttcctaataccagcatcaatcttacccttcaatgattgaattatcatatcgaaacactcctttccccacccataatcattgtaacaaccgctatccaaaccatcaattttctcaatggaaacaacctttctgggaggaccacccaacaaatagcaatgaacaaaatataaaatagtcaacttgactgtaagttcataattatccttaaaattgtcagcaataagtacaacttggataacattctttgtaatttttttatgtccctttaaatagtgtctaacaagcatattatcatcctgtttgtactggaatatatcagagtcaacatggcaatctaaacccgtaattaacgaaaattcctcaatactaaacctcaaaaatttgccttgcacaaattttcaaaattctaactcatttggttgttgaacctcccttaacaccagaccatgagttagttaaaagtagatactattctcaagaatacgaagaaaatgaccaaacacagttttggaaaatatttataattaggtttcagtgagaataattttaatatcatttataatataatattaataactagaggttataacttaggaatgctagtgttccaaacggctgtacttgcattccaaatcctagaaaaacagaataaaaaaactactaaaacaacacaaaaataaaataacaacaaatcaagcataaaatagatactaaaacaaaaataaagaaagtacacaccttaacaaccattttttcagtgatctccttaaacacatcatcaaatccaaccttcttaactgggttttacccttcccttacgacagaacaaaataacaagaagacaactgttaaacaaaggatactttattcaaacgaaacaaacacaaaaaatataacaaaaaaatgacatggaagataaagaaatcacagacagagatatctgtaaggaaaaaaaattgaaacaaaactcgtaaaataacacaaaaataactaaaaattatcttatcaagtttgggcgactgtaaaaactttggctccaactcaaaatcagagtctgaattttccaaaatggggcgaggacgtttggatatcgtcttcttcgaagttccaccaactaattttttttttttggaaggaactggaggcgtagggctaggaggatgatttttgaaattcatcttacccattggtgatcgaggtttgtttttctagagtttttttttttcgggattttttataaatggagaagaagagattgatcgggtaatagtcatagataatgaagataagaataatatttatagaagaagaactacaactaaaggggggaaaaagaagagggaaacttgtgatttaaaacaaaaaaaaaaaactgaataaatttgaaataaaacagactgaaactgcccctaccaacataataaccgtatgaataaaaaaattaaaaaaaaggaagaagatgatgaacagtaagatggaatgatggggaagagggattaaattgaaatgaaggggtaatgaagattaaaggaaaactaattttcaacataaattttatttaaaagaaaaattaaaaaaaaaaagaaaaagaaaactatcactaaagtgacaaccgggtcaaatcaacactttttaaattcttaaaaaaatatataaagatatgactgaactgtgagatggcacgtgtaacaaaaaatgacaaaaattagtttaaaaaataatatagtataacaacagaataaaaaaaaaatacagtatgaaagtaattaataccgtatgacaataaaaaagaaagaaaaatgaaaaaaaaaagtatgaggtgtaatttttttaaaattaaaaggatattttaatttaagaccattgggcttgaactaaaagagtaaaatcatattggaccaacactttgcgtaagatggccgaaagatattatttttacctgtaattttagttaaataactattttgcataattgtttaaatatggtaaaaaatgatatttttagttaaaagtcaattggacttttactcaaaattaaaaaaagcccaagtctaaattcacataggagatttcgattatgaatgcatttttcctattagttttatttttattaattaaataattagaagaaaaataaagtatcaaagttgctataaatagaggggtatagctagagttgtaatacactaatgtgatacatgaaaaaacttaacagttaacactatataaaaggtcttaacacggtaataacgtagaatggaaagaaaatgaaataatctccattctatttctttgtttagttgcatattaaagtgttggaatgtcattttaatggaatgacctttctaccattttggtagaatgacaattccattttaaaatagaacgaaagatcattccaatgcatgatgagaaaaaatttaataattttttaatcaatttttttatgcattttaaattttattccattacattcctattctcattcctatgttttcattcctctcaaacaaatgctacctaagatcctaaagtggcgtttagttgggaggaatgaaaatattggaataagaataggaatgtgatgaaataaaatttaaaatgcataaaaaaattaataaaaaa

SEQ ID NO: 27117 - DNA, 5758 bp, Cannabis sativa
caccttatgggaagggaaaacaatcataatgttctgatgaggaagaacggaggaggaaactctaggaacaacagtgttagccaacatgggaacaaaagaaggctagcccaacaacgagtttggcaaccccgctgcaatgaccaacctcaacaggagaatggtcaaccaaggaataattgactaagaactagaagggaagacctcgaaatcactagttaataacgtcccacctaccctgatggtcatggagaagataaagctgagagtaatgctaacaaccaaaataaaaatggtaggataggctattagcttgtaggactgtatgtccatttaaggcagcataaacccaccaacaacccacctcaaagaggtgagaatcattaaatactgcccatagtatctggaagagcaaacaacgaaaatgttgacagtatgccccaaaggctaagattagtctttaaccaaatgggagcctaaggggttgaggaccttcagaataccattattagaaattagggaaattaggaaaatagggacaatggaggcttaaatcatatagcttcgcatgagacgatttaagaagatcaggtcaacaaaggcttcagtgtcgtccaaccataagtcatcatagatacggtgatccaaccatagttagacgtgctaacccggtgtgttagggaccttaccgcacaaaaactaacacacttaaagttggacagtagaagagagtcttccttctcacaaagaatcaatgacctcccaatcccaaccaagttcgagatgtcgacctacaagatgtacatgggtaaagaagatcccttcacccatgttgagaacttcaagatccagatggatcttcaaggaataaatgacgacctcatatgttgtgtcttcttcgcggccttaatagacatgacacaataatgaatctccatgttagccctggggaggatacttcgtaggacgagcttgttggaatattctataaattctcttatgataaataaatactcgcaaacttgggtgacttagtgctaataaacaaaggccaagcaagccactcaagtactatattcatcctacatgtaagaagcaacaaaagtaaaaagtctaagtgacaatggcaagctggccatggtcataggggcatcaatgtgggaagtcgactctggatagacatagggaggaagctaacccactccaagaaagccttccttgatagagcagagaaatttattaagtcggaagaggctgaacagaacatcaaaggccttgatcacgccaaaaagtttgtgaatggagcaagttttagcggccaaggttcccaaggtcaaggaacaataataataatggctaaaaaaatgggaagagtgtcaacaataagaacgatgttagtaacactaatgataacaagtgactagagaatagtattaagcaagtaaggccaaaacccatgaccacaaggtatcacccaaagtactgacttgagtagcttacttgaaccacatatattagggttagataagaagcaagagcaaaagcatccaaaggatacttggaagcttcacattggtggctcttctgttgactaattgtaaggagcttgtcttaccttgaccactcctgaagtgtagtacattcatgctgctatccacttaagattcaccgcttccaataataaagcaaaagatgaagaactgatcgctggtttaaaactagcaagggaagattatacgattgtgaatgctttggctaggctaacaagcattaccaaggtcaagaaggccaaccttgtccccattaagtacctctcgaaccaagacatcttttcctggtgacatgaagacatggtgggcataagtcacaccatcttgagtttgctcttaatttggaaggaccttacaaagcggtagaggtcattcatcctggaacatataagtttgcacggtacaattccaacatgaacttggtaccagggcctcgctattggaacaaagtacacctctgatggtactatcagtaaagtttcttttcagcaactgcttaagctataagacaaccccaccaacgaagtttgttttctttttataaggcacgtgcacccaacttgatgtcattaggcacattttcccattctattcatcaaaaaaaaaattcaagttatgacagagctcatatgattattattgaatctatttatgaacctgaaatacttgtttatcttgctaactttagtgatttagtcacataattttaagagtgcatgtgtcgacgtagaaatttggccattattcgctcgctagattggcgagaggaaaaataattttaagtaataaatagagagaaacatgaaatttatagtagttctctcttcgtgtcgcgatgataatagagctacgtctacttttagtttttatttctcacgagaattacaagaaactggccaaggcaagatctctaattgctagagagagattctctaaccttatgaggacttaaaagaatgtgaaaaatgagctagaagagctctccttttataggaaggaggtcctattgaaatattaataaaataagacaaaaatgtgaaaattctctttgggctaatcttgaccattgatgattatcaaatggtgaaaatcaaattttgataaaatcatcaattttctgagtttgaatctcgtctgttggattatttttgggaaatctatcaaaatattgggcacaaattttggacttaaaatattttgaattgcaatatgagtgtgacacatgacttgaatgagatttaaaatgcatgttggatcgcatcaattgtatcaatattgagggaattatggcaattttactgaaagttatttagcacccagcacccaggtgaacatccagcaccaaagttgacattttgtcgttaatcaggatgctgagtaagtggaaaaatttcagagacttgtattttttgatgcttaagtggtatgttgacatcacttaatcattttcttcactttggtgaagttgtttaccagttctcagagactttttggtgaaattgtgtagactcaaaactcccctattccaccttaataagggtgaaatatcgaagtgtgaatttgacctttcacaagtattagctctcatttaatacaaaaaaaatagtctgatggtctaagacaaattccaattcttatatgcagaacccaaagcacaaggctatctattagcctgggcgccaggtgcttcttgggtgacttccagaggctcattttgatacttttaaggaatttgaaattgcaaatgaggtctcctacctcatttctgacaaaaagaagaagaatgttgggagtagaatttgtgtttaaggagcgaaaacatgcaaattaagttgcacatcaacctaggcgcaaggcctagtgcccatgtcaacttgggggcttgggtccaattttggccccccgagaacacttgtatctttggtatttatgaaactaaaaaacatgcccacaaaaattttcgagaaaaatgactagaaataaccgaggttgataaaatgtcaatgtcaacctacacactgggtctagctttttgccacaggatggttctgtttgattcccaaaaatacttgtatcttagttatttgtgaaaatggagaatatgcctggaagactacttaaaaaacttattgaaaatggacgaggttgaaaaaatgtcaatatgggcgctaggcccatcacctaggtcaacatgggcgctagatcctagttttggctcccaaatgaatctgtttgtttaccaaaagcacccaaatattaattattggcaaaaatggagaatattccctgaagaattcttctaatttgtttctagaaatggcccaggttgataaagtgtcaacttgggcgctgggcctaatgcctaggttaaccttagcatttggtccccctttttgcctctaggtcgatttgtttctttcctaaaagcactttattctttgttttagatggaaactaacaaaatgctcgggatacttctttgatattgtgattggaagcgccctaggttaacaatatgttaacctgggcgctgggtgaactaggtggccgaggtgcctggtgctcaaaattaaaagtgctccaattctaattctgatgccttaaatatgttcgtcatatgtcttattcatgtcaaagtataaaggttgagtcatttgcacaaaaatggacccaaaaactaaaaccctagttgggatgtcaaacttgggtgctaggtgaaaccctaggcgcctggattgactttcggggtgttttctcatctcgtttttgtttcttgactttggacatgattctccttatcttctttatttaaaatacttaaggattgtgagtttgaaacaacttagtgagttctaaacactcattttggagttcccaaagtcaacctagggctaagggacccctcccaggtcaactactatgactcaggactactcaaatcttggatgttttctttctttccacatgtcaaacattgatgtccacgtcaccagggtcagtttttgggtaaatagtatgaaatcatagtggctaacccaagggatgatggcagttcttacataaaaattctggttatttagcaagtgaccaaaatgcaaaccttcttagtcacttagggggaaccacactcatacatagactaataaggataacattgcacactcacttaaatggattttaaaaatgttgagttttaaagtgcttgtgcattgctcaatgtcttgagcgacatgtatgcaatacatcatcaagtataaaaataaataaataaataaatatttatgcatagtgtggtacatgccacataagttagcacatggtagaatataggaaaagagtcgcatagctccatagaaaagaaaaagaatgtcatagcatgaaaggtgtcccaaaaaagattagggcccaggattaaaagctgcttggatagccataattctttacacccatgaaaatagtgctatatgttccatgagaaaagtaatctaccaagggaaaaaaacaaggtctacccaattcaacacttcgcatccaatgttaacaacccggtcaggtgtaagtccatcctactgctctaatggaattattcatgataggtctctgtaatgatcaacaatcttggaagtaggatcatggtcatccatatctttttcagaacatggccccttgttaaattctttcggctttggtaaattagaagctcgccaagcttcttgcggatcatgaacattatttacttatgtcgtcttctaagtacgagcttattaaccctaaaaattaacaagtttaattttttgagattagtaaacgattagtcttgagaaatgaaagaaactgacttgaagaattagctaaggaaggaccaggtcaacacatgtatactggggccactcaaccaaaccctagcttgagagcaactcggtcgagtagggttgatgataactcaaccaagcatgtcttgaagtcactcggccatgaccgttgaagaggacattcgaccgagcatggcttgaattcactcatccatgtgagcattaaggtcactcggccatgttaagaccaaggtcactcagccatgaattcgagaagtaactcgatcatgcttctcataatgtcactcttcaccatgcttcttacaatgtcactcaaccatccattagagaagtcattcagtcatgtttctcacaatgtcactcgaccatgcattagag

SEQ ID NO: 27118 - DNA, 2439 bp, Cannabis sativa
aatattaattgtgtgttccttataatataaatggcctaagtcaatgattacaagatattgtaatatttcagcatgcagtgtgctgcgcttggatttatatcccaaataggaagttattttgtttcttcatcccttttttatatatgtatgtattgtatatttgtattaaatataatctctaggtttaaacataaaagattccttaagcttccagatgaatacaaaaaaatttaattaaaaagaaaaactaatgtaacagatccaagtccaatattatttaattaagagatatcagatatcacatgtttcacatgaactataatagatatactctcctaattaaaggcaaaagcatataactcaaatttatcaacttaattattacaacatgcttaaacatacaaaatatataagtgtatatatagatatttaattaatgaattattttactaattagttaataatatttagttgttttattttggggtcctcgatctggaaagtatatatatctaatataacaacaatattatgagcacatacgtactaataaaatcagagcactatttattttcttccttataatataatctgctttttttttttttgcctacataatcaaaattgattcgctgctatgattttattccactctacacatttaatttcctcctcatgtttttcgttaaatacatatataaatatcagggaatcaaaagataaattaaaatgatatattagctacaacatatgagataattatcatccattgctctacacattctaagataataattatgcttttcaaataaaatttaagagaaaaaaaaaaaacaaataattagttgcttgttttcgacattactcttacctacatttttatcatccaatacacaatgttaattataaaggtatatttttggtgctcagcatgatcacattctcacacaataagtatatggacaataacccactttgttggtaattgtgtttactcataatctatatttgtagttttaatattttcgatattataatgttttccactttctaattgaattgccattaaataaatttatagtaaattgtaatcaaaattataattaaaaaattaaatttaatatatcaaaatatattttgtgctgttagaatgtacatgttggttttgttgaaaatacaagagtgagatttctcaaaaaaaatattttaaaaaaatagaaagaacatttgctggcaagttacatggtgttacacataaaaaattattatcctaacaatcttttaatcataacataaataatttgtaattaaatgtcactacaagaattataataagcatcacagacggtactattaatgacgacaatgtcgtcagtaataattttttttcttcaaaagaaagaccgttgcaaagggcgggaatatttcctctaaaagtatcactaatgacttttaaaaaatcaaaataaacctcaaacccccttctgatttctcatttcatcaaaccctttcttttcttctctgaaccctttttctccatcaaatctgtctttccatcattctctttctctctgccttaagctattttaaaaaaataacataaacatatcgttgttgtcgccgccatatgtaccgcttgaagcatcaacggaccaccacctcgctactgccaccgccatattcacctcttgaagcttcgcctgaccactaccacctcgtgcctatccccgctatcttccagtaatgtaattttattacccatgtatattagtttaatattttatgtgtatatattgttatgtattatatatatatatttatatattttttattttattgttgacacattattagtgtgtcaccattcatatcagagtcgccactgttagtcttttttttctacttatatttgtttattatatgttattcttttattttgtacgtatatataatttgtattatatattaatcttttgtatgaaaatttaaatttttttagtgtaagtcttaaaaaatcaaatttaatatagagtttatgtagttttgaaataaaacagattatatatgatttgtatctcttttctaagtgttaataaattgtttgatttattttggatatgtgtaatttttgtgtatgtagaaatagtatgagtctatgatgtatttgaaaacttttagagtgtttagattgggttttaaaatttttaaataagttaaatgtaaatgttacgctgtcgggggaagactgccttgtaggagtcttttgctgctgagcgggagacacttcggaagaaggttgaaaagtatgaaacagctaccatggaggttttctatgaattctaaaagacaaatccagaatgtaattttgactatctcaaaggcgatctccgtgctggctttcttgacaattgcaaaaggaagaaactgttgggttttatg

SEQ ID NO: 27119 - DNA, 2090 bp, Cannabis sativa
gcaatccaacactcaatagcatgcgctcgactctttctaggatagttttgttgaatctctctacaagtccattttgatgaggagtcttcctcacagtctcgtgccttggtattctttccttcttacagaacacatcaaacttttctgaacattattccagaccattatctgttctaagtcgtttcacttttcttccagtttgattctcaattattatcttctagtttttaaatctttcaagaacttctatcttattatttataaatacccataaatttcttgagtaatcatcaactatcgaaaaaaaatatctgctttcagagtgtgaggtgtcctcgaggatctcataaatcactatggacgtaatccaatgttccctttttatccctttttccaattccgagcttgactatacaaaaaatccaactgctctagctttacttttccaagtagtccctacttgttaagttcatacaattctctttcactcacatggccaagtctcttattccatactttagttttatttacgtgcttgcttgaaatgtgcacaccttcgtgtttttcactatgctgccttccaaaggataaatctcattagatttcctttccctcattaccaccatcagacctctccaaacttttataactccattcttaactttaacaagaaatccttgatcatctaatattctaacatagataaaatttcttttgagatcatgtactaatcaaacgtccttctacaccctttccacaccatcatgaagtttcaatcttatggttccaatccccaccatcttacaagacttatcatctccaagatacataatcttataatttccaaatataaattttttgaactaagaattattcggtgttatatggaatgaacacccagaattcaagatccattcaaaatatgaattctaaaagattaccaacaaagaaccagctgaatcatgaccgtcacttatcactggtgcatctcctttagatcttgaatcatctaacttcagcctttctagaaatatctttctaacatgacccattttcctgcaaatccagcatcgaacatttttttggctatcaagttgcgatttagatcttgatttttcttttgaacctctgttactttatctcttctcacttctgctcctggtaaataatccatcaccattttcaaaattctttgactcactcctttaattgagctctttcgaattcaaatttgattgcacatcatcaagtgtgattgactctcttccatacaatattgtatctttaaactgtgtaaaagacttcgataaagaactaaagtaataacaaagcttgatcttcttcttcaatggttacaccaatgttctcaagattgagaatcaacatgtttatcccctcaatatgttctccaatagacttgtcctccatcatcttgaatgaatacaagacctgtttcagatataatctattgaccaatattttagtcttacacagactttcaagtttcagccaaacaactgtgattgtatcttcttttgtaacctttcgtagaactttatctccaagattcaaaatgattgcactatgagtctttctaagagtctctttcttgtctttttcagactttgattcaaaagagacttctcacccaacatagcctgatacaacccttggtgaaccaacaaagcattaatcttcatcctccataatccatattcattcgtaccagtaaactttttgacaccgtattttacatcaaccatcattacaaaccttgctctgatattagtttgttgtacaaaacagaaacaatcaatgacttacgattcaatatactgatccaacaaatacgcaaaagaattaaaaataatataccaagagatcacaagaaccaagtaataaataaaagtagtaaaacagagaagattaacaccatgtttaacgagtttgagccttgtgtaatgctctacgtctcggttagaatagcaacaaccatatctttattgatatcactatttaaggttacaagaatcctcacaaactctcaaagattacaaaaaaaaatatttctctctagtttagactctctc

SEQ ID NO: 27120 - DNA, 1734 bp, Cannabis sativa
taaaattttaaaaaaaattattttggtatctctcatttgttttcccatttataaaaattttagttcattttatataaatgtgtaatttatatttatttaagatcattagtaaattttatttttttataaatatttttcagtgttaaaataaaatttcaaagattacttaatatatgtataaaaaaaaatagtcgcacacgtaataaaatatttattaattattttaatttttttaaaatttgcaattaattttaaaaaattataacatgcctgattctaaaataaaagagaattacttcatatgttatttttttaatttttttttttaaatttacggtttgagttgcagcgctagttgcaataagaatttttacgtagaattttttaaaaatacaataaaaattattttgaaatgtaaaaatgaaaattcctaaaataaataaatataaaaaattcttttttaatatcgaaacacataaaaagtgcacaaaaataggccataaatatagaatgttcaaaattttagtttattagatggaaacccattaccttgaagagtcttcttcttttgctaagcaataatgggttcagattcatagtatatataattatataaatatatatatttattgtatgtttgcttagatccaaaccacatgaattattacattggtttccaacttcaaatcactattgttacaaaccatcattacaaaacttgtaatataagattttgaaaattattaagaagatcacaaataatttaaaattataattaaatatttattagaatagttttagaaatttgaagattaatgaaatatatgatgattttgtttattagcaaataaaactacatcttattaaaaacatgacattggatttaattattatttttttgataaaatatttaatttaatttaatgtatccaaaaataaaaaaaaaagagaaaaatattgttaaataatataaatttagaaatttttgtgctagacctcctctctctttagatattgaggaaaaaaatttagtttatttttttttttataattacgtatgttataactatttaaaattatttataaatttttagaaaatttcgagtagtttataaacagttacttaccatgtataaaaaaaataagcacacgtgtaatacaatatttaaactttatctttgttattataaattatttaaaattttataaagtttacaaatgatcataaataactatgagatatttattctataaattaatggatttaatgtaaatttttaaaatttggtaattataagttttattttaggagaaaaagaattgttaatgtaattttgagaaagtgaaattagtaaagattaattattagctcgtgcatatgatgtaataatgtgtgaatatggcatgctatcacaatcaccaaacagaagacattggattttgaagctttgactaacatttatatatttactatatataaatacaaaaatatttatatcactcaaccagatggtaatttaatatttattgcagaaatgtttttcttgaaataaaacaaatattattatttattcattatgggatcattgggaagggatggttgaaataggtggtgataaattagaaaataataatgtattttgctcaaaaaaatgtatttgttttgtcacataaattttaacactaaaataatctaatattataggtactttttgttagagctttatataaaga

SEQ ID NO: 27121 - DNA, 6968 bp, Cannabis sativa
  modified_base (73)..(83): a, c, t, g, unknown or other
acaatctcaatagttcgggggaaatttctaatggcaaaaaaagttcaggaggcacaatttggtacatgtcaannnnnnnnnnnaaaaattactaattagccattaatctataacatattatcagtacgagattttttccactggaaatatatacttttttgtttgttaaagttgttgaattattttaaagttataatacacataatatatatttatatatatactcatctgactgaaatacttttaagaatttttttacttttctcataattttttttgttatttattgttaacgtagatttttgttaaccaattaataaacttttttttcgtaataaacttgacacataaattataagaaatttgagaaatctaatagaagcaaaaatgacatcgggtttttacgtgattttgcagttaactctgcatagtccacgagtctatcttattcagatgtttttggatacagaattagggttttacaatcagttaacttcttttttctcaaagatttcttcgtcccctttttctgtataatttgcccatatttaatataggtaggcaattaattacatttaaattcgaattctataataatattctccaaaattatgggctttaattacgttctacttaaatacgtgtagataacattaaaaaatcacacagttgtgacttaaactatctttaaggcggtcaacgctgacaggaacatgaactttcttctaaaggtatctcactggaggtatctcgccgtgtacatagatgtcttggttgatacgcacagcaatgacatgagcactagattactgagcaaacttaagaactgctctttgaccataaggccttgcagactggataatcatgtccttcaagttattacacttagttattataatgtgtactacacgctaagtgttctaataactgattcgcctcgtcaatacctctttacatacaacgaggtagaagcctcgctatgcgttgtctatggctccctcaggattatgccttccaagacaagatagtttctcatcaatgcatgaattgatagtctgtatatccatgtctcgcttaatactatacagtcaccgagttacgaatattctctattaattccacatttaatgagttatttcattttgcatttaacgatataattatcattatatttgttgattcatattccctgaggttgacacgtctcaccttctaaagtacaaccgaatttttggtataacaattgccccttaaaaattcctttttcttttttatataaagtactttttaaatgattaccgtgggtatatctgtcataatctaatttgaaaatttgcatgcctttgaatttggcaagtttatggtttcgaggcacatcattagcattaatgagccatcttttccacttctctcccatttataactgttggatcttctttcctataatctaacagagatcaagcccaaggtataaaacaatagaaagataccacctttcctccattttcatcttttcaaaaaattttaagcttttctgagaaattctcatcccgactttctgaagctttgcatgccctcattgtcgttaacatattttttgcgaattttcttagattcgatctccaatcttgaacgtatttcacccccccgctcgtctcaaacccagatacagagatctcccctgcacatgcatacttccttaaccagtaagtattcattctcttccttcttggcatatttttagtcataaccaattgcatcattgtttttctttgttgggttctggtaaatttttttatttttctggttaacttttagggtttagatggagtaagacttaggtttaccatatttataaatttctggttttaataaatttcttccaggaattgggattgctcttttaatagaaatgtcccaatttggttctgaaatttattctctagaatttttagaaacagagtgtcccaagaaattttcccttccattcaaacctaaaacccagaaacctcgatccttacttgaagtaaatgatgcaaagattagggaccatataataaaaaccaatcaagacgaagttgctagtcgccataggtgatttttgcaagagaattcctgagggtaaataccattttttgcgagacgcagcctggcctgaacctcccttattatcttcttttccactcgcgagaccaatgtttttacctgaggtcactgctactttttcactaggtgaccttgagtttgatataatgtctactaagcctcgtaagtcaaagaccccacaggatcctaacgtcaccttcgaggatgaactcatcgaatccaaggtaaactttgtcttcattatccatacctattgtgtaatcgttaacttgtctgtaatttccttgcttaaatgaccctaacctcgatcttttctccccacttctatttgttcgcggctgggtgcgcgaggggagagaagttgggcttgtgcagggagggaagctgggcatgcacatggggaggggaagctgggtgcatgtacggggaggggaggttgggtgcgtgcccgaggaaaggaggctgggtgcgtgcgcggcgagaggaggctggacgcacagggctttgtaggggggaaaagaggttgggcacgtgggctgatatgatggggagatgtgacgagggggacaaggacaaaaaaggcgggggccatcctttgtcccttttgtttgttttgagaatatcacattattcttcccctttatttgttgtccaaaggaagattcatttattgaacttctgtggttaacacttgcccccagtctaaaagagcacttttaagtgatctttttgactgcagttgagccgtcctttaagccctttgcaacacacctcgtatggtagagcatctaacattacgtaccgaaatattaatgagatcattcaatgagataggtgggtcacatgttacttcttatgtgtgcatgtgactaatcccatctattgatcttattttgatcaaacagttagtattcccttattcaccttataaatatgcttccattttcacctatccctgtctcattcttatttcccataacttgctatctttctttactttctatttcttccaatctcttcctacattctaagccctttgacatttgttctttcatccagttccgatgtagtgagtctcttgttactcaagccaatcttgttaggtaccttctttccctattcacattacttttcttttatatttatacacccaccatacttacgaacacaactcgggttcataataactctcgttaaagccttattagtctttggcctgccactaatcctatccatttgtacgccttccccccccccctttattttttgttgggtgactaggcgtgcgtctaaagtaacccccttgttatagagttatagtaggtgttgtgtccccaaccttggttagcaagagttgacgcccacattcacttttctcgaacaatacttccaccttttcctctttcccatctctttcgattcaaacggggacgttgtcgacccttggcgacagtatcaccagctaatgtctgagcatttgaaatgtttagaagaaatttgtgagttccaacagcgtttgtctaggcttaaggaggagattgagttcttggagggttaggggcatgctaatacggatgcccacctttccctcctcaaacggttatatggtgacatagcagagaaacttgctcacttggagcacatttttttgcttaagctgtctcccccttgcccagctctcatgcctttggctgtgaagccagctgtgtgccaaccaggtgaagatagatgttcctcctactacccctcaccatccaccattgcctagggtcatctaagtgatgaaggctcggtcggacctagattgggtcaaaaagctccaactcttcgaatgaagagcatgaagtatgttggttctcgttctaactcattttatgattttacaaatatgcataaaccacgccgcccgactaagcccagtgcaccacttccaaccagcgaaaggttgattcccttcgggatggctgacatggtgagtattgtgactcgatctaaagccaaaaggatggtacaccaatatgcagtttcacaaggttttgaacctttgttcggtgatcccgctcatttaccacctcaaggcatggcggcctttagcgaatacattctcaaggcgggtgttgcttagctgcttcaccctttttacgtggaggttttgaattactttggcataactcccctacaaatcatgccaaatggctggacacatttttacttgcttcttcattgccttcaagaaagcaactggtagggctcctactgctaaggaggtacactacgtgtaataactttcttcccaatcccacgttccagggtttctattacctatacaagaaagttttgactaacccgacggtcttcggttcagtttctaacacgggaaaagcttagaagcaagacttcttctttctgcccaattaagcgggcgtgatcgaagcctttcgaatgcctggtaagtgactccattgcctttacttacgttacttaattaataaggaactccttctttatgaccattcaactctttttttgtccccgtttacaaaggctcgtgaccctccttccctcatgcaagaggagtatacttccggtatactaaagctattcaaagctaactatgaaagcaaactctgccactatcttctgattttgcctaacttgattgaatatgggttggtcatggagaatgtcaggttaaagcctaagaagttgtatgccatgctgcttcccccaccagaaaaggaggcagccctaggcgattgagactcttgattctctctctctctctgagctatgcaagccgactacagttgtccaaaggagctcaaagatcccataccttctacctatgccggacaaggggatgaccactctatggaggttgatccccattttggtgttcttctggagatgcctcctcctaacatcgctcctggtcagcagtttcctgggcttcgggaaacacaggtgctctgtgatccccaagaactctactccaaccacctaagctctccattgatacatgagcgacaggggtattacgaccctcttatctttttatcagaccatcacgcatgaccagcctcatatccacccatccttttgctcaaataatacctctgctcatggagaagggggttcaggctctacgccctcatatgcgccagaggacttatcgtgggatcaatcttgcctatctcattatggtggggcatttcaacagaccatgtctctatactcgagggaacagtgggagagcatctgaggtgttcccccactcgacttgtgtgagcagttttttcattcttctgttggggtgagtctcctttttattattttgttaactcctctctttatttacatgtcttcttgcagttggctactgcgtctcaaaaggtgctcgcacagggcagagcctacggttcttcttctaactaccagacgctattaggtgacctgtaatctgttaaggcagagagagttcattaatctgccctggtggactcccaggtggctttcattcaaacactagagggtgctcatcataacttggagttcagatctaaggaatgcatctttttgggatactcttcaaagcacaaaggatatttgtgtgaaaatgttgtagccactctttgttgccaaaaaagtggtatttaatgagacttactttcctacctcttctaagtccagcactcaacatgtatcctctattcattcaacctcttttccaactccatattttttttaccataaatgttcatattggtactcatcatgttgtgcctactgctgttgtaactgagtctcaaacctcatcaactccacaagttgttgttccaaactcaacttctgcacaagagtcatcttcctcaaatgcgtccactacctcccttaagtcatctgaattgcctcaatacagtgatagcaggaactctattttactagtcaacgcagctgcaactagttatgtagcctcctccacctctcctactcctgtagttgcaatggattcataccatgacaacaaggcctcaatatggtatttacaagcctaaagcatatctagcaacgaggaacaaactggctgagtctcttatgcctcgtgaactaaagtccctgaaagcagcacttaatgaacctgcatggaatgctacaatgcacaatgaattcactgttcccaaagctaatagaacttggacgcttgtaccatatgagccgcacatgcatatgatagataaaaaatgagttcatcaaattaaactcaagtcagatggcagcattgataggttcaaatcaagactagtttctaaaggttatcttgaagcacatggcattgattatgttcaaaccttcagccttgtatttaaaccagtaacagtgagaatggttttcactttatttgtgaaacttaattggggaattagaaaaaaatgatgtgtctaacaccttccttaatggcaacctttaagagactttttatatgactcagcgtcaagagtttgaagatccatccaaacctaattatgtgtaacatttacataaagctatctatggccataagcaaggccctagagcctggaatgataagctcagaaccattttggttgtttggggatttacaggttaaagggcagattattctatgttcatctttggtactggtcacaatttagtcatcctacttgtctttgtgaatgatatcctcataactgctcctaacactcagctttttaccaaacttgttgctgatttgaataccttctgttagtgtcattattttgtgacagtgtatgttctgttcaatgtctagtcgtgtctggaattttagactgttatatctgcactaacgtttgtttacgaga

SEQ ID NO: 27122 - DNA, 4175 bp, Cannabis sativa
  modified_base (3642)..(3656): a, c, t, g, unknown or other
aagtgtaaaaaaacaatatttataccacaatttacccaaaaataaatcaccaataatcaccacaagaacaaaagccatctctaaaatgatgaaacctgcttgaatccctgactgtgatcttcctctggacaatcttagagatgaacttaattgcggtatggcaatctgtgcatgctcttaaattcttcatcaccacaatgggcgtcccttctggtgtactaacaagtgcataagcaattgctaaccgttcgctatgatactttagggactctaatctaatttcctcttcctcattgtgtagagaacagcttgtgtcaggtttatacccttccttttccatcagattagccaacgaatcaagctttcttttaatgtcactcatctgtggatggcttttatcatttgctgtgaatacatgaactttatgtttaatctcaacccagctgtgtgctgttatctttttgacccctctctccctcatggccttttttattttcccaacactatcccactcacctgcagctgcataaatatttgacatggttacataaggagcagcatctcttagttctgccatgttgaaaagctgctttgctgctttagttgctaattcttgattcttatgaattcgacatgcgtttagtattgatgaccagatgatctcatcaagctcaaaaggcatttcagccattaacttctctgccttatcgaagagtccacttctacacaacacgtcaatcattgatgcatagtgttctctctttggaacaagtttatacaagcgagtcatggagtcgaaatacttcaatccttcttctacaagcccacagtggctacaggcgcttagaacactaaggaagctgaccgaatctggtacaaatcctgactggaccatctgttcaaaggatctaaaagtgccctcaccatctccatgttgtgcataagctgatatcaaagcattccaagagactagattcctcatgggcatctctcgaaatgtttgaattgcatctctcatggatccacattttgcatacatatctaaaagggcacttccagagaacacattggatatgaatcctgatctaattaaagatccatgtaactgtcttccaagagagagtgatgccacatttgcacaggctcgcaagatactagcaaaagtagcctggtcagcactaacattttctctttgcatttctttaaacaattctaggccgtcttcatgaagaccattctgaacataagctgagatcatggcagtccatgggattttacttctgtggctcaaatcagaaaatattgctttggcctccttaaacctattacttttggcatacatgtcaaccaaggcattcgcaaccaaaatttcagaaaccgctgttgtcacaatggtgtgggaatggagttgccgacccatttctaagtttgaagtaattgctgctatgcttaacatagttgcgaatggaaattgccttctatcaaacttggtagattgcagcacttggaatagatcaagagattctctgaactgcccaatccatgcataaccagtgatcattatgttataagaaacaccatccgattcaggcatttcattgaaaagtctccttgcttcaattggatagtcatgtttggaataaaactcaagcaatgcattgcccacaaagacgttccaaacaaaattagtcttcaccacaaacccgtggacttgttgcccaaattttaagtcatccaaaccaataccagcactcaacacagctgcaaaagtgaaatctgaaggcttgcagccacaattttgcatttccaaaaagagcttaattgcctcttcattaaggtcgccctttgagtagcctgttatcaatgcattgaacgtcacagaatctctcatgggcatttccttgaacaccctataagccaagtcaagacaacatgttttgcaatatgagtcaatcaatgtattgctaaccatgaggaccaaattgaacccaaatttaataatatgagcatgaacttgagctacttcactggcaatgtccacatcagtgcatccagataagagggttgcaaaagtcacataatctggttgtgttcccctcctgtgcatctcagcaaaaagcttaaaggcctcggagaaatcattacgttgtgagtaaccaccaataagtattgtccatgttacagctgtccgttgaagcatgctatcaaacaattgtctagcagcagaaatgtttccttgttttacacagctagaaagcatgagattagtggtgatagtattcttgtgaggcatttgatcaagcaagccatgtgcatgagatatattgccccttcgaacagcatccataaccttgaagtttgagcgacatatgttgggatcgaatcccgttttgataatacgggcatcaatgatgctgtcggcattgaatgatgttttaaaagaagactgaacttggaaagtcccaacactggcaagtttttgaattgcatttgttcggtgcgaactgatcatatcaaaagtctctttttagaacactcttcaagagttgagcattatgtaacattgctaatagagtgtagagacatatgtcgacattgtactgcagagccaatatacttcgattaacaacaaaactaagaaacaatcttgtcatacttagaaaagtacagtaaacatttaatatggtcttgcaccaatcgtttagtagagtacatatattcaacgtaaaatggatcatagcaatgcaaagtcatcttaattaaaacaatggggtttctaaaattcatgtcttcctgatattttatacatattatatttgatcacataacaataataaaaacaacaagtagaagttgtctgagcatgtgaaaactaaaatctgttataatttctttctttgaatcattttatcaaacacttacagagcattgaccaatagttcaaaagttccatgaattacggttacctaacgcatcccggaaaactaaccaagaaaaaacatcccagagttgcaagaaaaaaattgagagaaacaaacagcaatgtatataaaaaggaaagtgagataaaagcaagaaaactcacctctggaaccagagcacaggtgaaatccggtggaatttcttggcataactctaaatttacataacacatatcagtaaggcaattcatcgaacaagaagaggacattgtcataccgaaattctgaaaatgaaaataacaaaagtaaataccaagtgaagaaggaagagacgagaggcagctgacctttcccgcgtttttctttcctaatccaaatatactaaaatttcatttcattatttctttctaggtctaggcatttgggccactctaactaaaaagcccaatacatttggcacatcggcccagaataaaagcccaaacacattataacccaaatttatagcttaattgtcaattaataaggggctattttaaaaaaatatagaaaaaactattaattttatgataaatatggtataaaaagtaaatgccactaaatataagttatgtaaatcattagaaggaaaacactttgaatcctaatcctaacagcagaagagaagtagaaaaatcatagaatgttagaaaatttcaccaataataataataataataannnnnnnnnnnnnnntaataataataataaaagaatataccttactccaagtaaaagaaaatgatgagagaccttatatgcatttgaggcgtgcacttgcatcttcatttttcattttcattaattagtttttgcatgcccttgaaactagggttgtttatattagatcgcatctaatgtttttggacccatccagatccaattcaactacacattggatgttggatttctccaaccgatccaatccaatactgtaggctcaaccgaaacgatccaataaaacattgaattagatcggttccatccaattgatgaatccctgtattagtattagatcggatccatccaatacttttgatctaatattttttagactggattggatccattcaatattttgaatccaatattaattggattgattagatccatccaatctaatccaagagtaaaactaatttttcacctaaacggctaatatatatacgtttttattttattatttttccactctctattacaatgtaaaattaa

SEQ ID NO: 27123 - DNA, 2803 bp, Cannabis sativa
actgcatctgaaatccctcaagtgctctcggtttctgctgaaacctggcattctaggcttgggcacatgtctcttaaaagattagatttgcttcgaaatgttttggattgtaatttttctgctttacataaaaaagaaccttgttacatatgtcctattgctaaacaaaagaagctcccattcaataataatgtcaagtttgctgccaagatttttgatctaattcattgtgacatttggggaccatatcacattacatctcactctaatttcaaatattttcttactttggttgatgataaatctagatttacttggatttttttaatgcaacataaatctgatgtatcttttatcattcctcaatttttatcatatgttaaaactcagtttaatgttgtttttaaaactttcagatctgacaatgccccggagttatttttcaaagatcttttctctaagcatggcatcttgcatgatttcacatgtgttgaaactcccgaacaaaatgccatcgctgagagaaaacatcagcatttattaaatgttgcccgagctttgttctttcaagccaagatgccaactaaattttggtccgaatgcatccttacttcagcatatttgataaatagaacaccaacacccctattggaaaataaaactccatatgaaattttatttggaaaagaaccagattatcatcatcttcgatcctttggttgtcttgcttttgcttctactttaatggctcataggactaaattttctcctagagcccgagtatgtgtttttacaggatactctcaaggtgtcaaagtgtataagctttttgatttaaataccaatcaattttttattttaagaaatgttgtgtttcatgaaaatatttttccttttcataaacttaacactaatgacagcaatattgatccttttacacaaattgttctgccacattctacaattaatgacacctctatgtgtgagtatcctacagattctaccaaacattcaccagctatcccacatgtgcacaatctgtatgaacagaatttggaagaacaaccaaatcccacaacaactgctgttgcagaaacccgagatactgctgctcacaaccagaccactgctgctgcagaaactcgggacactgctgctcaaaataatacagcaacacaaggctcttcacaagaggcacctagaagatctcaaagacaaacaaggccaccatctcacctaagagattttgagtgttattcactcattcaggacacttcttcaacaccacatcctatcaataaatttctatcatattcgaatttgtctaacacatacaaagattttatccttgcagtgtcttctgtcaaagagccaagatcatactttgaagctattcaaattgtgggttggctaaaagctatgcaatgtgaacttaaggctctcaccgacaacaaaacatggactatagttccattaccaccaaataaaagagccataggatgtcgatgggtatacaagattaagtataatagcgatggcagcgttgaaaggttaaaagctcggcttgttgctcaagggtacacgcaacaagaagggctagatttcttttatactttttctcctgtcgctaaaatggttacccttaaattgcttttagctgtctctactatcaaaaattggcatattttacaaatcgatataaacaatgccttccttaatggagacctcaatgaagaggtctacatgtgtataccacaaggactaactctcccttctactcttaatgcagaaaataacttggtatgcaaattacacaagtcaatatacggactcaaacaatcttctaggaaatggtacaagaagttatccgaggctcttttataagagggattcaaacaatctcaggcagattacactcttttcactagaggaacggaggagaccttcataaccttactcgtatacgtagatgacattgtaatcactggacccaacatcagtattttacatgatctgcaaacatcattacaccagaaattcaagctcaaagccttgggaaaactaaagtattttctcggttttgaggtggctcgttctcaagaaggactattcctttcccaaagaaaatatactcttcaattgcttgaagactccggttatttgagcagtaaacccagcaaaacaccaatggaccccaaagtgaaactcgataatgaaaacggagaagccttggacaacccctcgcattatcgacaacttgttgggaaacttttatacttaacactgtctcggccagatattacctttgccgtgaactctcttagccaattcatggcaaatcctcggacaacacatttacaggcagtgcatcatcttcttcaatatcttaagggtgtcctggacaaggactcctctactcgaagaactccacactccacctccgcggtttctcagattctgattgggcttcttgccccattacgagacgatctaccacaggcttttgcatcttcttaggagactgtctcatttcatggcgtacaaagaaacaaccactatctccaagagttcagccgaggctgaatatcgggccctagctgccactactagtgaagtgacttggctacaatatctcttacaagatttttaaattgctcaaccacactctgcctttatttactgcgataacaactcagccattcacattgccaacaaccctaccttccatgagagaactaaacatatagaactaaactgccacttcatcagagacaagatcaacaactcttctataaggctcatt

SEQ ID NO: 27124 - DNA, 1449 bp, Cannabis sativa
aaaatgatatttacctttttaaaattaattaaaaataaataaaataatatttatttatttatttatttatatacctgaagcaaatctcctacgttgaccacaatagctccacgaagaggcttaacatcaatccacacatcaccagacttaatttgcaacccacccatatgatcttgcaaaagcaacgtcagcaatcccgggtcagcatgagaaccaagtcccaccgttagatcaggttgcgggcagtacgggtagtaatgtcccaccatagtcctcgatcccaaacaactcaattccctgaaccttcccacacacaatcccaacccttccccaacaagttccaaaacaatctcacccaacttaacaatttcccggtcccacaccgccaccgcttccttacaaatctccggaacagtgtctaacgtcacagcgtcaagtctcacagtcatcgtgtcacgccagctggcagcttttgattggtacaagtcaacatttgacatgtaactaaacccggtcccacctcctctaccataatacttttctttagcttctaaaggctgttcgtgaaactctttcactaccttgatcgtacggtccagaatctctgatgagatcccgtggttgattatctgaaagaagccgtactctcttgctgaacggcccacttgctcgactatggcgctgcgccgatcggaatcgaagccggataagtcgattgtgggtatggattgtgtttgggtgtggttttgagtgggctttttcaggtctgataaagtttccgatgagtgaacgaagaagcttggaattgaggtgaggccggcgtcgactaagcctttgactccggcttttgactcgtcgaatttcttcagagcctctaatcggctatggtcttcgttgccgttatccatggccgctgaatttttatttaatttaatttatttatttttttacagattttgagactatttatattgttttggttggacttggagttacttacaagtaattagtatataaaattattatttgatacgtaagctttattttattattcaaaaatttaattaaggaaaaataaatttatggagtaattagatttttttttttctttatgttttaataatttaatttgattttagaaatatttctagagtgttcttcagttactgccaaaatagtttggcgagttatgataatgaccaatgaatttggtttttatggataaataattacattatgtatttttttttaaggtaaatagctgcgtaagtatttaaaattttaagtttgtcagcggcataatctcaatgtttatttttagcatcataagtaccaatatttgtaaaattataaattttcttcagttttgtcagtacagactccgttttaaatttattaaaggaacatttggaagtaactaatacaagatgtttctgtctagacccaatg

SEQ ID NO: 27125 - DNA, 3199 bp, Cannabis sativa
atttcattacctccaaccaaaggcgaccttaggtggcgtttgattggaaggaatgaaaacataagaataagaatggaaatggaaataagaataaaaatgtaatagaataaaatttaaaatgtgcataaaaaaaaaattgataaaaaaatgattaaattttttctcatcatacattggtccaatgatctttccttccatttcgaaatggaaaagtcattccattagaatgacattccaacactttaatattcaactaaacaaaggaatagaatgaagatgattttctttcctttccattccatttcattataacctccaaccaaacgccactttagttctcatgtttgaattgttgtaacatataagctatgctacatggtttttgataaaattgggcatgacacaagttatgacttcggtaaaagtatagaaaatctgctttagccgtttctctaggattattttcaccatgattgatcggtctatctttcatatctaaatttgttaattttcttgaacattagattttataatgatgtaaaatttgtttaaaataatgtatgtttactgttgtgatccttgatcacgtcagtcaagaacactcaatcaagaactcataaacaagaatgccttataataaacagaaatatatcaacaaagttaatcaactttaaaataataagaacttataacatgaattgaaagcaacaaaatgacaacatgcaagagagaggggattagagctgcttctgttttatcaaatcatgatttgaactgagctacaattaaacaattttgtacaaggagagagattgaacttaacagctaggaagctttgcttcaagaattacataaatcctcacatgaaacattggtgataaacacacaccaattctttcacaaccctcaaatctctctaaaaactcagctaaagaattaatgagattaattcactcttttatagcttatggttctgacccagatgatcagctcacaaggatttttgatctcacatctatcttaactaaaatagtacttgtcacttaatgtgtgtgatgatgactagttacttgtaattaaacacaacatttacatgtatgcatagtaattattttttttttcaaaaatatattgtgcaaaaaagtagaagaaaaattatactatttatttttacttttaccgaaataggactatgtggtaagacaatcaccctgagtaaacaatatcacataaaactaggaaataaaaaaaaagaataataaaaccaaaaactcgagttgtcatgaataatatattagcttttattaactttgaatcaacatatttacaacctgaattaaacaactaaaactatacaattgtggtgattagcaccattacataaaacctcacactgaggaaaccttgatcagatacacaagagaaacttagagctatatatagagagagacaagagatgaatctgagaggtccctggtttcttctaggtgttgattaattaccttcaaatgtgagttgaggagtcatccaagtcggattcgcatcaatcatttttatgtctacttcttccatctcgcaaatacttggttcctgtaacttttcaacgggaactaagttgaggtcgttgagttcgccttgcgacgccagtttggccaacgaatagtgttggaattttgttctcttgaaatttttcaattttgaaataatcagatttttccaagttttttttttttttttttttttttttaactttttccaaatatttgcccactctgattcccttcgcttggtattctcaaagtacttgatgcactatcaattgggaatcactaaggcaatgtactgccttcgcatttactactttgccattcttaagcctgctaaaagtgcttcatattcatcctcgttgtttcgaagctgggaattgaatttttaaggcataatgaaacttaaagttttatggtgagactacaggattatgcttgctcccgagctcttgttgtttgatgagccatcaacaaataatttcctgattttttggtttgagatttccaccatatctttgttagtatttattccttcaattaaaaaaatataacagtgcttgccctttgatggctgctcgtgggtgataggtaatgtcaaactgtcccaattctatttaccattttatcaatcgactcgaggggttaggttttgacaatacctttagctacaaatatttagttttagtcatcacaacaagtattatgactaaaaactcatttagtcatagcaaattgtgatttttgtgactaatacttttagctacatatattttagtcacgacataggatttattatttataattaatcacaattttcttacttttagccacaagttttgttgtaactaaaagtgaaatttttactacatagccacaagttttgagtaataattgaggttaaggacgacatcgaaatcaggatttaagtagctttatatgtgcttgttttgatatctatacgtacattcaccttgattgtaggttagatcctgagtttagcatcctaaattattcggtttttcttaaaagaaaaaaattgtgagaaatcctatacactttatcaaacctgatcatcgactcatatcgggtgtcataagtaaaactagtagtcaatatagtgacagatttattaatttatttatttattttgaagttgctagtcataaaacctgataaaagaaatacatgaaatgaagataaagttaagaaattaagaacatatataggaaatttagatcttaagtgaaagtagtgcatagtagaagaaagtttctagatatctccatgtgttgttatccaataaccaaaggattatttctaggaattgggattacaaagagatccccttttcttctcacagtcatgccaaaaacctcagtcatgtcaagattttcatgagttattccattaggaagtttccaatcaaaatggaacaataattgtgctaaatgaagctcaatatttgctaaggcaaatgatataccaggacatattcttctaccagcaccaaatggaatgagttcaaaattattccctttaaagtcaattgaactatcaataaatctttcagggtaaaacttctcagcttcactccaatactttggatcccttcctattgcccatgtatggacaagtactttagtttttgcagg

SEQ ID NO: 27126 - DNA, 2135 bp, Cannabis sativa
gttggcaatatatcatgacctttcatttatctgtttttgaaaatattttttgattgaggagttatttgttcatattcagttcagctaggctagataagttaattcttaatataaaccagcaatttaggagtgttcatggattggtttcgtctaaatttttatatttttcaaactaaactagtataattgttattcagaaaccaaaccaggctaattctcaaactacaccaaattaaatcaataagaacagtttggtttggtttaaaactacagtttaagcggaatttataattatttattttaagtaattatattatttatataagatttttaattttgtttttcaaaatatatatatttaacgtgataataataaataataaatgataaataactataaaaatagtttaaaaagttataattcaatcattttggtaagtcaatgttttaggtaattaatatgttaaattataatataatttttacatcacagattttacatcaaaagaagaaaaattttaataataagaagatgattgtatcaagtaaaaatgtgataataaattattaaattggactttttgaaagaaaataaattatttctcaaaaaaaaaaaaacattgtactaaaatagtccttataaaaaaaaatgtatttctttaataaatcatagaattttattaatagtaacaaaataatagtctgcaatttaattggaatatctctccccttagagacatgacgattagtcgtctaattctaaaatcatttgacaaaaaaattaaaataaaatcagatggaaaagattacaacatcacatttaatcttaagagcaattatattctgtttcatctaccactcagaagatacaacagtagaaactgctcgtagcttaggcactcaactattgtgtaaggtacgtaaatgtactaaattctccttcagttgaaaaactttattattctcagctactaacaacaatgtaattgtgagtcattgaagaacaaaaaagaaccaccaacgaaacaaaacaaaataaaaccatgtcacatagacaagactaaaaatactcaaaattatgttacacaaacaaaaccaaaacactaaaaatatgtcacagagacaagactaatcatagtaataaaaatcgaatgatagtagcaaaacacaactccacccaaaccgtacttaagtccaaaggcctacggatagccagagacaaaagtagcattcgatagctataaatttaagaatgaaaaactctaatttttcccttgaatttaatttatattattataatttatgaaaaaaagtaaaattattaaactaataatgtaaaatactataatttgtaaaaattttacttaatttactccatctaaccattagtttaaatttgtgatagtttgttagtttgtcaataaaaaaatgttataaagaatacttttacttaaaacaaaaaaaataatgagagaaaaaatgtactaaaatagcttgtattattaattaatttattcgtaataattagagggaattttctcatagtgtaactgagctatagagagagagagagagaagagagagaatggagaagaaggggaagagagaggttgtggtatcggctctccaattcgcttgtaccgatgacctcaccaccaacgtcgccaccgccgaaaggtactgctactactactactactactgcttaatctcaaactcataatttcttgttcaactataaagatctcacttgttcaattaacttttattttctgagttgatgaaaacttaatctcacctccatctgatcctttttttagtgattaattgtgctctgtaaagctcatttttccaatggaatgagttttcacttctgaaaatggaaaattgaagaaagagcatttcatttcatgttaaaaagttgggttttttaatgtgagttctctggagttaaatttatttccctcttcttacttttcaggcttgttagagctgctcatgcaaagggtgcaaacatcattctcatacaggtataaatttagtatatatatatatatgtaattttcataagcttattttgctcaataaataaaaaatttcatgtattctattattttgcattgtgtatttaagaa

SEQ ID NO: 27127 - DNA, 5759 bp, Cannabis sativa
ttaaatcaacatacttgtgagtaaatctaagttcctggtaaaataacttccaacataaacttggtcattacattcttgtgtgaccttaagtgtttatctatcaaatcataatagtgcttaactttggtgtgcaaatagtttgtatgtgtgattgatcaacttactgaacttactagtaattgcaataacacttcaagattaagaaatttggtcactaggaataacgtcaacatttcattaatcaaactaactcaggtctgtaaatttttttgaatactcatgtaactcttggctcccgtatactagggtaacacctagctcttctataccaatgtgtatgtgacagacatggctcttgtgtagcacgtttttttgtgaatgctcatgtatcatacatagctctcgtatactgtcttatttgcccctgagtgattaaagaaataccttcattgacgggttggcaatgtctgagaactcatccaatcatctaaagatttgtgggttggtagtgtttacctcactaaagaaataattatagctacctcaagaccaactctacaagctttattcagcacttgggagaatcatcaggtctgtgagttgcgattgattaataagaatgaagtaccaacaatctttactcaacgattttattcattagatattaaattcaattacatcatcattgtagatagattgaataaaaaagaaatagaatttgcaaatttgcattcttatccaagaagctaaattaatccccactacactgatgctctgttcgactagcaatgtaggggccataacttggcgatggacctcttgacctatagatgactttgttgcatctttttgattcgagaggcgatcaattcacttcaaaaaggtaaagtgaatctcactgtgaagtaaactatctaaggaacaatttctttattgatgatatcgtctcatatgctccccgttctagtaccctggtattgacactagattcaagtggcagtcatagtgggctccaacttatttatctcgagttctattgtgtgatgatataaggtccctccttctctcattgggagcctttagtattgctttcttggtcaatatttcagaagactcacaggacacatcttcactattgctcccctgttccttatcattgttagaaatagagagagaatcttcatcactacccctctctcctgagtcatcttgggaagtatggtgagattcttcctcaatgctctcctgctcaaggttgtcttgagaaatagtaggggattcatcatcattgtctccctgcttgagctcactttgggaaatagaagaggaatttgtttcagtagaagtattcgatgttaattctccttcactttcttggttaatgttagagactcaagaaatagataagtagtgtaattggttgcttctgtttgagtaactcttctgaccttcttaattgcttcttcaagcttgatgaaactgtcagttgtatctagaaactcttgaatggtgtgtactgatttgagttttaagtcattccacaatggactcgtaatagttagtccaatagtcattcccatgatcttggcatcttcactaagtatcttcgtctatgttgtcgcctctaagaatgattgcaagtaatcttttagaggctcctcttcttgcttcttgatgtagaccaaattgttaagcttgattagtctgttccttgatggggagaatcggtcatagaatgctttgcttaagtgtctcccaagaattgacaaatcttggggaaagcttgagatactactatggtgctacttttgagagcatggctggaaatattcaacaacgagaatcgtctcgaataccttggatgtcagtttatattttgaagttatgtatgtgagagagggggttttctttaccactgtttgggtgccacactgtatttctaaactttgagggatctccaatgccttggttcaatctaagagagatgaacatctctcccgttctaactcaaactcaatttgctttggagctccaatactctttaccaaagtagcaagagtatcaaattttgcccttcagcatcacttgtggttatatgcatatcagttgaccgcttttttctttggtgtcacttcacacgttctttagtgttccaagtcgaatagagatgttgatgaatctgggccttgtggttattgcttggtcatgtggccttgctagcaactatgaggatttatcctgtatgatgatagagttgtctctcgagcatttgctttgtgagtagctactcgtggtgctatattgactattcccttcaaaatagtcttcctcagagtgacatgtgtggagggaagtgaactgattggtcaatctcaatacttctccatgcacccatgggaagtattcacactactggtcattaagaccacgagcaaagtacctacaccaggcaccccgttcatcacggaaatattttcgcgtgtggagcagttctttgttcttcacactctaaatctcatactctttgctttggctgtagagcttctgagtccctctcccaaggttaactacatgtccttttccctttgtagggtcacgggtggtggcctagattcattatatctatgaagagaatcctgtggaggatattggtttccccccttgtttgaatttcttcgaaaaaagttgcagttgatcctattagctgcgtgtggtggacctgtaggtctattgtctcaagtctaagtcctttcagatgcttgcttatagctcgtttccctaattggtgacctctccacatcagagggagaacccatatatcgatgtttctgagtctcagtccttttggatgctcgctcagagtttgcttccttatggggaatctcagtgcctactgctcgctgagtagtggcacggctactaggagtggtagtgttgctttgcgttgtcatagatgattacttgcttaaacttataaattccttttgaaataaagtttctagcaaagaaatccaactgtaatcgagaactcaagttgtggctctcaatgaaagtaccaaaatattgacgttcaaaagtagccagcactagctcgctagattggcgagatgaataatgaatgtaagtaaatattttagagagtcacataaaatttatagtagttcactccccatgttgcgattgtaatggagatatgtctactttgagcttttatttctcacgagaattacaagaaaattgattaagtctgaaagctctaatttctagagagagatgttgtaaccttatgggtactttgtttaatgtgaaaaatgagctagagcagctctccttttatacggaaggaagtcctattaaaataataataaaatattttaaaaaatatggaaaaatacatttagactatttttgaccattgatgatggtataatggtgaaattgaccctggaggtcggtcgtcaatttttggagcttgagtcccttctacaggacctgttttcgataagttgtagcttaaatacgtaactcttttgaggacaaaattttgagttgataattttagaattgagattgaagtgtgagacataacttgatagagtattgaaataacttcaaaactaaagatgaatcacgttaatcagatcaatagtgagtgaattatggtcgttttactataggcttctttgatactagagctcaggttgacatcctaacgcctaatttgacatcaagcgtccaagttgacatatgacgccaacctggatgttgggtgagtgggaaatcatgttgaggatgtattttttatgcctaagtgatattttgacatcacttagccaatttctttgttctggttaagtcgtctaccatttttcagtgatgttggtgttttgcagaatcaggagacttaaaactacccaatttccaactaagtcactttgccaaaaatccaaaaaaaaatacgaagttgtgaatttgacttgtatgagttcatagatctcatttactatgaaaaactagatgaacacttgagaaagaatctgaatcagataagcaaaacccagcgcaccaggtcatccatcaacctcagcgctgggtgttttttctgtagttgtcgagatgtcattttgatacttctaaggttcttgaaattaaggacgaggtcttccaccccatttttgaccatgccaaagagaatgcttggagcagaatttgcatttgaatgatcgaaggcagcgcacaaggttgattgtcaaattgggcgctcagcccatcacaaggtcaacctgggccctgggctcagtttttcaccccttggaattcttgttttctccccgagtttacttgtatttttgttaattttgatgagggaaaaaatggccagaacactttttcaagaaattgtttggaatcagcgcaggttgacgaagtattaacctgggcgttgggtctagtttctggccaccaaatggttctatatgattcccgaaaacacttatatcttaatctttgaaaaaacagagaatatgcctagaataattctcaaaaaaactccttagaaataacctaaattcataaaatgtcaacttgggcgctgtgcctccattctagctttaaggttggtctgtttctccccaaaaatcaattgtttccttatttttgatgaagacaaagaaaattctcaggaaagttcttgagtatgatgcttggaactgcccaggttgacaatatgtcaaactgggcgctgagtgcctgtggcacctagtgctctgggtgttgaaaaaatgatagtactctgaatctgattaagatgcctcaaatatgttcatgacatgtctaattcatgtctcagtacaaattttgactcatttgtactaagacggtctcggaaatcaaagtcttagtttgattgtcaacctagccgctgggtgaaatcctaagcatccgagttgactttcggggtattgttttgtatattttcagctttcaggccttgaacttgaattctttgtgtcttcatgactcataatactaaaggatgtgacttggaaacaaattgcaggatcaaaatatctattccaaagcctcaaagtcaacctaagcacaaggctagggactctttcccaagttgactactatgacttgagttcattcactctgagacattttccttcttgccatatgtcaaacattgatgtccatgttaccaggattactttttgtgtaaatacattcttttaattttttattaagttcataaatatttatcagttttcccatatttattttctaattttttaatactctacacttggttcatatctcatgtttaaaaaatatatattttttaaattaacttttctgcttatatatcacttcttttctcaatcaatttctaaactctatatatcttactacttaatttttcttaattttatttctcaattctttcctcataatggagtattcttttgttaatgaattaaatagtaatacatgtagttggaacataaaaattagagtttgtaaaatatgaaagtctcttaatactaaaaaaagtggagaattgataagtctcgatatagtttttaatggtgagaagattattattatttttttcatattttttgctcaatgcgtctatcattaatcttaaagaaaaatctaatgcatgcaacaataagaaaaaaaatagtttttaaatttaagaacctattgagtgaaggttctttacaccatttgtaaaattttaaaattgtggc

SEQ ID NO: 27128 - DNA, 1383 bp, Cannabis sativa
tttttttttttttgctataaattgtagcaacaacacaacaaacacagacatattcaattgtaaggtatcaagtcatattcaaatataaggtatcaggttacattcgaaggcaatataaaacactaagattgaagtactgattttcaagatatgagagttttttttggttaaaaattacaatcacggcacaacacattactatgagaaccaaaataaaaacctaaaatcaaaatttcttatcatttttccttaataatatgttaactacgtaaagaatgtaatcaaattcaatagtttcttacctttgtctattttgacttcagattttattaattttcttcatcgccagtgggaacatgaacaataagatgaagaatgataaccacactaggagaaaagagagaaatcagagaagaagcaaagaaatcggagagaaatcgaaggagaaaaagaaagaatcgcacgatatagagaataggtgattttgaatattttgggtgtgaattttataaataaaaatatccttttataggtattctattttttccattttttaagttttttttttctttcagattttaagttttttcattaaatgtctatatttttcaaaatgcatttcagaaattctatattaataatgaaaaaaaaagcccattagaatttgtacgtgatatttggttcaaaataatattatgtcatcttatttactaaataataataaaaataataataataatagaaatgttaaaagacattatcggtgcatagtacttttttggtgttatactgctagtctgctattagattctatataacttaaggtaataatctttaggaattatatcactaattaattgtaaagcaccacctataaaaagtgttagcaccattaatgaccaatattactacaaaattttttacaaaattttatgaatcctttcaatttttttttcttataatcttctataataatttttctttgtaatttaaattatatttttaaaatactttctttttaaaattaaaaatttatttcaatcctaaaaataatatttattattttatttaataataaaatgattatattatacttttaattgaaatcttaactaaacattgaactttgtattaagttttacgagcatcgtttattctattgtaactttgtgttttatctctagaggccatcctcttgggatgtgatgttagtgctggactctagaacccgagtgtgagattgggttaaatttttatggagcttgaaggtaaaagaagtggaggttcaaaaattatttctgtatgctgttagacttttatttgggcttacattaaattttattggttttattaaaacttgggttgattggatagttctttgct

SEQ ID NO: 27129 - DNA, 1970 bp, Cannabis sativa
gacattgttaggagattattttccgtcattgacagagcttgtagtagatggctgtgaggatctaataccattattactcccaagagctcaactcatgcaagcccctttgataactttgaagaagattagaattgacaattgttcaaaattgaagcacttagacgaggcggcgtttcagcacctcacctccctcgaaaagttacaaatttattactgtcgtaacctccgatgcttgccaaaagaactacctacttctctgtctgaactacacatttcagattgtccattgctaacaccacgagtccagagggagacaggggaggactggccaataattgcccacatccccaatacaattgtggatgacaagaaaatataggtattgctcttttctcttctcagtcctacttgtttgaaagctttattcaataatgaatcaaagtcttcaattccttttctgttttaggttgtgttgtgttgtgtcttcaataatgttggcataagaaaataggtttgtgactgtggtctcttctcttgtttaggaaaatgtgttttggtatattatagttgaagctagtacaatgaatatgtaaagcttatgataatatgttttcttattagctatttttctttccttttaaatttctgattctcagttattggcagtgttgtgatcataataacgcaagtccttaactaaggcagggtgatcttctagctccaacaattttctgagctgatgaaaactgaatattactttcaccattcgatctaatggtttgatctctgctctactatgatataaatgagtaccggttgcatttgaaaccggcttctgtcttaaccttggaagtctgagatgttcacatcgacagtattccgaaaaatatcttgaggatttctcgtttttggatttaagtagagagtgaaaatatctagcgtaagaaactttacactgatgttgtagaagtagaagagagtttctttttatgtcctatattgtaaagaatgtttctttgtgctgcctttatggttttcctccgccacaagtgtgggtattaattttcataacgggggaggtcggtctaagacaaacgatctctttctctttttcaaaaaggacagtgttctgaaaaatattcgacctccaatcacttgcttggctgttggtgtgggatgcaaaagtttgtggaaaatcaggaatagttgaataatgtacattttatgattttatctactaattaaatataaactctattaaataataaattaaggctattttttcaaaatacaattgtctggtgttgtgtggtctaaatctctttcctttgcgaggttaatttcgacatctttttcacaagcttactttgaagaattcactttatgacactgttgttaatgtttttgtactttttcaattttctcagattagtggagagaacaaacaagcaaccattgatttgctacctttgtttgtctctctttttaatataaatcttggtctccattttctcttattcttacctttcttttcaagattctctccatcaatttttattgttttgcaatattaatctttaaagagtcttctgcattttatgactcagtcttgtttctaaccattgctacctttgtgtgttgtatcaaagatttctaaactttgagctgttacaaaatctggtacaatagttgttaattaagacagctgggttaactaattggtggtttatttatataattaaatagtgttgactatcaaatttatttatattaactaaaatgatcagatctcaaagtttgatctcttctatttatttatataatataatcaaagacgtgaaggcacatgtgtaattaacatataattagttattatcaaacaaactcctaataatcaaaactcatatatatatgcttttgaattattactttgtgttcattaatcaattaatcttttctgtaatcctttt

SEQ ID NO: 27130 - DNA, 2026 bp, Cannabis sativa
tatcaagatgaacatcttttgtagagaatagaagtggagcaagcaaggtcatgcagtccatatacaattctttttcaatcatctcccccaaggtcttctccatcaagaaatcaacctttaaaaagttaatttgatggagaaccctgtcaatagtgatctctttcactaccttgcaatgcggaaggtggaccaaagattgagaaccttcaggctttttactgtttgtcaaaagtgataacgaaatactgaattgttcaagggccttttctttgtgaccttctaaaatagacaatcgcccacttaaccaaaaatatcgaacccataagaattttttatattttgagggcaaattgtctaattgtaaattaccaacaactgatgttccatcatcacattgggatcctatatatattgagctatttccgtcacccaagtcacaattcatgtaattaggatgatccaatgctacagattcaataatcttgcaaagatggtaagatgtctctaacagaaactcggacactttagacgtatcagaagaagaagatccaatgtcataataaagttcagccagaaaaagattacattcaggggtcctctcttttccccaatgtcttatcatcttctccaaatccaaaaatttgataaatgtatcttgatacacgagtcttttacttgctatatcttctaaaagtaagtgagccatatgataagcaccacaattgtttgaggtctttttaagaaattcggtaacatcactatattcagtatcacatggtttaactgggtcactaaaagaaaaagagctattagcagaattatcagtatctgttttacctagttcaccagaaatataaggttctagatattgaattacaaccttagcttggtccttatcattagtgaaatcaagatcctccttccctggcttccggttcctaagtctttcaagacgagtgctccgcctttcctgcggttgttcctctagaacatttgtgtccttttctttaaccagacctactgtttcagaggcagtatcacaaggtaatgtagctgcagttattgggttaagtgtttttctttcctcccacccagaagcattttctgaagcagaacgtaggtgaattattagtttgacatccccagatctgtaagatttctcaccacccttcccaagatgactacaattcagaggaagtaagacatccaagagtgcatcagcaagacctacccaggaatcttctgccaggtgtaattctaaattgtgattcagttttttacatgcaattccctcatcaagattctcatcagctgcttttctcttatcaaggaatttaagccggacatgtttgggttccaacttgtctatacctctaggagcaaaaggaactggttctgaatcttcaatggtttgcttgacatgcaaagcacgtgaatgtgatggccagtgcctcaaaattagctctgtgacagaaagacatgcaacctcatcaccaatggcaataaggacttccagtaatttctccatgcagttccctgaaagaacagattaagaaaaaaggtgggatatttattttccacaaaaaaacaaaagaatgaaagttagaaactgaataaagaaatatgatcaccaaatacttttcaaataattagaaaaaaacatatatcctcacaattattagggctacataagagcccttgctcgaatgcccaacgggaaatactgagcaagcccattgagcacgataatgttcctaactgattccagacaacagaatctttggtatcaatctctacagcttgaagataacagtgtagtgcattctcataatgtaatgatccttgttgaaggaaaacattggcaagattcttcaatgccaaaaatctgtagtaaccaagataagtgatcagatataaatttacattttttttacataagctggtgccaagcatgttttattgaagattataaccaagtagtagaatcaaagaaatatataataagaaaatgatagagccaatgtag

SEQ ID NO: 27131 - DNA, 3464 bp, Cannabis sativa
tatatttaattattttatttaatattttatatattattttattatctatgttagattattaggttttaaattatgttttttcattttttttttaatgaaatcagtctaaaagtggctaaaataaattggattagatcggatagaaaaattcaatatccaataaataattgaattggatcggatgagttcaaattcattcaatgtaatccaataaacacccctaattttttagaagaaaaaaataacaacaaccaaattagaaacgtgcgatcaatagctttattattattatttttcttatatgtatatctaattgaaagagtgtttctgtaaactgtgaactagtgtgaaccagcacaccaaaagtcgaataataaacttaattaaggaacagtataacaaaaaacatgattgaataaactaacaaaaattatatataacattatcccaataacatgtgtggacgatacagaataaaagtataaaacacttggaatacatggtgggcagaatgaaaagctatcatctcaattagtttggagtccggtacaaaagaaattacataaattgattttttttaagaaagaattaatatttttattttgaataaaagtgattttggaataatactacaaattagattttatagtcattacacaaaatgttatttggtatatagacaagattgatcatattagttacacttttggcgaacgcccacttagctacattatgaggcgtaaaattacacggtctaaaaattaaaaaaaaaaaaaaacaacttaacaaaatattcgagagatgtttacaatgaattacatagctaccaatgatccaataggagcaattttctttcagcacattgataattgtctaaaagtcactctcaatcaacacaaaagtatgcttcttagagattgcttccaaggctaacagaaattaatatttttcttagtatatgattacaaaaattaatttattttttattttttcaaaatatagtattttctctcaataaaataaatttaacatatttatatatataaataaaaatacaccaaaataggagtttcgggtgtgggttttgttcgctccacttttcacatgcctatgattatgaacttatgatccaaagagagaatgttacaactccaacttgtatagcttatattgtatactaggtaattgatatatctagctagtacgtgcttcgcacgtgtttagggtgtttgttatcaaaaaaatttagacaatatcaaattatgcgaatactcacttagaatagggagtactctaaaaatataatataaaatatatgcaaataatagacaaaaacatagaaaaatatagtgattcaacaggacttggcctgcctaatctactactgaaagagatctcttactctgtttctttattatgatcagcctagccccctttgaatggagggggtttacctatttatagagagtaggtgaaggctacaatagcttggtcagaataaaatcattacaaataataataggcctattaattgcattgattacatcgattataaaatacatttggcatccgctttaatggcacttgaatgcttgaccgtctattttcattgattggtgtttgtttgcacctcttatgttgatactgcgactttattaaacacaatgaggcctctttcaataccacgaggtacctcttttacctaatattatgaggtcccttttgataccgcgagttctctagtgtagcccttctcgcagggaggggaaatttatcccattaacacatgcccctatgtaacacccatacttgaaaactactgggatttagactttaatcatataaaactaattataatcatatagagatatacatataaagttttacaagtcgggatcccatattaaaaccacctttgaaaaatacaaaatatacatataaatttttttacatgtcatatagtgacaacaaaagataaacccaaaatacattaagaccgaaaccctccaggttgtattgttgcaatatgcacaatcattgtctagcctcaagctcactgttcctccgctttagcctttcctttacctacacatggtagcacactgatgagtcaacaaactcactaagatacacataaaatatataatgtaatattgacttgtatctaggccctcttgtgcctgcttacaaggctcaacaaatggtcaagaacattcttaacagaagtacgacctctataccacatgcactgaagtaccacctccgtactagtgttggtagggtcatattgtactttcaggtgctactgagtgttgtaccacatgcactctgtactcacttgtacttgtgttagtagggccatattatactttcaggtgctactgagtgttgtattacatgcactccgaactcacttgtactcgtgttggtaacaccgtaacatacccttaagcactgtacactataccaatacactcagtattataattagtctagtgttggtagtgtaaaataatataattaacatgcattcacatacacatacaatatatatactttatgttaatcttaccttattttctgattcaagcgtgatggtcgacttgaatagaaaattcacgagttgaacggatgtcctatgtcacatttacataaacgggtaaattacttggacaacttttttcgaaaccctaaacttataacaaagggtagccttaaagacaaacaacatagcagtgccctaaatatcaggggaaacaccaaactaggctctaaaaataacacaaactggataaaaatgggcttttaggagtctttcctgtgaaccggtcgaccggttggcaccaagaaaccccaaaaattctacaacttagccaaaacttccttaaatccaatcatattttccaaaacacatgtgtaaacattctagagcggttttcacacaataacagcaagagaatcacactaaaacacatgccattgttgagtcaagttttagattcttagaattcaaactagctcaacctcaaaattaaccaacaacaatagcacaaataaacctataaattgaaacctacaaaaaactaccctaaccaaaacccaaataatcataaccaaaattctcaagttacaatcctaaatacatcaaaaccttaataatatcatgaatagagttcaaggagcttaccttcacttggtttacttcaaaacctagctgaaattccaaaggaatatggtgctaaacactaattcccctcaattcctgggctgattcgaaagaagaagaagaaaaagggtagatactctaggttttttgcctttcttcttaattttctaactccaattaaaattatgatactattattaaaattatactttacttaaaaaaagaaaagggtcagctgccaccctaaataaatgacacccataccataaagtttaaaaagaccaaactacccttattc

SEQ ID NO: 27132 - DNA, 2944 bp, Cannabis sativa
  modified_base (2463)..(2481): a, c, t, g, unknown or other
  modified_base (2885)..(2913): a, c, t, g, unknown or other
ggattggattgatttatgcacaccatttatataatatatatgtgtgtttgattttctaagttaaaagctaatcatgtatataatatacaccatgattatagaccttgctatttgtattggaaactaccaaaaaataaagggctaagatgcaaaatgaccctaaatttagaaattaagatagtaaatgtccctttttgtaaacatttagcaaaatagtcatttggataaaaatttgatgataaaattacaattataactttggatatttaaccctagctttctaccttcttttcattctctcgtgtcaagaccatcttgcctcctacttagtaaatgtctcttgtttttatttttttgaattaaataagctataaattatcaggttgagtaaaattttaagggttacattatgcttttttttttttttttatcttttttaagttgcattgaaatgatcttaatttccaacgaatttttatattacagtatcttcatattcaagtatattactttaatcgtgtggtacattatttttatcttgtttttgggaacatatcacttgttctcttgcatgtagcttacattgataaggtgctagactgtttctcaatgaacaacaccaaaggtgcagttatgccttctagacatggtgtgcgactatgtaaggaacagtgtcccattgatccccaaaagatagaagatatgagaagatttccttatgcttcaactgttggaagtctaatgtatgctatgctatgcactagaccaaacatttattatgtagcaagaattgtgagcaggtctcagtcaaacccaggaaaggaatattggacaacagttaagcatattctaaaatacttaaagaggacaaaggataatgtgttagtctacaagagtggtgctttaaatcctctaggctataccaacttagatttccaagcttttcttgatgacaggaagtctacacctcggatgatattcactcttgcgggtggagcagttgattggaaaatgtcaagcaattcacaatatctgactctaccatggaggtcaaatacatagttgtcgttgaggctgctaaagaattagtctggctaagaatgttcttcatagaacttggtgttgttctaggaatggaaaaaacactagtgttacttagtgacaacactggtgctataaccaacattaaagagcctcgaagccacaagaggagtaaacacattgagaggaacactactacaaaagtggcttttttcaacgatttataactgtcttatatatcatttcccaacggttcctaaaaccgttggctatgtgggcgtcataaaaatgtaagactttaaaagacgatttataactgttggaaaaagtcactttaaatgacggtttacaaatgttagaaaaaattactttaaatgactatttatagctgttggtaaaaatattgtgaagattaaattaaattacttttttatatatatttttaataaatatatatatatataataatattaattttcatcaaaaaaactaaataacatttattaaaataaataacatttattaaaaagtaaataaaattaacatattttaatattttacaaaagatacaattcagaaaaaaaaaattacaacaaattcaaaacaaataaatattaaatatgaacattaaaactaagtgaaattgaataaaaaaatttaaagtcaatttgtagggtcggcgatggccttcaagcaaaaaacgagcctccccttgacggtgataacctttctccggccatccaagccaaaaacgagcctcgtctctttctcttcccaccccctccagatctctctctccttagttctctacacggcgacgacctctggttctatgctcgacggcgacctttggttctctgcacggcagcgagccttgcctctctagcccaaacgaaagccaaaaaccttaaccccaaccttctaaataatgtaattaaaaaagatagcttaagattccaataagctgagcaaaaaactactgaagaaaaaattacagagatctaattgggttggggttagactcgtgctcagaatcgatctctccttcttcctcagattgatctccaaacaaattctgcaacatctcgtgcctcttctcctcccccatctccctattcttgagtaatcgatggcttccttgtaatctgccggagagtctcggttgttcggagtagtggtgcgggtctgattggagctcctctcactcaaaatttctccttggcggcaagttatttaggttagaaagtatatgagaaatgacgaaaagattgataaatgaaaagagagagggaggcggtaggtagtttagggttagaaaatgaaatgtgaataagatggtgagagaaagagatttgtaaggttttttttattttatataataataaaatatacaagtaagagagaataataataataataatnnnnnnnnnnnnnnnnnnnataataataataataactctttacattttaaaaagaatctttcccaacatttaataactgttgggaatactaactattcccaatagtttataactgtgggaaatacttagtattcccaacagttgggattcattctttttttacaaaaaaattcatttagtattgcccacggttctccaccgttggcattgatttttccagcggtttttttgcttcaattctaaaccgttgggaaaaacttccacttactttttccaatagttttcatcattgcccctcttataaaccgttgggaaaagctcattttgtagtagcggaaataccacaccatcaaagaatatatggcaagaggaaatgtacaggtaaaaaggttgatactgaagattgttggaaattattttacnnnnnnnnnnnnnnnnnnnnnnnnnnnnnttattaacatcctaaataagaactttctaaa

SEQ ID NO: 27133 - DNA, 2255 bp, Cannabis sativa
tctcacacacacacacacacattcgaacaacgcacccaccttgtcttcctcgtctctttgctctctcgtttgaacgacgagctacccacgaccattgctacctcctctttcagcaagacccaaaggccgaccacaaaccgcctcctctcgctccgcctcctctctccatgactacagtgccaccacctcgcttccccactcttgtcgaagacccacactgccgccaccgtctcctcagacccacattgaactcagattttaaagagatctctcacacaatggtacacttcttctatatccgtctcgagcttgctctcatcttctccttttattttttttttcgcgtaggtggtggcagcagaggtggacgacggtggtcagaggaacttgagatttgattttttcataagtttggattgtgtttgtgttatcagagattgtttatttatgtttaaaatatcagattaatattgtattttgagtttgtagattttttgtgattatattttatattgttgtttgtagattgtttggtatttcacatctggtcgcagtggttttgtctggccactttcaaccatggtccaagctactattttgtttgtaatctgaacatcaacaaccaaagattcgttgtgcggatagataacatggtcagaatcttcttcactgaaggatatgactggttctccaatgtgaggttgcttaggctttctttctcctatggccaaaacaacatctttctattcatactataagctttgggcatatttttctctagctttgctcgagtctctaacaatgtggaggcctctaatgataacttgaagatgcccgtctactggtggaggcatcaactgattttgtgtgttatctggttgggcgaccttttgttcctagtcggtcttgacatatttctacaagtgcgggttatttttactaataaggaactctatttcccacttcaaatattacactcgttagtatcatgatcgtagtttgcatgaaagcgataaaacttggtggtgtccctcttgctcatgtttttcttcatgggaggatattttttgtatgatattatggaccggatcattgtaaagacctctgttaggatggtaaaagtagtgaatttaaaggcattctcccgagggtgctgtttggagtttctactgaatctgtttttctttctattaccttgtcggttgccattatttgaccttttaccaccttggctggagctacttgatttttgtgaattctagtcttgctggatgaaggcactggtgtgttgttgattctttttctatccaactctgtccacacgccaaactttttcttcaagctttataaatccgcctgctcgattcaagaactctgccattgaccctacactaagtatttttatatctttccacaattctcctagaggctcaatacctcttaggattgcggccaaccaaccttctttgattaatcctttcacttttgtatctccagccataaatctgctgatgtaagctctcaagggttcccctggtatttgttgcacttcgactaggtcttctaagtgagatgggagctgccaagaagaggagaattttgcgtgaaactttgaaatgaaagaattccacgaattatactttcatagagcttgaagtaccactgctgggcggcctttgccaaggtttctggaaagattctgcacagtacatcgcctctcattgcttccaagtctatttgcattttcaaaatattttatgtgcgacaaatgatcttctttacccgtgtacatttttcatgttggcattttgaaaatgggaagtaggtcgagagcattgactttttcatgagaatggtgaacctttggtccggtcaagttctagatttatgagttttggtccggtcaggcgttgaacgaggctcttaagttgatctatttctgcttgcatcaatagatcaacttgacttgcatattgaccgacctgtgtcacatgaggatcgcttagaacttggttgggcacctagtaatctgtattatttagcttaacgataggaggaatgtcctgtccgtctaatcctcttctgtgattcaaatcattcctgagatcgtgaacggtgcccaatcagtcaaagactgattcaccaggaggccttcgtgcctggctattgtgagcaaagggttggcccagtattttcgtctgagaacagatgttaggctgatcattccctcctaagtaacaggttggcaaaacttg

SEQ ID NO: 27134 - DNA, 1431 bp, Cannabis sativa
cccgcggttacccatccccgcggtataaatttccatctctagttataatttcctatttatagataaaaaggtcaccacatcagcaactttaattaaactcaagtgaccaatacaaaaaggacaactcagtctatccttaaaacaatttgaataaaacttaactaaaaaacttaaacctcccatgtaagccctctctttctattgtaaacaaatctggtcatggacttatcataaattaatatgatgaataaccttagcttattcggagccaaaagaagaaaaaaaatatgatgatagagaaatgggataacttttttttataagaaatggaatagctttgatctgtaaaaatttgtagctcttaaagcagttgtaatgaaattaccatatttggagctttttttttaaaaggaatgggaactttattaataaaatagattcaactattacaatatatagaagatcggttggaaaatcatccatactgaaattgcgatctagataaacaatacaatgaataattttatttatagaacgtttaacaaaagatattttgacgaaatttaaagaagatagaagaaacttacaatcttgaaccacttgaccatatttggagttagatgactcaaaatttacataaaatatagcattagaaatgttcatgtctcaagatgaatgtggatgcaacagttaacactgtagcttgtcgtattggtctgggagctgtaatcagatatgagatcggtcgggttcttgctacttgaatggaagctatggctttatttcatagtttactttgggcttctcagttgtagctacctctcttataaatgaaaattaatgctattcgcatttccaaagcaataaatcaccatggatcattgttatctatttttacaaatattattgtagaaattgttggaattttatcattgttccctagagttggtatctctcatattaagaggggtgccaacaaaactgcacttggcttggaaaaacatgttagggttggataaagattgtgtctagttggaggatattttctctcctattttatctcttattgtaagggaaccattttactttataatatcaaatattatttttaaaaataaataaaaaaataaaataaaggcctctatttatatatatggttggtagctagaaatctgtattttttttgtagtgatttgttaattaattaccaaggctaataataatataataatatataaatacacaaaacttaagagaaatgctatatacatagggcaccaaaagtgtttagaattgctggcatcatgatgcctaatagcaatactccaaactttattaaaaacgtcatctccatcatcacagtgcctaatagcaatgctctaaacttaaaaacatacacacacacacacaaaacaaacaaggtggtttaga

SEQ ID NO: 27135 - DNA, 1140 bp, Cannabis sativa
taaatttgtacaaattataaaggggtataaattttgatataggttgtattattagggtcaaaaattgaaatttcccttggggtattccctgtttggttgtattattatttttttttttttgtaaattttttgattgtaattagttcagtttgattgataaaactttaacttgaataagtattgggccaatggtcctctctcatattttaacccaataggaccaaattttgggaggagttgactagtttgaaattgaatgaatcattttacattttatgcaccctaatgtttaaaaaattacataatacaccataagtgattacaaatttttatagtttttaagacttatagaaaacattttggtttgaatttattggttattttgaagaaaaaaaatacatttactctttcattgacatttcaagatttttcgaactcacatgaatttttatataaaattaaaaaataaataataaaaaaaatgtcttagtgaattttatctcttagataaggtggatacaacaacacaaggttttgtagaaatggaggtcgtatggaatgtcataaaagaattgaatgcagtgagtatttttctaaagagtccattaagagaacaagaaaaatataaaaagattacattctgtatggttttcgatatttttgtttttctttatctacaatgaaattaattaattacaaatatgctatacttatttttcaaaatattattgtaagcactatacatttgtaaatttttttttaccaatctgtaataattgcttacaatattgtaaatgtagtttacaaaagtgagctatttatatatttttgtaaataaaacttgttttaatcgttaatgcatttcaaaataaataaacaaaatccatattaaaagatacataattacacaagtataatttgaaatgaatttaagactcgattcatacctgggaaggagaacattcaaccagttgggtctgcaatgggctttgtacagagcataattagccggcccaagaataaaatagcgtggtataaaaagggaaaggagaaagtacaaaatgaaattttagaaaagtcgccgttgccggggatcgaacccgggtcacccgcgtgacaggcgggaatacttaccactat

SEQ ID NO: 27136 - DNA, 2166 bp, Cannabis sativa
ttttttattttttttctaaaaattttctataattttttttttgaaaaagagtttttttttttcgaaactcatattttaaagcccataaaaatgataattctccaaaaaaaaaatattattggactcttacttatatgtttatatatagtatttttgaaaattattaaaaaatatttgtatgtttggtagactctaggtgcaaatttaactcgctttaacctaaactcgaccctgataataattaagtgatttaaattttaccattgaagccaaagaaagcatgtgtggctgaaccaacttcttgttcaactgtgaaatggtaatctaatgacatttcttgcatccttgtcaacaagcattcatcagaattcactgcaaaaaaataataaaataaaattaaattaattgataattatttataatataattgaacatagctcacttattaaaaataaaatatatatataaagcatgggaaatggaccccacacccatgagaatactggtgagttagtgacgtggcaagttttgattagttgatatagccaataatactaataataggttaaaattagaaaactcccaactttggaaaagtttggatgcccttttgttttttgtcctcacgtgacactaatcagaacgtgccacgtcatctctagcacgacactccaagtgtcggtagctgaggtgtgagggtccaccataaaagcttactgtgcaaccccaactgcttttacttctttaatattattattattattattaaaaaaataaaaacaggtaaaattgaaaccatgcacgtggatggcgcaggaacaggaaaagggaaaagccaaaacgaacctcgacggagttgaaatgacaaaactacccctattattattttcagtgttaaaaaagaattgagtttgaccgttttgtccgtacaacccggactcggtcacaaactcactgcttacgttctttctgtcgcgaaatgacaaacctacccccggaattcttgcactattactgtgccccctttgatatgacacgtcaccatcacttcaacccaaaaactattaaggttaggacagttacgtcatttcagatgtcgtataattaaaaatagctactacaaacaaggacacttgtgtcaaaactattaataacattagaaaaaaaaggctaacaattaataatcccataataattaattacaaaaacataaaattaaaaacgctttaccctactaaattacattaattatttcaatatataactgataaattaaagaacattgctacttattgccacataatttaatttaataaaaaatattactaatcaatcttaaaatgcttcttactggtacgatattttagcaattttcaaaattaaaaaaaaaaatgaatgtgggcccaaattgagcgcagcccaacccgtgattgatgggttttactcttaagtgggcccccaatttgtttttcttcatgcccaaaaaaagaaaaaaagaaaaaaagaacaacttagataagctcagctggatttaattaaagagaccaccgacactcaataaaatatttaaagcagtaaaaaaggaaaataactgtcataaaaaaaaaaagggtaaataaaaaattaccaaatctccatcgaccttggacgagagcaatgtcgggatttctagtcaagtaaggaatagcacgtcggagataatccggttccggtcgaaaatcagcatcaaaaatggctacaaattcacagtgtttaacatagcttcttttaagaccttcttttaaagcaccagctttataaccacctcttgtttctctgatttggtacctaatatttatgcctttactagcccatctttgacactcagtttccaccatttgcttcaaaaaattacccaaaaaaaaaagtcaagtcgttttgttctaaagttgtcgtttttatttatgggttgtattgtcaaatatgtcaaaaatggtaaaaatccaaactttaacaccgtgtttggtattaccttaattactgggtcagttgaatcgtcgaggacttggatcacgagacgatcggacggccatgaaagcccacatgcagctccaatggagactttgtaaacctgaaaaatgaaataaaaatccaaacttttttaggccaaaatgaaataaagaaaga

SEQ ID NO: 27137 - DNA, 1562 bp, Cannabis sativa
  modified_base (27)..(63): a, c, t, g, unknown or other
cattttagaagttcatatttagggtgnnnnnnnnnnnnnnnnnnnnnnnnnnnnnnnnnnnnntaaaataatttccaacagtctggaacaaaggcccgcaaaaagttctaggggagagggcaactcgataacattcatggaggaagatgtgtggggagtgcacttccctcacaatgacccattggtcatcgtgatccagattgccaacacaagggtacatcagacattggtggacaatggaagctccgtggatatcctctacttggcgaccctcaagaagatgggtctgagtctgaaggacttgaaaccatgtgcaacacccatttatggttttatcagagactcgatccaaccgctggaacgatagagttggcactaactgttggagaaagcccccaaacacgccacggtgatggcaacatttttggtggtggactgtctggatacgttcaacgcagtgattggacgaccctccctcaacaattgaaggcagtttcctcagtttttcatctggttttgaagtttttgacgcctaggggtgtcaccacactcaaagggaagcagaaagaggtcggggagtgctacaacatctcgctgcgccttgctacaaaaaccacgaacccagcaacaaaggcagttctggacggttcaaacgagggaagagatgcgaaggtagtgggaaagtaggaaaaggccagccataagaagcattatgtatcctttttagcatgggtgacaagaagctccactagtataacttctcattttccttatttctatttctcttgtatgcatgtaacagaaaatctcttatatgaatgaatgaatattacatcaaattggtatttcgaaagttgttaattcctttcccttagaaataagcaggtaactcaagtatacagtcccatgaatggcactgtacacttggggggaaaggagatgagtaaaaagtgtatatccctaaatcatcaaggactggctacccttgatcgatgacaggaaacacgctcctttgcgcaaaacacaactaagccaaaagaggtcctcacggacactcatggcataatgccaaaatgagagggacgcctctcaagagtaagcaaacattctttaatcaaaagggcggtgcagttaagtgccataagctccctcccatccaagtaaaatgatggatttataataagagggaggctgctcaaagtgccaaaactcctcgaaagtaaaatccactgaccacagtgatgcatggccaacaagcgatcccaagagatatcggccaatatcacaaaaaagagaacataaagcaaatgtttcattcaacaaagcaaggaaaaccactcggccaaggggtccgaactgcttgaccaagattgagtcttgatgtcatgcatacatgacgtaaaaataggagttttatattcatccataaacaaaaaaataacaaagttcttgaagtctttgcagatatggtcacaagaaggaaagcctactggttccaactgctaaagggacttgcgtcgcgtcgacggttgcctcagcatgttgcgaccgcattgccacac

SEQ ID NO: 27138 - DNA, 5651 bp, Cannabis sativa
atagtactgtactacttgacagtatcacatcggtacagctagagtatgaccagtgtgccgagtataggctgatattatggttaatagtactgtcgtacgaacattgtaaacgcagtaccgtgtgggtcacgaggatagggttatgattgggggtatgggcgtctgatcataatccaggttattgctatgttattgtttatgcttatcttattgagtctgtcgactgacaatgctatttccatgtgtaggtaagggcaaggctaaagttgaggagccgtgaggccttgagcgtacgatctttgggacatcagggcttttgttgttttgtcgctaggcgaaaaatattttatatatgagtattaaacttttgaaaatgtattttgtaaacgggatcccggaattttataaatgtttactttatgttttgatgaatcagagaagttctattgctcacaaacaaagatttttacaaactaattacaccttttaaaggccaagaataactatacaagtatcagttatcaatattgctcttatttacaatcatttacagcttgtgaaaccagtctttattctcttcctttactcgttttggaaaacttagagaaatgtgctgcttgactgaatgattgagttgctggatcaaaaggtctgaatgtacctaactttaatacaagattttagcatttcgggctctccaaatcatgtacaccagacttgagatgtacgcagcaaaggtaagcttccgaaacttgctcatttttgctcttcctatccacctgagtaatcgagggagatcagtagcagtagcatgccaattcagccatgctttcactactaacaaacaccctgctgcaactgtacagtccaaaaataaatgggaacatgtttttatatcctgacaacaaaggacacaacacgtttcttcaatgatccccatccgtgctaatctgtcttttgtttttaatctctcctggattgcgatccatgtaatgaaactgtgtttgggagtgtttaatctcccccaaacctgttggctccagctcactttctcttggttcggcctcaacaattgataacctttagcaacattataaggtataagagtagatacctggccagcacaagtttctttgaacatatctttcagcagaacaagtcttctccaataccagctcccttaggtagggggcttgtattgccaccaattttcatctcggatatagacccaatggatccatttcatcgaaagactatcttctttgtttgagatggcccaaatgtacttccccatggcttctagattccattcatggactcttttgaacccaagtcctccacaggttttagagtagcatagtttctcccaagctatcaaaccagggcccatagttttatcctgacctgtccataggaaattcctacatatagcttcaatatcatggacaattttctgaggcaagatcattacctgagaccaatatgcatgtatggataagagtactgagtttatcaagacaactcaggctgcaaagacaagtttctcgatctccaagttcggatccttgctgtcattttctctacaagtgcagagcattcgttctttgagatctttttggcataaataggtactcccaagtagtggaaaggcatctgtttttgactgaagcctgacgcatcaagaattcttgttacttcagagttagccatattgcttcaatatatggctgatttttggggattaggctgaagtcccgatgtctggctaaagagctttagaccttgcagaagacaatacacactcttgaaatcccctttattgaagacgaggacatcatctgcaaaagcaagatgatttattttgagctccgagcatctctcatggaaattaaaatcctcttttttgccaaaaactttcaaaattctagaaaggtactccattccaatgacaaagaggagaggagacatgggatcaccttgcctcaagcccctcctagattcgaagaagccatgtactgagccattgaacactatggaaaatcttggggttctcacacaattcataatcaaattaatgaaagactgtggaaattttagtgccttcaacatctcttccacaaaatcccactttatggtatcataggctttttttaaatccagcttgatcaagcaattagcctttttagtcttcctacaatactgcttcaccaaatcctgacaaattattatgttgtggccaatgaatttcccttggatgaaccctccttggttttgagaaatcaaactaggaagaataagtttcattctagagcacaaaagctttgttgcaacattgtaaattacattgcaacaagcaattggcctaaaatccttagcagaagaagggcatttgactttaggtaccattgtcagtatagtagaattgatctccttgaggatcttccctgattcaaggaaagaagtaactgctttgtaaacatcatctcccacaaggtcccagttgtcttggaaaaagaaactagaatagccgtctgacccaggagctttatcaccaggtatctcaaataatgccttcttgacttcttccttagttaacttgttgactagtaaagctgcttgtgtggaatctagcactggtccttcaaggatcaccctcttagaaattcttgtcctattagtcatttgagacccaagtaaagacttgtaataggtgatgaaaacctcagtgatttgattaggctcagtaacacacaccccatcttctctaacaatagataagatttggttttgcctctgcctctgcttgatgcttgcatgaaagagagttgagttgttgtcccctttttgaatccaagccgccttggctttctgctggagaaaagagaagtaattcttaaaagcagcattatacgtctctcgagcatttaactctggttcatgtaaatcaacattcaaagggtcatgttggagcttatcttgcaattcattgagaccagcttttgcttgttcaaacgaggcctgaacatcggagaacccttctctgttgatctctttaaatgtagcctttaactcctttaacttgcttatcaattggtacatcatggtccctctcttttccttgtgccaaaccttcgaaaccttattaaaataattaggatgagaagaccaaatcctaaaatatttaaaaggttttttcccacttctccacctgggatgtaaagatagaatgactggagtgtgatcaaagttcccttcatttaggaacattgcctcagcatttgggtattggtccagccatccttgattggctaaaattcgatcaatctttgagcatattctgtctcttccttgctgtttattagaccatgtaaagtagcaacctgttgctttaacatcttcaagttggcattgttgaacacattgtataaagtctgtatcaggttgatagcaaactctatgtcccactctttcttctttggctaaaatggcattaaaatcacccattacaagccaattttctttagttaccaaactacaaagattagcccataagagctttcttccctcattatcattagccccataaaccactgtcaaatagctcttgaaactaccatcagctacagaaagcctcacatgcattagttgactagtgcatttgagaatatcaacaacaaatttggtaggattccacgcaatcactatcttacgcccttggtgccaagatatattcgatgagaaacaccaacccttaaacacatttaggtacaaggctccaagcttatgaaccttgaccctagtttcgagaagaccaacaaaaccagcattttgacagttaataaattgcttgattaactgttgtttctgctaattattggctcctcgaacattccataatatgattctatcgatgaccaagagagggaactcctcccctcttgtgttgtcctttacataacctgctgcattagcctcaaaacctgttgcatcaagctcaaattctgcattttccaagtcatcattctcagccaatgcctggaatccattctcaacctttgtagtcaaggtctgtacatgatcttgaactctttttcctttgctcactgcctgaaaaacaatcagcatctataacaggttgatttttcctatgatcttctttaatgacccattcctattttcctttattaaccttcctgcaatcctcggttttatggcctaatccctagcaattgaaacaagtaataggtttccattcataatgaatccctacctgacaattcaatccaaactcatcctcaaattccagcatattcgggagctcttgattcatctgaacttcgattagaacccttggatagttcagtcttttcctctcctttgtcacactatctaccataatcggattaccaacttgaccaacaatcttgaaaagggatttctggccccagtatttgagctcaaggtcttcaagttgcacccaaataggtacctatttaacatcctctttcttgaaatttgtgttaggataccacggtttcatgatcattgggcgtttgttaaagaagatacaacctccattcaacacttggtccctaatctccatagaattaaaccgaataaggaaaataccataagcaagaattttaaccttatcaaccttatctgcccatattctctttgcaaatccctccaaaatgtgcaaagggggattagaccctaagacataacacacaatggaaggactccaaaagctaatctcttcttcaatatctttaaaattgattttgaccctattaggcctctcagatcgattaaatgaatgttctagattattaacaataattccagatctaagcacaggggggatcgaggacttatgctgaaccaagttgccgttacattggttatttgcgtgcacgaactgtagaaaatctgctcgagcctcctccgctctcttgatctcattcagtgatgcagtaggagataaaggagattggaacaaatcctgaagctcattcgaacgcttggagtcagccatcacttcctctcgttcctcgtcttcttcagaaagctccaggggagcaattcctaatacagcatacatcttcttagtgcgaatcacatctgatacagaattagggtccttcttccttggttttgacacagaagccttcgattttccttgttgtttcgacctagttttggccatggcgccagcttcaactgctagagagaaaaaaatagggaaaatctaaataagcaaaatttaaattaatcacatttttcgttaatttcattgattagcaacgagctgcacagtacgtttaaaaatgacgctaacatgcctaattagttagggtgttacaaattatattattgtacaatttaacatatgtgaattaatatgagatgtgacttgttaagaccccgttagtgagccaggggcattttagtaattttgacccgagatgtgtaaaaccatgaatttaatttatttacgtgctttagaactatattattttatggtatacatgttgtgtcatatttcaagcgtgttctgacaggttggcgcggtatagtcacaactgggaatttcgagccgaaccgggttcgggcccgacatgtaaattgaattgcttatttggcatttt

SEQ ID NO: 27139 - DNA, 1936 bp, Cannabis sativa
aaaaaaaaccataaaaaaaaaaaaaaaaaaagggcaatgaaatacaaaaggctctgcaacaaaaagtggcatcaacaacaccacataccaaaaaatcacattcacaaacagacaattacttaaacaaacataacacaccaaattccgaagaagaaaacaaagaaaaatattatatatagcttctaggggttatggaggttaatttgcattaattaaatataaccttgtaataatttgaaacgtggttgttgatgatgtcgtaagcatctaaaagacccctctttttcgcattgtgagccaaattgatattcctattaatcttctgtaatccctaactcacaaaattaactttttaatggatgatgatcaaattaattaaccttctaattattcattaaaaatcgaccttgactggctttcaacgacaatagcactattggtagtgatatatagactcgagatttttatttagttacagcttggataaaaattaaatataccccctaattgatatcaataaccattacactactagaaaaatagagtttttattcaatttttacacataataattcttaaaattaaataaaatataatcgaactgggcaactttaaatgattttttaaaaagtttttttttttttttgtagttattagtatagatacaaaattactatgactacttataatatcataatatgtatttatacagctatattatatttcctttttttggggaagatcccaaaagccactttttaagcacgaaaaggaaggggaagctgattgaattaatttatctcactaataataaaattataaattcaataagataaccaaaccacatatttactaataatacatattcactaataataataagaaactttactaataacttctgacaatacatatttagccaaagaataagaaacaacattaattgatctaggaccaaaaaacaaactcagggcgagtaaaaaaaaaaagtcttaaatctgatatattatatttcttttctaatatattcatttataaaatatgtatatatattaattatttttactttatgatattgatgtcattaaatgcaaaaatacctaataaatacataatagaaagtcaaacataaaattcagccgaggagtgctactgtccacccactacaagaatgatgggcatcaatgagaaaaaatttcattagtgaaaagcccttttttcattagtaatgtctatcaatgacgacattttgttagtgaaaattcgttagaaatagttcgtcagcaaaaaatattttcagcaatgacatttaatgtcattggcaaaataaacttatcaatgacgacaaaaatcgtcattgataatatattttttttattattctagtaaattaacgacgacaatattgttattgattatattatcaatgacgacattattgtcattgataagttgctagattaaaaaaaatgaaattattttattttatttttaaaattatatcaaatatttatatttttttaattaattaatatataaaattatttaattaattagtatatgaaatcatttaattaaaagtaaaaaagtaatatttaaagtcacaaataatataataaaaagtgagtcacaaatatttttctgaatattttctgtctcattagaagcatccaaaatatttttccgaattcggtgatgatggacattatgaacaaatctctaattttgacctctaactagatcattcacaaagaaaacttgcttagctttattggcaagaatgtacggatcatctttgtaccacacaccactagtatttatgctagtgatattattttcgataataatttttttctttctcagatctgtgttgaaccacttacatcgaaataatactactgaatatgcacctctaaaggacaaatgtaatatttct

SEQ ID NO: 27140 - DNA, 2647 bp, Cannabis sativa
  modified_base (440)..(444): a, c, t, g, unknown or other
tgaccttacaaaattaaaactaaccatactggctttacaattcaaaaaactagccatactagccttacaaaactaaaaactagccatactgaccttacaaaatcaaaaaaactagccacattggtcgtacaaaagaaaactagccacattggccatacaaaaaaaaactagccacattgaccttacaaatcaaaaaaataagccacttacaaaactaaacatattgccttacaaaataaaaaaaaaataaaaaaataatttgtaagtagtattaaaattaataacttttttagaataatttgtaaaaaaaaaaataatttttagttataaataactacttaacattaatttttgtaggtatttaattgttaaatatcaaataaattaccgtgtagcaattcttaattggtctaattcattaaatttttatttttatttannnnntaatttaaatataccaataaaaatgacatatagataatgatagaacatttaacgaccaaatactaacgaaagtttcagaattataacttaggaattaaaactaataaaaattgaatttaagtatttatttgcaactaagagttaaacttaggtatttatgtcgtaaattactctttttataacactgaataagtacataatattattaaaatcgtaattttttgttcaattcattgtgttatctattaaattatatgagattcgattagtaatggattttaatatttttcattttaaatctttgagtagaaccacgtgtataaattacttctaatttttcttttaataaatttaaaattaagtttgtttatagatttaaaacgataacagagtctgtacatatgaacaaaaattataatttttattaagaacattactaaaagttattaggtatcgtggtttttgctttataaatggatagcaataattaaattaaatttaattttatgaaattcgatatctaattacatcaataatattattaatttccttattaatattggatacttatttatgccaattataaagagaaatgtcgaaaatcataaaaagtgtttaatatttttctaggtattatattttggtgtataattaagtatcgaatatcaaataatttagaaaattgttaagaggtattactggtggttagcaccctcctcggtattatattattattggtataattaaatatcgagtatcatataatttaagaaaataatttttgcaaaatataactaactaatcgtgagacgccacctataataatatcgctaatctaaatgatgccacaagtcaacaatcacaatgctcaattataaattgaaaacatttaataaccgtaaatattatcataattatataattaattactaaaatatcacacgtctttttctttactaaataaatcacgccctttactaggagaggtactttttcgaataaggacattttggtcactgtcccttaaaacttaaaattttaataattatattttgtttttttatttatttaaaaataatatatgggaaggtggcaaagaaagttccgaggtggccagaatagtaaaacgtgtcgcttcaattcctgaaattacgaaaatgtccttttcaagtcaaagatgtgttcaacttcgctttgactttttctcccacgtgcattgttgattgaccggccacgtgttcgattgccatgacaagattaatatttttttataagggtgttcgtgatgcaacggtttatagtttttttttttcaaataaaagtgtattttccagtttttgcgagatcttaaaactataaaaattatactgcaaaaaaatgaatgtaatgtagtacggtttgagcggtttatactatcactttcaaacattattatcaaaaaaaattattaaaattttaacatcttaatacatataataatcatcaagtcattatacatgtatagtatgtataaagtaatatacacattatatatatatatatctgttattatatgaagaaaaaaaattatattgcaaaaattagtaactttgtaacatatagtgtggtgcgatttaaccataattattaaatttaaaatcgcaaatcgcatcacaaaagattttaaactgtattttttatgcggtgtggtacggtgcgagcagttcgtgcagtgtgaacgatttgatgaacaactctactttttcaaataaataaaacatataagtgaaattttagaatatgcaacataaatacttaaatttaattttcgatctagtaagttatattttttgaacttctctaaatatctgaccaaatcaatagacatgtggcggtctttgattggcgttattaaatttttatttaaaatttaaaatttaatttaaatatactaataacaaaatgacacatagataatgacttgacacttaacgaccagatacttatgaaagtttaagaaatataacttatgtattattattactacaaaaaattaaacttgggtatttatctgtcatcgagagttaaacttatgtatttacgccataaattactccttttttttagaatactcctatcggctgatgtaaaatagctatatctgtaaattataaaaaaatgtggctaagacctttatccatcagctactctcaatggttacgta

SEQ ID NO: 27141 - DNA, 2484 bp, Cannabis sativa
agagagagagaaagagagagatgggaagtttgggtgtgtgttagttttttatttttttaagggtaaaattggaacaaaaatttacttgtaacatgtttcgcatgatgcaaaaaggggtagcatagtttaagtacctaaacccaatttaagcatagattgtcaaattttctttttgtgaattaccttgagatattatttttatatttattttaatttagtggtaatgaatgagaataattttccaatttattttgtttgtagttattgtggtatgaactttttttgtttctcattattgtcatatgaaaattgggcaaaatgaaaataaatatttttataccagatgtattttattttttgtacatttatataaattttgtatatagaaaagaactatttcacttatcaaccgttatttaaagtaatttttctcaataattataaattgtcatttaaagtgattttttccgtctattactgtatggcgaacgccttcctcaacattataaactatgtgatttttctcgacagttgttaactatcatttaaagttactttttccaacaattataacccatcatttaaagtttcgtatttatgacacccacatagctaacggttttaggaactggcgaaaatagtataaaaaatagttttaaactaatggaaaagactaattttgtagtagtaggagctgcactgtcaatggtttacatatccggtgatgattatcggctgcagttagtcctacacttacctgaaaaagctcaatgtaaagtcaatagtgaagacaatcaggtgattgagttatcacagttggtattgggtttcattattgcagttgattgtatgtaaaaataaataaataaatttgcagcagcaatccaatgaaaataagactttttaaacgaaaaaaaaatgtcatcggtaattccataaaaacttaaaacactttggtaccaaaataactctattttcatgcttcataatgtatccgctggattgaaacagtctcttttgtgcctgacctaatcctctagctctttacttgccaggagaaggctcgagagaccaacaactgaaactaactcgtcaagtataggtctacaagcggcttccagatcattgaagagaatcaaaaaaggtagttttcctataaaaaagtacctggatgttcccttgtcccccaagagaataaagagagagcattgccttcctctaatggagaaaatgaaaaagagaatcacaggttggaaaagcaaattgttgtcctccggaggtcgactaacgcttattaaacatgttgtatttctatttctttttcgagatgtacactaagtcgcacattattttctagcacatcattttaaatgaggttttattataacatatttttagtttaaaactaattagaatgtgtagtacaaccttaaaaacaaaattgtaatcttgtgtggaggctaccacagttgcatgaaatattattgtatgtcgcatctgactctttgctctcaaaatttgttgttaaaagtttcaacacattctataagtatagatagtaacatgttatggatggaaaaagttggactatatattttggtatattttggttttttcaatctactgaatttgttctatggctagtttcttattgtaagcaagaaagaaaagaataaagaaaatcacaacacaatgccacccaaattaagttcatttcacctaaacttggactcactcttgaccttctgttctcattgtcttaagcttctttttgttactaccactctctgagctcttcttaagaagaatatcatcaggaattgtgtcttccattatctttggtactgtaaaggaaaattcttcaggagaaacagtaccttcgtaagcaggattcgccttgagaaaagccgctacttcgtttttagttctcactttcttacccaagggagtaatgtagtaaacatcgattttggagtagtctcttctaagcactaaacttctcctgaagccagttggtgtttttggaaggttaggtttgtcaataacccatgttcttgtggcatcatactctatatcagcagggtcatcacaagtaacttggggttttctgctgcaaatgaatggttcctcttcgattttgcttctgatttcttcaaactcttcttgtgagctaaccactctccatttccggcaattgtcacattgcgcagcatatacacttaccgagctttgaaatgccggccgtgatctcttctaatcagaattatcaaattgagaagtgagtttcagaatcatcatgtcaaacaacaaaaacaatttcatgaccaactcaaacgagacaaccatagacacaaaagcagatgcatctaaccttaaaacaacctactctcctcaactccatggaattttgagttggggtgtttacttttgattgtatattgctctgattcaattgattacagttagagcaatacacaattaaaa

SEQ ID NO: 27142 - DNA, 2561 bp, Cannabis sativa
ggtagttagggtgttacattgttgctctcaaacgcaacaaaacttggatcatggtcccatattctgctacttataatcttgtgggctggaagtggatattcagggagaaatttaatgctgatggctcatttcagagatgcaaagctagacttgtggcttaagggtttcattaacgacttggtcttgactttggggaaactttcagccctgttataaaggcctctactgttcgaattatcctaactatagcagtgaacaagggctggagtattcagcaactcgacataaataatgcctttctcaatggccatttagaaaaagatgtatacatgcttcaactagaaggatttgaggatccaaacaaacccaaccatgtgtgtaaactgctcaaatccttatacggcttgaagcaagccccaagagcttggttcgacaagctgaagaacacattactgagctggaactttcaaaattccaaagccgatacatctctcttcttctacaaagatgacaagctcattatatttgttctcatatatgtagatgatattattgtcaccggtaataatgaagccaagctcagtgaattcattgccaagctcaacaaactgttttctctcaaaaacttgggtgccttacactattttttaggaattgaagtgatcagagatgatactggcatctatttgaatcaaaagaaatatgttgaggaactattgagaaagcatgacatggccaatttgaagccatgtcctacccctattgtaactggtaggttcatatcattaacggatggtgaaccacttcacaatccacgatctatagaagcctcattggtgcccttcaatacctttgtcacacaagacccgatatcagttttgcaatcaacaaattgagccaatttctcaaagctcccacatctgtccactggggtgctgcaaaacgaatactcagatacctaaagggtacaatgaaccatggtctacacatcggttacagcgacagactttcaatcacgggttattctgatgctgattggggatgttgtattgatgatagaagatctgttggaggctattctgtttatcttggggacacccttatctcatcgtctttgaagaaacaatctgttgtatccagatcaagcaccgagtctggatacagggcactttctcaggttacagcagaaatcacatggatagaatcactgctgaaggaaataaagtttcctctcctgaaaacatctataacatggtgtgaaaatgtgagttctagtgcactagcctcgattccagtgtaccatccccgcactaaacatattgagatcgacatttactttgttcgtgacatgatattgaagaaggaacttgaagttagatacattccctcatcagatcaaattgccgatttccttactaaagctctttctccatcaagattccagctgctgacatccaaacttggagtgacaccttcacccctgcgtttgagaggtggtgttaagacttgagtctccacagcagcttgtgtgtagtgcagcaccagagtatctcaaccctgtacatcagaagacagctcagcaattcctgaatattcccttaacggtcttgtacccgggatttgtgaaatcattgcacaaatccccatgctgatatttctgttaattattgcttaattgtacactgccatttgtcttctaatcagtggccactaattgtaaaatccttctataaaaggcaatgcatttactcagcacaattcgagctgagatttatcaattcatttactctctatttcctttctgatctaatatcacttattattgtctttccttttctttttttaaatagaagtaatataatttattcataacttgtttattatcttcaatagttgcatttttaaattggaatttttcttttctataatagacatttccctactacaaaatggtctttttgtgtcgattaacacgtcattcaatgccttaaaacaacgtaaaaaaattacattgagattttttcgttattttggaattggcgcagagttgcatcggtaaaaaatgacatattgtgcttttgtgaaatttttaaaaagacgccatgcaacgtcatttccaaaccaacgcaaaaaaataaacaaaaaaaattaagcccaggctcaataacacattaaaccctactatatgtagtacataacctaattttctattcagcagcaccccatcaaaatcgcaccccattctctctcatgtctctctcttccctcaagatctctctcgcacgcccatccaagccccacaccgtccagctatgggctcctatcgtcgaagggacactatattgctctctcgcacaacttctatacggtggtggccactcgaactaaaaccaccatgcgacgttcaagcaaccatcgaactcagagaggtaatgttctctcttcactctttttctctctcttgggatctctctctatctctctcgttcttttgagacctctctctcgtaaatttgttgtttttctatttcttttatagggctcgatgttgacggcaggag

SEQ ID NO: 27143 - DNA, 1595 bp, Cannabis sativa
agtcgtcattccaagaaagagtcaaagtgatgtactcatgtataagagtcataagttcgtgggaggatgcccaatagagagttacatagacaatcactttttactcattcatcattatttattcgtttatttagatttatttcaattatttatcgacaatttaatagattgaacgtaggagtccttttggctgatattctaccggtgctcccaattgaacttttatcgctttctttattttcaacagttgttggtgcctaaattctgtaattatagattttaccctctacaatatttgattatttatacaaaatagagcctatcgatgctcatactcaaatgtctattttttgaaaataggacatccggatcatgagactactgattgttacaatcaaatggtatcagagtatttgtaacaatcgttgtaatgactccatacttagaatattgaattagaagacaattaacattaattgtgtgtaatatatgatgtggacatattttcaagaaataggtattaatatcattactcttaactaaaaaattccaaaaaatggtcctttgagggtaggagccatatctagaacaaatgagtattcttagtgtgattctttatatttacatgaatgatattttaaatgtttgtatcttattattatttggattaatttttatgtatatattttgagaattgagactatatatgaatcaagtaaaaaagagtggtgtaaacaagaatagggtgtacaattgtcctccccaagatgtctaataattattatgtatgatttttatgaaatgtataatattggcaaaacaacaaaaggacttcatatgaaatatatgtataaatatatataatggtgattgttctctatcacttggattttcctgaaagaatttcaaccacgtcgatcctatcaaatttccaacttgttcttctagatttttaaaaattaataaaataaaataaaaaatctaaccctttcatgacaatgattatttatttatttatttatttatttattttaagatgtatattttttttcaatctaataatcatattgtactgtttttcatcatattatacttcgacctgaatttttatgtatcttttgcttctcattattgtatttaataatgtattcttgaaattaacatatgtactcatatactgacgaaaatatttgaaagaaaaaacaattaatataaaattaaattatacttttttgatgttagtttgacatcaaatttaagttttaccgttagtagtgccctaaattaaaaattattcaatcaacctaattactgatcttgttattgggggtgaaccaaatgaaatttctaaatggtacatttaaagatttatagtattactattagaaatttgttagttgtaaagttaattattatcaattgggtgtaattattagtaaatacactttttctcacaaaagtattttgtcaaattcaaattccctttctccaattaaaaaaaaaaaaaaaagtcaaattaaaacaatatagcttctcctttcgaacataataaaaaatagatatatttatgtatattctgcaagtgcatatatata

SEQ ID NO: 27144 - DNA, 6599 bp, Cannabis sativa
acctcttcttcttcctcttctctggttcggttctcttcaattttttgcggctgattttagggatttgattttatcccttttgttctatcgtttttttatagaacacttttgtcgtcttgaaaataagttaaagaagatttttataacaatattatatttaatttcttaaaaattagagtttttgttgtcttctgggttgtgtagtatggcaggaagaattggttcagttcttataaattgtgatgaaaggtctttgttgaagaaactcaggttaatgatcgtggttcatccttgtattggagttggtgagtttctaaccaaagacagatggaagaacgtccttctctaagttgttgcttgaacttctttgtctgtctttccctgcattgtgtaggttgatgatcatcgttcatgcttgcattggagtttgtgagtttctaaccaaagacagatggaagagcgttattgtttaaattgttgcttgaacttctttgttagtcttttgctacattgtaggagtttcgtaggtttcttaagcaaagagagattgaagagtatggagttttcttaagaaaaatgagatcggaagagtgttgcttgccacattaaaatctgcagctgctttcattttacagaaaggtcccagatgtaggaaatgaatccttaactgagagtaatctactagaacacatgccaccacattcaatatgcacccgcgccaatacccactcgatcttgtgggtcccactctaaataaatcctcaccaatgaggatttctcctaaattcttatagtagaagagtcctttatttatatattaaaaatttaataagtttgttgatatttttatacctttctataaaataaaatgttaattttacctctaatgatagtaaactattgtaaaatttgaaataaatatgacatagtctaatatctttgtgtaattttactagttacaaattaatttctaatttatactttattttgtataataattttaaaattgataaactatagttgaggtcattattaatgatgagatgacgattcactaagttaaccttattccttttcatgtatgctctctttcatcgggttcctagtgcaacatcaacaaaataattggctttcttcacaaagcttgattgccatagtttatcaaatggatcatcaaaagaatatatattattaatattatagtgatatttctcttttgaagaaaaagaataggtattgttattaatactatttcttataataattacaaataagaacatgcacttttttttgacacaatatcaactcttatattaagcagttgagatacaaatgaaaaaaataggtggttaataacatggttctataatagtttctttcagtgaagctcccaaaagctaatatatggaaataacaaaaataaagaaaatagttgtttgcaacgtggactaagtcaggtgaaacggtgtctttcttgaactctcagagagttgcatccctgcctaagccaacacctctacccctcaaggttggcggcatgcagtgctacagacttcggccactagaagcttaaagggcattttgttcaaaaattaagaaaaattaggttttaattattttgaaattaagagcaaaaatacttttgaaaatattagagagaagaagaccataggagatcaacctggagttttttttcttcatctttatattttattttgatgtgttattctatgttgtgagtgatttagtcacaagaatgaactaaattgttatttagatttttcctaattaaatctcttaaagttttattatgatttaatgctattttatattttttatttatctaatatttatttatttttatccaaagttaaactactaacattaacattatttagtgatgtttctcttaattccaaaacaaatatatattattaatattatagtaatatttctctttgatattaatatcattcttatactaatttcaaaaaggaacctacactattttttatatctttttactttgatgtgtaattctatgtttgtatgtgatttagtcacgaaaatgatttaatttgttatttagattttcaaattaaatcttttaaaattttattataatttaatgcaattttatattttttattcatcaagctaatatatggagataacaaattaaaaaaaaaaaaaaaaaacaattgtttgcaacgtggactgtaagccaagtgaaatggtgcttctcatgaacccttagaaagttgcatgtttgcctaagccaacacctctactcctagggttggcaccgtgcagtgcttcagacttcaagcttctagtggccgaagccaacacctctacccctcagggttggcgtcatgcaatgctgcagacttcgaccactagaagcttgaaggacatttttctcaaaaattaagaaaagttagattttaattattttgagattattaagagcaaaaatacttttgataattttagagagaagaagactataggagatcaacttgaagttatttagatttcctaattaaattttttaaaattttactatgatttaatgttattttatattttttattcatctaatatttactccattcatatttttttttacccaaagttaaactaataatattaatattatttctccaagaatagatatggtcattaatattatttcttatactaattacaaaaggttaaatatcattttggatcctgtactttgcaaaagttatcaattggaccatttgttttttaaatgacaaaatggatctcatattttccaaaatagtaaaaataggaccctgagctcaatttttaatatttttttttaatataatcaactataagataacttttaacacgaacagatatagaaaatataaccagttttatcataatatctctagatcggattattactaagttttattttgacaaaaaatcagttcagggtcttatttgtacaattttagaaaatacagggtctattttgttatttaacaaaaaagagggtccaattggtaaattttacaaaacacatggtccaaaataatatttatccattacaaaaaggaacctacactattttttatatatatttttactttgatgtgtaattctatgtttgtgtgttatttagtcacgagaatgaattaaattgttatttagatttcctaattaaatcttttatttttttttttttttttataatttaatgtaattttatattttttattcatcaagctaatatatggagataacaaaaataaaaaagcagttgtttgcaacgtgaaccataaaccaggtaaaatgatgtttttcatgaaccctcataaggtcgcatgtatgcctaagccaacacctctactccccaggtttggcggcgtgcgacgcttcagacttcaagcttgtagtggctgaagccaacacctctacttctcagagttggtggcatgcaatgctgtagacttcagccactagaagattgaagggtactttggtcaaaaattaagaaaaattaggttttaattattttgagattaagagaaaaaatacttttattgatattagagagaagaagacaggagatcaacttggaattctttttctttgtaattctatgtttgagtgatttagtcacaataatgaattaaattattatttagattttctaattaaatatattatagtaatatttcttgatattaatattattttttaaactaattactaaaaataatgcacataaacattttaaaaatactttccctaatgtgggacttatagtttaatatcttttgtcattctcctttttcacataaattagttaaatttcaatattgtttaaattaagaggtactgattacttactggtaagagttgatataaatgtctgcccagtttaaaaaaactatgtttagtcgatgtgggttcccaagaatacaatagtttattatctttctttattctcccttttcacataacacaacttcttcactcaagattgatataaatctgggacttctttccaaaatctcaatatccttgaaatttcttaggattagttgggattatgttagttaaactttggattaagttagttaaaggttgttaagggttgtttagtcttttacaaaggttgtatcacaactgtacaattctgttaagctgttcttgatttttgtcatgagctatataaagctctctccctctttgtaaaatttagattcaagaataataaaaacaaaggctaattctctctgccttttccttattctttctcatatggtatcagaagaacaaaggcccatagcttccatggttcggccaaccacgcgatcccaagatggctctgcaccatcaacgatcgacaacaacacagcagaagtcaattccgactccatgcctgctcctccttcctcagcaattcctcgtcgagttcctcctgttcgagtcccatctcagaatgcagaacaagggtttcttgacaactccaccattgctgcagacaactccaatcagaatcttcaatctcgatcggtagctgatgatcattccaacccgttctaccttagcaccggcgaccaccctggcttggttcttgtgaccaccgtcctcaacggaaccaactatcaaccgtggaaacgaggcatcacaatggcattgctggccaagaacaagatcgcgttcatcaacggatctatccctcgtcccgaacttggtaactccaatctaaactcttagttaaggtgcaataatatggttatgtcttggttagttaattctgtttcccctgagattgcacaaagtataatgtactttgatttagccactgaaatgtggagtgatcttgctgagtgattcaacgaaggcaatggccctcgaatttttcaattacaaacacagctcactcggcttcagcagggtgatagctctgtttctacctattttacaaaattgaaatctctttgggatgagttgaaagaatttcaacccataaccacttgcacttgtggtgcaatgaaagtttttttggattcttacaaccaaaatcaagtgtttcaattcttgactggtttaaatgaatcctatgcttcggttcgggctcaaatcttgcttaacgaacctataccaaatctgtcccgagtctttgcaatggttgttcaagaagaacgccaaagaacacttggaaactctaattcaatttctttggctgctgcatctagttctacaaatcctccaagaaccaagaagcctagaccatcttgctcaaattgtgggaaacccggtcatcttgttgacaagtgttatttcctacatggatttcctcctggttatggggacaaaagaaagcaagataaaggcaaggctaaggccaatattgctactgcaaacacacaaaagaatgaccccgaaaccaactctggccacattgatatctcctctcaatgccaacaactaatctccctgttgagccagcaacttaccaacacgacaaatgcagaaccggctgcaactacccctgctgcatcaaacatggcacgtacaacactaaactcaatttcttggattgtggacagtggtgcaacccaccacatgtgctgcaacatcaagtgtttttcatccttttctaatataccattccctaaattcgtgtctttaccaaatggacaatctctccctgtgcacaacattggtactgtccaaattaactcaaaaattacactacagaatgtactctttgtaccacaattttagcttaatctattttctataacagattacatgatcactactcataactcagtgttattttgtaacaattgttgtgttattcaggatctttctctgaatttggtgattgggacagctgaaaaatgtggcaaattgttcttgcttcatcaagaaactcaccaaacagcagcttcttctatcactgctgctactacagcagctactactgctactacttttcatttcctttcaataaaaacaatgtaaatcaatggcataatcgccttggacatccatcgatgtgtatttcaagttttttcaataaagaacataatatttcacatcctaattcctctttacattgtcacatttgtcatttagcaaagcaaaaacgattgccatttatttccaataataatttttctaaaaatatatttgacttggttcacatggacatttggggtccctttcacataagtactatagaaggttataaatatttcctcactatagttgatgacaagtcaaggttcacttggacctatatgcttaagaacaaatcggatgttcaacatataattcccaattttttcactatggtttgtactcaattctcattgtctattaaagcaattcgctccgacaatgcaaaagaattgaacttacaatccttttttgcctcaaagggcattattcattaccactcttgtgtggaaagaccacaacaaaattcagttgtggaacggaaacatcaacacatactcaacatagcccgagcactaggattccaatccaacttacccttggtttattggtcttacctagtccaaacggctacatac

SEQ ID NO: 27145 - DNA, 2787 bp, Cannabis sativa
ataaaagttaataattaaataaatacttaagagtgttgtgttatcattaatacgtaaattaatcaactttagagttataaaatgagacacattgattgatatgctaactatttcttcttctaatctgttcacttaggttgtaacccaaaaataaaattgggtaaatatcattttggatcttgtattttgcaaaagttactaattggattctctattttattaaataacaaaatagaccctgcattttctaacattatacaaatatgaccctgaactaattttttgtcaaaataaaatttaataataatccgatgtaaagatcttatgacaaaattagttacattttttgtatctgttcgtattagagattgtcttaaaattgattatactaaaaaataaaattgttaaaaatttagctcagagtcctatttttaccatttaattaacaaaacagaaggtatgttttgtcatttaacaaatcagagggtccaactggtaacttttgcaaaacataggatccaaaatggtatttacccaataaaattttataatcatttgaaaatggtctatactcagttaaggttgcaataatttttaaattttgcagacgaaccttcattcaataggttaagaacttaagatttaaatttttcttattgttgcatgaattagatattttcttgtaggataaataatagacacattgagtatttaataattgataaaataaaaaaaaaaataatagaagaaaaaatatgaataaaaataataatcaccttctcattaataaaaaatcatatcaagacttatcaatttctcattctttttagtatttagagactccctcgttctacaaattctaatctttatgttctaactatttgtatcagtatttaagtcggtaagagaagaacactccatcatgagaaaataagagagaacttataataaaaaaaaaaaattaagtagtaaattgaattataaaattaagataaataaattaggatatatatagaatttaatggcttttttaaaagaaaaaaataaagtgatcatttttttaaacgtgatacatctatttttggggataatcttttaagtatccttgttattcgtgttttcgacaagagatatgtggattccaaataaaagtttaaagcccatcattgggcccaaaataacgaaaaattgggccgagcctaattgttatctagctttctgagaaagcaatcacattgctcgcttaggtgagcttccgccaaggctagtccgtatttggaaggatcctagctctatgtatccggaagaaccttttggcgtgcatttggaagccagctgtagtttttcgtttactattacgtacagaataagaaaatcactttcctcagatcttagacagaaaataatatcaagttaaaattgaagattaaataattagtatcgtattaactatccacaatcagagaacacggtatgaacaactatcatcgtgattaaaatcttcacctagctcattatacatgcatggcttcatgggttgactttatcagataagtccaaaattgtatattatttgtaaactctctattagtgggaaatagtaactaatcatgacctcaattactctataaaaataaattgaatgcttcatgcaaataagggttagaatttcttaactcacaagcttgagaagagaatagagtattcatattcattgtaatctcttaggctttttcagcctattttataataatacagactcgtaaattaaagttcattaacaccccaatcacataaaaactctaagtgttcttttcatatttgatttttttaattgtattttctttagcttaatattaaataattcattttctaaaaatctcgttaaacaattctaatttcaaaagaaaaatgtgatacatagaaaaaaaaaagtgtgatagcttcttttttggtatttttattatttcttgtatactcatagatttgttatcatttttaaatttgatttttttttcgaaaaaataaaaagaaaaatgtgagatatagatttggagtgatttatgctattcttaattaataataattttgatatatatatcacactatcactccgttaatataatataataacaattctaataaaaaaaaattaaaaaactaaaagaattaaaaagataacatggtgctatttggaatgattttagagcgtcatgtcactactacaaatatttgaattcgcaatggtcttgagaacgattttttttgggaaccgtcgctaaaaaaattaagtaactatttaaaaccgtcgaaaaaaataagtattctcgacgatttttaacagtagctaaaaaataggtgacagttattattaaaaacgagatttttttaaaaaaatatttaactcttatacccgacggtttaaaaccgtcgggtataccccatttaattttttatatatatatactacaaaaaggagaatagctgacggttctaaaccgtcgggtaaacattcacctacttcttgtcacattttccacgtgtccacctacttattttctatatcccacatgaccacctatttcttctccatttcccacaccctaaaacgaaaatcttaactcttcaaaaccccacccatgccttcgcacgtcttcctccctctctcgatctccctttcttctcgtccatcgatctccaccccctctccctcctgtcggtctccctctcctctccgtcgcatacgtcagacaccacctctcgtcagtgtccctctcatctccgtct

SEQ ID NO: 27146 - DNA, 1663 bp, Cannabis sativa
actttaagcaatagtctctactcactaacaacataaataaatgagataattatcctcgcactattaatatcccaaaaaaaattaaatactattttaatcttgatattacacatatgctctaaatagggttagaattagattagatgagctaaaataaaaataattgggctcaaaaacacttgacggtcgaaatccatcgtgcatggcccatgatttaatttttgccaacttttgtttcatttaagcttaagttgaacaataatcaaacaaaaatatagtttaaatatatttttaattagacccacaaaatatcttaattaataaataaaaccttgtttctcttttatattctcaaaatggcccaaactaagtaaaaattctcagatttaacatagttaattttcaaattccaattaattaaataatgggagttatatttttgcacctctaaaattattaagtataccccaaaagtgtacaaattttttatggagagtgtgtgtcaattgtcttcctactagatttcaattgacaactaaacatgtgcatgtatacctcttggtcgatgtgttctgttgctccagaaatagcgctccatgtcttggttcgttgcaactttgctcaagactgctggagacaaaccagtgtaccggttgtggctcctgctgccatgactttcacgagctggtttgaggaaggaatggaccaatggagtgatgctaaatgtgtggaagctgccatgattctttggtctgtgtggaagctgaggaacgatgtagtttggagctcaatttctccatcaacagatgaggttattcacattgcaaaagtaaattatatggactggtgtaatgctcaacatttcgaaattgagcctcatagtgcgcaccaaacggtttggccggagcaatggtctccttccagctttcccttcatcaaagtaaatgtcaatggagctatttttgtccacggaagggcgattcggggtggggttgatggctcgttttgaaagggaatgcttctcatcaaattcctatctatttcctcaaaaagaatatataaaatatcatcatcccaattatgctcccccaatctcattaaattacaaaccaaggcattctcaagtccaatatcatctaaaataactaataagttcacctcatcaggaagccaaggctctcaagcaccaaaatattgcaaccatcacccacataccatttgattccttatcacactaagttttgaaattctaaaatacttcttcaaacaaaactagaattggaaccaagctaatcattcaaaaagttaccatttaggaagtaacgagctttgaataatgttaggtccttttttggtaatttagttgtcaaaatattttttaattaatgtgcattttattgagcattcaatttgtttttatcaactctggacctttttttcagggggagttgtgtttggtacttgtgatcttatttggattaaaagttagcatgttggtttattgttttacaatttcgagtgtgttactcagggggagtaattatttggttatgactaactttaatttgcagctactttgtgttaaaaaatattttgttcatctaaagtgccaaaggggagattgtaaagtccttttttggcaagttagttgacaaaatatttt

SEQ ID NO: 27147 - DNA, 4042 bp, Cannabis sativa
  modified_base (359)..(363): a, c, t, g, unknown or other
aattgcttgtttcctcgcaggatattgaagaatgggacacacttgtctgttgattttgaaacaaatctgctgagtgcggcgatccgacaagtcaaagtttggacttcatttgttttagttggcgacttcatatccaggagggcttgaatcttctctggaatggcttcaattcctcgggcattaacaatgaagcccagaaacttttctgaggtgactccaaaggagcactttaagggatttagtttcatgttgaaaacagtctttgggggcatgctttgttgaggtctgtgaaatcaatacacactcgccattacttgttcggcttgggcaccaatacgggatttgcgacccaagctggnnnnnaagcttcaattatgaaattgttgttgcgtagcttttctacttcttcttttatggctagtgctccctctttgtccaatagccttcgcttttgttgtactggccagaaattttgattaatattcagaacgtgcaaaatgatagaaggatcaattctgaccatatccgcatgtgacaaggcaaaaatgtctaggtgtgctctcgaaaattttatcaatgctgatatctagcggggatatctagatcgatctcgatttcttctaactcttctataggtccaacattgctgcttggagcttttccctcgtttttgctctagcagcttgacgctggagctatggggaaaactaggtcaaaaactcaggggagggcaaaaaattcagctaagaaagtaaggaagaaaggtcctgattctgtttcagacatcattcgcacaaaatcgattgatgaagtaatcggtattacaccgctggagttgtcggaggaagaagatgaagtttcactaggagtaatagggagaaggagctgcgattcacagaaggacttgtttcaacctccactgtgtcccaaatcctcactgagggaaattagacgcattgatgaagctcgagatgacctgatgcattttgttcatgcgaacaatcaatgtaacagtgatttggctaaaggtaagatctcgactcctcctatcttacaatctggttcagtaattaggaatctggagcaatctatgaatcaatcagagaaggctaacacggtgaagaatactctagatgacatagaagatgaggtgaatttttggcaaccatcaattgtatgttatgttctgggatctaatccccctctgcatatattagaaggatttgctaaccgatagtggaaagacaagattgataaggttcaaatgctcacctatggagtgttcatcattcggtttacttccatggaatacagggatcaagtactcaacggggggtaattttcttcaatcgagggctagtcattatgaagccttgggatgcaaatacaaacttcagaaagggggatgtcaagactattcccatctggattcaacttgagggatttgaactcaaatattcggggcaaaagtctctctttaaaatagtgggacaaattggcaaacctgtgatggtggactcggtcactcgggaaagggatcgactaaattatcctagaatcatggtggacgtcctcatgaaccagaagtttcctagtatgttggagtttgaggatgagtatggtagcaatgcatctgtgggcgttaagtatgaatgaaaaccagatttgtgtacgaattgctctggaatggggcatttaataggagaatgcaaaaagaaaaatggtgctaaacaagagtgggttgtcaaagaagataaaaggaaggagaaacccactatagatgatgagggattttaggcagaatcgaaagggaagaaagtgcaagagcagaaaactcaagtaaatgagacaagaacttccaatggttttcaagtgctagcaggggtaaatgatgataatggaactgatgatccacagggggctgctgatgagaaaacagataacataggagaggggggaggaccctctcttggcaaaggataagttccttgtttggaatgtttggggagccaacaatcaacaaaaacaacaacaaatcaggcagttcatttgaactcaggagggtagttttgttgggcttctcgaaacaagggtaaaggttcacaaacttggaaccttgtaccttaatgtctttaatgggtggtgcttctcgtcgaacatagcatggcaccaagggggaagaatcgttatagcttggaacccaaaccgtttcattgttgatattatcaagtgcataaaccaacttatgcacttgagaattacaacaatagatggtacctataacagtttcttaactgtagtttatggtttcaatgacaggaaagatagattagaattgtggaaggaattacacacactaaagacagatgaaagttggataataatgggggatttcaatgccatcatagctaaagatgagagagtgggtcacagagtaaaataccaagttgaatctgagttcattaagtgcttacaaacctgccagctagaagacattaaagctactagtagtttctttacatggacgaacaagcaattgggtcagggcagaattttttgaagatcgatagagtcatggccaatcaaagatggttaaacaattatccgaatgctgaagctttgtttttgaatgagggaacttatgatcatactccagggatactgtcttgattcctaaacggaagtgtggaaagaaaccattcaaatatttcaggatgtggaaatcacatcctgaatatgatagtaaagtagctgctgtttggaaacaacaagtcaatggcaccagcatgtaccaggtggttcacaagttaaaggctctgaaaactatccttagagagattaactagaaaggcttctctgatttgcaagcagcctcgattcaagaaaagcaactactcgatgaagttcagagcaagctgcataaagaccctctaaatgaagtgttccaggtacaagaacttgatgctagaattcttttatcttagcacaacagcactatcactcgtttttacaacagaaagccaagattaactgggttcgagatggagacagtaacacatctctatttcacgcaagtatcaagcaaagaaacaggcagaatcaagtctattcaatagagaatgaagctgggtgagggtttttgagccagaacaggttactgaggctttcatttcgtattacaaatcactgctggtatcgaaaatgaaaaataggaagaaagtttcaaataagattttgagtagagacccaaaagttacttctgaacaggctgaaatgcccagcagacccttcactaaggaggatgtcaagaaagtagtttttgagatctcaggaaacaaagcgcaaggaccagatggtttttccagttatttttttcaagataattgggagctggtaggagaagatgtatacagggtagttacctctttccttacttctggtaaaagtctcaaagaaatcaacacaacagtccgcacaatggtaccaaaattgaagtgcccaaacactgtcaaagattttaggccaatagcttgttgcaatgtcatttacaagatttcaactaagcttttgtgctctagaatcaaatggattctccctgagctgatctcaaactctcaaggagggttcattcagggcagattcattgggcataacattatgatctgtcaggatttagtgaggcattatcgaaggaagtcaaacaaggcaaattgcatgatcaaacttgatctccaaaaagcctatgatagaattgaatgggagttcatagaggagatgcttatagaactccagtttccaactcacttcatacaaactgtaatgaattgtgtaagatcacccagattctctatcatgtttaacagttctatacatgatttctttgaggcaaaaaggggcttaagacagggagatcccatgtctccattgctgtttgtacttggcatggaatgcttatcacgaatacttaaggaggttaaagacaaaagagattttcattatcatgagagtgttgggttttgtgccctaaataaaaccctttaca

SEQ ID NO: 27148 - DNA, 5818 bp, Cannabis sativa
atcccgagcaatccaccccaaacctagactattgtcatcctcaaagacagcagcatcacaattaaccttaatctcaccaaaataaagcttagcccattgctcacacctggaagtattcgaaccaaaaattggcgccacaaccctactttccaactgagcattcttctaagaatcaaggtaagtaattgcagcattcaccactctctctactgacaaaggcttgttattccaaactaagtcataagtcattacgaattacgagctcccgagctccccaaactccccaaagaagtatagcaagcctctcaatatgatctaaaggctgcacctgacaaacattatcaaaccaactgccaaacacagtagcttcaccccctccaactatccctcccagccccctgtccagacaacccttagtaaaagcacaactaaccattatatgaaaaattatctcatcctcccgatgacacatcggacacaatccactcacatggacccttttagaccgcagagacacaagagtagggagacaattagtaagaccccgccaaagaaaattcttcaccttagggggaaatttcaagttccaaaacatcctctaaaaacccgaattatcttgagtattccacctaccattgcttacttgtaaagtgtgataagcacttttgacagaataattcccatgcgtctccaacatccaaaaccaagcatcctcaaccgaagacggagacaacggaatacaacggatcaaatcaatatctctttgaacaaataaatcatgaagaatttcctcatcccactcaaaagagcccactcttaataaattattgaccttacagtcatggagagccacatgagaagaggtaacatatggatgttccttacaaggaagccatggttgaatgagcaccggtatagaaagaccgtctccaactcgccatctcgcaccagtatcatatttcatcatattagcaatgtaagattttctaacatcccctcttaagatgatggttattttcttgcccaccaatttcggacaactcgatcacaagtaatttttttttaactcactatcttcgaatcacaggtttctctttagctatacttttcggatcattttttttttttggctcttttttagctctactttttttatcagttttttaacgagtataatttttattctgataacatgttagtgaagtgagagagaaagatatgaaatgaatgattgagctcatctgttaattgagatggcttaatgtattatatagccaatggagtaatcgaatataaaaaatcaagaaagagctagccagttaagcaaagagctgagcaaaaactaagatcaattataactaaaaacaactcatagaaaactaactggtaattgactaccattaacaattctagctcaatcctaatattctccctcaagtgacactcattggacttggatgttaacttgttcatgagaaatgtgaactgaagaatgttataggcttttgtgagaatattagttgtttcatgtcaagactctacataacgaatatctaactagttgttttatgtcaagacttacataacgaatatcaatttcaatatactttgttatggtgtggaagactagattcgaagctagaaagctagctcccatgatgtcacaccatagtatatgaggatgtgtgaagttgatagataactcagaagtatggactcaatccatatgtgtttacttgtggccatagtaagagctctgtacttagactttgtattagtctttgcaacgttggattatttcttagagcacccattgaccaagttgttcttgtttatattatggtaataaatcaaatacgcagtgaaataaatatttttgattatcatcatatcatgtccccaagattaccgtacatatattaaaattgaaaggatagtttacctctcgaagtctgtcagggtatcctcaagtaatttttattttgtatccttggaatggtgacatcaaagtcacaccttaatcttccagatcttccaccacacacaaagagtagtgtgggctagtatgataaaatttatatgaagttcttgttagattctcaacacatgagcaagaacaatttgttaggatttatgctctgaaaagctcgtgagacatttttatttataaataagagttgaacattttcatacatacttaattgttaaattattaatatataatattgaaaatttatatatataaatatcaaaaaaattcttattcatacatgaggttgtgagttgtatagtacggagaataaatattataatagtcagcaacatattaaagtttaggaatctttaatcaatggtagctagtgcagttcactgatgcctgttatttggtgcaagtaatctcaattcaaattattgatgtagcatgacatctaagtgaaggtgctgaatataatagagattatatatgtcagggactgatgtgtaattatgttgtctttatcaaacatgtcatttactagaaagacttaattcatatcataatgatgatcaatggtagatcagcttaaatcctaagtaatcatgaactcctgttcatgttagtttctttaattcactcgttaaagtttctcacagaacataattcttacaacttctattttgtaaatctaataatattgatgactgggaacatgatctacaattatagaatcttgactttcctaatagatcgaatattggttccttttaaacgttaattctggaactaaaaagttgtgcacaaatttagattagatctaaattatactttcagcagttaattaacggtactaaaggatacattagtaattagaagagtaaaacagtaatttagccaaaactaattacgaaccaacacaaggagggctaatcactagaattgattatcaatggatactgcagtaaaacttagtaaatataattctatatttactaatagttcaattccatatttatagtgtagtaattatgaaattaataaacatgataatttggctgaagagatccaataaataatctaatttattggagcttagaattatagttctatagtccccgaattgccaccttgacagactgtcaaggggagagataaaagttgtatgtgaaagtttgaaaaaatctattttaatttgtaaaaatagtaattatttattttgtaataaataatttatttctttttaaattaattaatttaataaattagaaaaaaaaaacaaaagttgtcaggacaaaaaacacaacccttgtcttaattaagacaaagggagacgccacctacactgtgctgagacacagtgtaggtgccccattaatagggtgtcccaactagatttatttttgggttaattaattaactaattcattcaaaagataaatattatttaaatttaaatttgaaaagtagctgagatattctctcaagtagttgtgagattcccttaatcggttataggaaaaaaaatatctataacataattcgatatattttttttcaaataattaaatataatttaataaaagatttgaatttaaataattaattaaataaaaatatttcatgggtttttttaatataccgtataaccaatttgagaacaagaacttttaacgtggctttatgaatgcctaaaaaggattaatatattaatatttctctccatcacaataacagaattattcttgctcatgtattgagaatataagaactttatatataaatataaatatatatatttatcctattagcccacactagtccttgtgtatggtggaagatttggaagatcaaggtgttactgtaaacatcaccgttccaaggatacaacatacgaaagactcaaagataccctgataggattcaagagataaataatcttcacgcttttactttcaaatttgatatatatacatatcgtgatcttgggaatatagtacgatgataatcaaaaattgtttttttcactgcgtgcctgatttagtaccataaaaccaacacaatgttatagtgtttgagagaaaagattaaatcagattaatcctttttaatctttccaaaaaattacgttaaaaatatttcttcttgaatttggtttatacgatatattaaataaactcaataataattttatttaatttattatttaaataaaaaaaattattaaatcatattcaattatttgaataaataatctaaccaaattctattatagatatttattttcaataaccgattgaggaaatctctcaaccacttaagggaatctctcaactttcttgagagaatatcttcaccaaaaaaaatatctataactacttttcaaattcaaataaatatttatcttttgaattaattaacccaaaaataaatcctgtggagtccaccttatatgataggcgcctatcactgtgttaggacacagtgatagtggtgccacctatgtcttaattaagacattagctagtggtgtcttttttctatataacttttgtctttttcttaatttatttaattaataaatttgaaaaataaattatttcttacaaaataaacaatttctatttggacaaatcaaaacagactttttcaaactttcatatacaacttttgttcctacctttgacaatattttaaggtggtcatccggggaccatggacccataattctaagctccaataaactaaattatttattgaatctctttaaccatataatcatgttattaagttccacggttactctactataaatattaaattgaactcttagtaattatagaattatatttattgagttttatagtagttttcattaatataatcaattcaagtattagccctctttgtgttgattcgtaattaattgtgtttaaattaccattttatcctttgaattacttattgatcctttagtaccgttaattcactggtgaaagtataattttgatccaatctaaatttgtgcataacatttttgctctaggattagcacttaaagggaaccaacattcaatatgctaggaaagtcataattccataattgtagatcatgttccgtaccatccgtattattagattctcaaactagaagttgtaagaatcatcttctctaagaaattttaacgagtgaataaaaaaaactaataccatgagtagaagttcatgattactcaagattcaggctgatctaatattaatcatctttatgatatgaattaggtcattataataaatgacatgtttgatatagataacttaagtacatatcaatccatgtcatatataatctctactatatataacaccttcacttagatgttatactacattagtaatctgaatcgtgattacttatgccgaataatgggcatcagtgtattacactcaggggcggacccacattgtaacgagggagggcagtcgcccccctgaaaaaaaaaatcgagaaaaaaatgtatatgtattttaattagttacaatatatatttgtattaaaagatgatatttatagacataatagtaagcttggtgtaatggttaaggttgatgacgaatatgttagagggtaaaggttcaaatcccactaactatactttatatttttctttttaaatttatttacaccctccattcccccctcactttaaattctaggtctgccactaattacactagcaatcattgattaaagattctaaaactttagtatgttgctgcctgttttattcatggctatgtgatcttaattctccgtacaatacaagtgtaacaccctaacta

SEQ ID NO: 27149 - DNA, 2522 bp, Cannabis sativa
taagattctggtaaaataatttccaacaattactctatctatgtcttcattttttgcattccatatttttttcattcctagtcttccatatgtggtagactgagctcgccaaagcagccgaaaggacttgttttttaaacttgctgcatttgcttctttcaatccaccacataagccttgttaccgatggagtagatgcattccacctcaaccagtctttaatcttctgaaggcattgctgagagaaaggacaggagaaaaaaaaggtggtcacaagtttattcctgtgcattacacagtaaacaaccttgatcattgatgatcccaaatttatacagtcattctcttgtccttaatctgccctgtgtagcgatccacataataaagcaacaaacacataagtatgctttgttgaagaaaaaattttacaaaaataaatggtaccttaatttggggaattgtaaatctcagtccaggacgatcagaaaggccaatcaaatcatggtccatgtactcaaaaaccatatagattccacctttaaacttaccaccttctgtatagacgaaaaaatttatataaaaaaaacacttgggtagaacacggtcagcaaccataaaaataatatggactggatacacaacaagtttaacatagacaacaaagtaatttatgcaacaatttgctgaccttgactgttttgttcatccttttcattaccttgaagacagaaaacacaaaatatttaagcagggatcaatacatacatagatatatgcattcaaaattgtatcttctaagtattaagactctatatccaaaagatctttaaaaagtacttgtggaggttacaattactatcagcctaacaatattcttgtgatcaaacttcttaagaattttgatctctctaatggctacaaaagggaactgcataaaaaaaaaatggaataaagtaaattagcaggcataaactaatgatctaaatcagttgtgaaactataatttgcaaaacagaaaaaaaataacgtacccattctttttcattgtccattcgtatcttcttcagagcaacagtttctccggtcttattatctttggccatgtacacttgactgcaaaaagatgaaaaaggaacctaagtaatcccaaatctttataatcaaaattcgataatttggagcttatagcagcataaagcaatcaacaacttcaataacatcattacagagttcacagatttatgggtgaacactacaccgaaccaaaaaacaacaattcacggtcatgaatataattactgacctagtaaaaagaagtagattcgatttcttaggaaaatattaggaaggggaatcaaaattataaaaatccagaagccctttactacaacaacaacaagaagaaaaaaattgcaaattcataggaaagacaaacccacaaatcacttcaccaatttgctccgactcaccattttgaaaccataacttctatctaaaagaagcaatgccaaattcgtaaacttggcagcatcaatcatgccattgatatcattagggcactcaacaaactgtacccgactattcttacctaatgatttctttttaaaaaattaatcaaacaaagctcgaatctttacttagcatcagtataatttctaaatatagatagatacaaacctgtaacaacagtaattggcccttgaaccgatggcatattatgtttaatataatgcttcactaatgattttatcaaaagagacttcccaacctacaaacttgacagccaataaataaaaatgcacaccaaattagtataagttcataatagaaataaaattcaaataaaatttaacgctttgagtatgcacgcaatgatataattaaattacacaaaagcttaatggtctgtttgaattatggtgttggtaccttcccagtgaatacataaaccaaatttacaatcaattttagtctcccaaaacaaaatttttgcctgcacatttgtagttttgcaagaactttaattccaaggggtcgatgaatactcaaacgaagtttcttagcaagataggcgagatcagagacactgaatttgctatcgctactacaccaaaggtcagtaccacagctcccattctcccaaattatttaacctcagattgatatcaaaggagaagagggagaagtggcggagatcaaatgagcatttcacaaatttgatgtcgtctgattgtgaaagagagaggagagtcaatcgtatttttgggattttaagcttccaatctcaatcgtataaatgaaaatttccatttaggctcagccaaaaaaaaatattacttttgaataaaaaacttaaaaaaaaagtcacccacaaatttctcataaaccaagaattctgttatatagaatttctcacaaatttctagcaatgtgctttcttgatagaaaactttttcatccaaatgagcacattagactcctttatatagtgtttaggctatcatcatttgaaattcaaattc

SEQ ID NO: 27150 - DNA, 3575 bp, Cannabis sativa
ttgaagaaggcagcaaaaagaagacaaggacgagatttagggttatttggggttcatgattgattcgtattcccattttccttttaattttttttttattttattttaattcattaaattaattttatagaaattaaatttgagttagatatgttagattaaaaagttaagtttttaattttaactaaacatttaaaaaaatagggatttaatttgggccttacacgtgtacacctagtcacaactaatagaatactggtaacggagaggcctaaaatacaacgtttggtattaaatccgtcaacaaaaaaaatatagtatttaagtatataaaattgaaaagatatggtatttatgcccaaaaatttcccaattatctctctttcctgaagtgacctttctctcagtctcttacctctcaaaatagcggtctctctctctctcgtctcctccccaaaacccaaaaccctattatcgtagtacttaccatcctttccctttccccttctttcttgtgcatcaatggcggactctgcagtttcacttgacaaggtcaaaggcttcttgtacgcccagtacaacgacgaggagaagtgggcccttaacatggtactctttttctctccccactcctccaattcacgttttattgtttcactgcttaaactctcatctttgtatttatgctttcatgatatcaattctttcgtaaattactctattgcaacgaaaatgatatattttgtttttttgagagggaaaattaaaactaatcaaatagttaattgtgcttagatttatttttattcactatcttgatgtaataacattgttttggaatttcgggttctttgtcctaaatcaagtgatgggtacttgctcctctcctttgtttagctctgattggttaacttgatttttctctacgattttcatagatggggactaatcgtggttttcctatttgttgtgtgtcaatgaatagtataatagacacctgtgttagtttagctataaaaaattggccctttatctgccgagattaatcaagggattcggttcttcactattttggtgaggagaggtgtatatttgtgttatttgggggcaatttaattctttaatttcagtttagagtagataggtgtatttggcgtacaaaataccttgttggtttataaaacttaggtttatcattattatgcatataccttgcccttcattaaccctcctcccattgttttcagactctggtttatatactctagataagtctttgtgtgcaagttgatatggggatctattttcactaaaatgttaactcgtttggatgtgaaaccatattagccttgtagtggtgtaaaatttgttagagttccttgctcgtgtagagtttaatgggctatactaaaacatgtttttgtgtctctttttgcagaaattactccgggctgtcggtctttttgctggatcaatagttgtgatgcgaaattatggggatcttatggcaatatgagcaggatattgatgcctattcttagttggttagttatttttgcaatgtagtcgttctgtttgtcatatggattgttgacctggaaattccattcaaagacagggttttctgtcttgtttccagttttagtaaagaagaggaaggtgatttcattgtgttcctggggcgtttcagtatgctctgagtctgtctcaatatttctatacatgaatgaaaggattttgatttagtgtggattggttataattttaattcgacagctcattttcagtcatattttatttttagggagaccctggttacttatgaaatcaggtttttgatctgccattctcatactgtctgcgttttgaactcgtaaaccacctcaaggtactgagaacaatcagagttttcattcctttattgcttttagccatcaagacatttgcccttgtctttgtaggagttcatcattttaaaagtacagtaagtttatcccagagagaaatgcttataattgttcatcaatcaatctgttccgttaaacaatgtcttgtttgccattattagtaagatttggtgacatgcttatactggaacagatttgtttgaggcctttgtttgacatgatactagggccaagaggtaaatttcatatatgttttctaaagcattgttttttctattggaatctcttaaaacattatcacactatatggttgggagagtatgaatggaatgcaatgaataaagttatattttcattccatctctttataatttagcacgtaggaatgtaaatgactttttcgaaatgcattctatggagcaaatccttgtattattctattgttattattattatttgaatgctttgttttttggttttgctaaacatcattatatgaattcttgttctactattatattattattattaagaataattagtatttttgcctctgaactttcaacactacctgattttgttatttataatatatggctggttaaaaattccttctaaaatataaacgtttcataattatgtcttttctgttaggttctgttttttttagcgttaagaattagtatttttacccttaaaatttgaccaatataaaactttctcttttattaaaaaaaattaattttaaaaatgataatattctatttttttatatagtaattgtaatattttattaattttgaaaaaaataatgaaaattattataaaaacttgataaaatattaattttacttaaaaaaatttaaattattcttaaaaaaatattttaaattttattttatttataaatacgtatcataaaaaatcaaattaaaatgattgacaatctaataaatcgtttaaataaactaagattttttaaagaaaaaattaaacgtatttatatttataaatttatatcttaacaaataaagaaaagtaattaataaaatcaataaaaatataaagttattttgaaaaaaaaatttatacattaaattaaaaaaatgttatgtttacttaaataaatttactttttttttattaaaataaaatatactcaagtttgttattgtaaaatttagtttttataaaaattgtattttaatattttttttttttaaatctaaatgaattttttaatgaaaaataattttatttttaaatttcttaattagttttaaaatttcaatttatttttaatttttttaatcattcaaaatgattttttcttaagatttaaattaattttttaagatttactagaaaagttattaatttttttttatttttattttaaggggtatgatttgatagttggtaaagtttaagaaacaaagttattaatttacaaaaaaatatcagcatttaaatagaatattaggatagaacataatagaaggtctaaatttaagtaaatttaggtatattttaaggagtaatattagtattattaaaaattcaggagacaaaatttcaaaaaaaaaaaaaaatacctatgatcaatgtgccttatcctgaaaaagacataagacaagccaaatgaatagatgttagtgtatgatagag

SEQ ID NO: 27151 - DNA, 1233 bp, Cannabis sativa
tagattacagcttgttcatggttaaagaactgaactttattccaattaaagtgttaatgaagtgaaaaagaagcaaaaaatgggtgaagaagaacatgggtatcttccatggccacctattggagctccactaaacatggaaagagatgacaatggaagaagctttgatagctctgttaatgcagtttcatttgggtttgtagcaactgctattttgatttccatgttcttagttatggctatctttgaaaaattccttagacccaattctccaccggctttagccccttcctccggtcaccggagaaatggtgatattgaaaatggccagttagggtataatggtaaatttgctcattcttctccaaaggttagaactttatatcttatctcattcttatcaattatgggtctgtctccattttttataatcagctctaaatttacataaatattcaatcttgaaaagtgaaaacccccaaaaaggagaatttggtatttttgtaagaaatctttgacaaagttttttcctttgtgtttgtgaactttcacattggtcattttccattattgacagcttttttttccaacatcttttcatgtttaaagatgttttattttgttgagattattgattatatctaagaattagaataagtaaaaagtataaaatcataaaaaccggatttaatcagaactccccggttaagcgtgtttggacgggttaagcgtgtttggacgagagtagtactccttatctattgaaaaagaaaaaaaaaaaccaaaaaccaaccaacaaatagacttcaattcattcacatttggttgtgtgtttttgaataattttttttttatgagacaaacacctttattatctttgtgtgaagtcattgcttttcaaataactaatgctgtctagtaattatgaatgttgttgtttttagagagagagagaggtcccattaaagtagttgtctgttgagtagttgggtatttggtcccaaacaaaattgggttttgggactgtttgtactagctctatcatgacccaccattgtgttttttggcctttggttacatcactaccaagcttttatgatactaatctctcatggcctatacacacaaacacacctggtcaacccttctttgtaaattgtaaacatgtttttttaagtccttttcttcttatttattaaaactattttgccttcattttcttgttccaatcca

SEQ ID NO: 27152 - DNA, 2801 bp, Cannabis sativa
tacgaaaaaaattaaattagatttcttttgagagacaatctctttaaagaattgaacagtccatcggttctcaagccctcgacaattccagcttaaaatattcataatgcttggcggatctgtgtaacagagcccgccaacatcttgttttttgaagtatcactttcctcagaatccatttccacaacactgttatccaaaagtccatctcctttgtcaatgttattgggccttattcttttgttttccataactagaagcccaacagaggacaagttatgaataggcgccaaagattcattctcatttaaaatagatttccctctacccatatctcttgtatcattagcaattacaatacaatcagaatcattaaggacaattggagtcaaggattgattgcccccaaatggtggaggtcttacaagtgaccccataattttgtcatttgggattctttccaaaacaggatttctcatccctcccgcaccacaacttggctcaccgaagttgttatttttcaaaaccactcctgatcggagccatttagagccaatggtgtgatttcttcttctaggcgcagctttcaaaaatagtccataaggtttattgattgaatctagaggagtatcaaaaaatacattcacaaaatcttttcgaatgtccaagaattccacatataaaacaaaaagtgggcaagtcttcatacttgaaatgtgcatagcaaattgggtcgccccgtatctctaatttcctcctcattttaagaggcaaatatatatgaaccagaacatgcaccctaaggtagtccttccaaacacctgtaaaattgtttgggtcacccttaacaaatttatcgatgtagtttctaatatcctgcaggacacgcgctgacataaacccggttgtcatttagtggagttgaacctaaaggtacaggcgattgagtacgatagcaaagggattttccccctattttaaatgttcaaaaattaacggagcccgattgaacgtcggctcccttcaatgactctcttgatatcgacttcatggtagaattgaaaaatgaataggttcagttccaattctttcacatacattcccctttcgggttgccctaacaaggccacttgatgttgcattgcttgaaaatctatggatcgatttgttaaaaaagcgcccaccaaacaccaacggtcatcaatctcggatagtcaatcatcttcgttatcgtaaatgaatcattcatcctcctccatatttgaaccaacagcataagggagatccctatttctttgatcatttctttgaaaatccataaatatcgagtacctcacaaacacttcaaacgaaaacaaacaaaacttgcaaacacactcacgcactttccaccatgtcaaaggacaagacttttttctacttaatttgatattttatgtacattcaatcaaatatgatactttgatattttaatccacatatatattcaatttagaggattgaggtggacatattaagtggtaaaatattgaaatgctataccattagagagagatgaatgttattctagaaatttacatagatgctatagcgtgtagcattgatgttattcatctttttaataaaaaattaaagctaaaaagttattgttgctaaaaaataggagatatattaaataatattatgtgacatcataattgtagtatttttgaagagtgttataccattagagtatttttagaagtaagagtgtcaaaaaataatgtggaagagagataaaataaatattatatttttgcatgatgtgaagatttttagcatccttaaaggatactaccatcggagatgctctaaagggcaccatgtacacacccatagtatttagcactcttagagtatctccaatgatagcattctttaagggtgtcaaaaacctccacatcacctaaaaatgtaatattttattttatctctcttctgaattattttttgatactttatgttctaaagtattttaatggtaaacacctctaaaaattattaaaataatattatattactatttaatatatattaaataattaaattttcttattttatgacaaaataataattgaaaaagtaagaaagtaaagatatataggtggcatccttttccattccaatggtaagcatccattgaaaaatgccaaaaatatattcatgtcaccagtcattcttaactatccctattagagatgctcttatgagatgttttactattagtataatttaatatcaaattctacttatttttaatttaatgatgctaaagtattttagcattcttttctataaaataactttcaaattatttcaatttatactgtttaagagcatcttcaatggagatgtaaataagtgatgcaaatgtaaaatatagctcactttgttaaaagtctacttcaatagtgtgctaaattatgatgcaaaaatctcacataatcaaaagtgatccaaatttgtatcacaatataacatgatgtaaaatttgcattacaataagagcatctctaatggagagctataaatatggtgtattgccatattttaaaatattttgttaaaagttaactataatggtgatgtaaaatgtgtgtcaaatttggcccaagccaaaaattgtgtcaaattgggcacaaaagataacatgtgccaaattttagccgataataatgtcacttcttttaattacctatttgtcactcattaatattattcattaataaaaaaaaaaatacatttataagttattaaaataa

SEQ ID NO: 27153 - DNA, 1979 bp, Cannabis sativa
aaataaaaacttacagcaattttctctattttgagaccatcttccatccacattttccaagcctcaaactttgctggtgttaactttctctgttgattagacactccctgttgatcggatactggatagacttttctggtaatagcagtttgtaagtttgcttctccatccaaggaaaggctaagacgttgtgatagctgctgaataacttgaagaaaacgatctccgtgtttcgttaccaagtgctgcaacattagctcagttaagatttcattcagtatcaagttaagtttcaagtcaagaccttgaagaactcatgacctctcaatgacaaatggtaaaaatgtgcttgatgcaatagaaaaattattctaatttgtggattgctttgtcatttctcccaccctgaagagatacctggttgacaccgtcgatgtttgctaagcgtgctctcgtagatggtcgagtcaatgcaattcttttcattgtctggtcgccacatatggcatatctacaaaggattataaagaacagatcaatttcccaaaaccagctctaggaaatatgtcaaaacaaaaattttaacgaccaatgacttggacagtattattgtgaaagagaagggtaaaacccttacggagctgttccaagctccttcgcaagtttcattctttcttctaagagcatgtggtaaaattttgcctcagtctgtaaaaaataatgtgccaaagtgaatagctgaagtgaagcaggagtggcaggtaaaggaaaaaataaattaacaaaagtactaatagtacaccaacctcagaaaatccttcactctccaaagtagccaaacttttaatttctccattgccagcaacgcttttattttcctcatcatccatcatttcactggtcactgacagaaccaggggtggttggtaatcaggtgtggcagaactaagaaactgttccccttttggactcactctgatgaatgatgaataaactaaatttaataactgaaagcatacgccacatgcagctttgaatgaaatttagatggaaaactgtgcaccttatagttttgaacacatcagttacagtttccgtcaaataatctgtatgaattacaatctcaagttataaacaggtcaattacaaaaaccaattttatcagtataaaccaaagataatttggataacatccatcccagcattcagggcaagtgtcaacgcaatatgatgtaagcagtttcaaaaaatttacaaatgctttgctaattatttgatagttatcaagctactgcagtattcaagcaatctattagataaaaaaaaaaagctctgagtattttataatggtggtcaacccaaatcaactacagtattagaagtgtaatctctataccgttagaaattaactgatgagctagagctttccaccaatttgcagaataatccttgccaaggccatgaagtggaagcctgtcgaactgagcatccaaaatcttttttgcctgcaccaacagtacaaggacaaatcaaagaaaaagaggggatgggggaaactcataatacatcaattgtacacctttatttattaaggaacagtacagtatgaacctaggtatgtatatcattacactatttcaagctagttaaaaaatataaaaaataaaaaaagctagtagaaaattgaattgcaaaacttctcatggataaatctaattttaggcgaaaataattttcaaagttagcctaccccataacttctgttgctcaaggattttccatatgccagattagcgactaaattattgactagttttctttaaaggtggcaagttctgcattggttaaattgcaagcaaacaattttttatagtgcgaatgattcaaataagaggggaggaaataacagggcaaccttcaaagctataaaataaaagtgtctagacatgttagtttctaagcactaaagattcccccaa

SEQ ID NO: 27154 - DNA, 13780 bp, Cannabis sativa
ttttttttttttgtgaataaatttataattacattattataatataatgaatcctcattagtccaagcaaatattacactcataaatagaaaagcagtgtttcagttcccaatatcaaaaaggaggaagtttcagtaattttttttttttgggaaatatcaaagcacatagtttcagtgaatatattacattttttttttcaaattcactattaattggcacgataattttcagcttcgattccaattcttcagtgcttaggtcctattaaaaaatattagcatcgaaataccctatttttaaaatcctcatcacctaggtacttactcaggacattccgtcaatcattttgtggccataaaacatttctggcaacaatcaagacctaggggactgaaggataaaaaatatctttcaaggatccaagtgttaaaagtgaaagaattaaggttatggttgacaagactccaaattagcaggaatagtgtcctaacataagggaggaatgaggaagctatgccaatgctaaaggatgggagaaagaagataacgacaaatttattaaaaataattcactcagtccaattccaattattgtttgctgagattttcggaaactaataaaaacagaacttaaaaaaaatataaaataataaataataaacgggtaatttttacgtggttcaggcgttaataatccctaatccacgagttcgttatattagctttgcgggcgagtatttgaatattacaagtatttacaatataaacctccctattcctgtcgcttctcttggagaagaagaaagttaatagaaatttttaccggaggttcagtaagtaagaaactgttcaccctttgtatatggaaagtacgggtatttataagcacacatgtgagtaagggcataccttttacccacctagggtttcgtactcaacacgccacaatcactgcaacttgatgatctgaccgttggttggtaggaagccttttcatcgtgtggtgtacagctgttgtaaggcatttcatggggaatggggacacgtgtcgctcaaaggtttcgcattgaaaagttgttgtctagacaagccgttggacaaaaagggagctttagaggcatgtatgtgcacaaccatagtctgacacaaggggcaagatttgatttggtgtcagaagatatgcaaccgcgccttgagctccagatgggatacgaccaaataggttccaggaccatcaggtgacatccttcccggattgcactaacctgctaccctcctagaatgcttgtagcttcgggggactctgatccttctcagtagcagatgaatagtgggagtctcgaaatccttcacgcccttgacatggagaaccttcgactaactcctgaaatataacttctttcgtgatgctaataagcaaaagatacatactaattgcaaatagtccgaggtggcaccttatatgattgtcacgtaacaagcatccgggaatacgaataacagttacccctaagtttccgggacttacgagtgatgggagcttgcagcttccctccagatgcttgatttattatcctaacatgccagccaagtgttgaaatgcgaaagaagtcttcggtattactttgggtaactgaagggttgatacatcctgtaatattgttgtcgtcttgctgaaacgtggtgtctgtttggtggagtcgtggggcttacactctaggctctagcgcgtttctcgtgggaagtgaatgacgattggacttgaaaagagaacagatgtatggcatgttggtgatgctgttatgaaatgatgagtaatgaatgtcttattctctttcctcaggcgcattaaatgcaaactcttcaagtccccaaccgttggatggagcaacttttgattagtacaatttggatcattcatttcaaaatactctgaaccgttgccacccatataaatgtaggattgggggaatggattcactttttcttcctcaccttaaacaacgatccttagtctagagaacttcttcaaacaaaaacttcgactcaggaaaacctttgcccttacacactcgtctgaaccaaatatctcatctccttttctcaaccttactgtcgtatttccgaacgttcgacactcacccggacggcgagttctttgttggagtagggcatgaccagatcatcgagcgacatgtaggattttgaacgacaactagcaaccagcaattttccattcaatccgtctacaagtgttttttccacataaactgttatttcttgtttcgattgtgaaatgtagtcacgagcttgtttttagatttgaaaataagagttgctatatgtgaaataggtctgcatgaactttgggacttatgtggcaccggaagatataagtctgcatgagccttttagctaggaatcaacaatcataattttccactccaccaccaaatgataatgccaacgaaaggcagctagtccttgtgactaccaacactttaacacaaatccaatcgaaccggcaacacaaccaaaccaaaccaccaacacaaaacccaagtaaccaagcaatttcagcttcaacctcttcagccaaccctgccaaacaagttcagggacttcaattttcccaaaatcctacctttgccatttacatttcctttgaagcctacccacattggggccgacgtcctggaccaagtgtggaaagcaaatgtctatctaaagcgtcggctcgcggaggagcgcaccgttatccaatctaggaccgatcgattgtccgcggtcaagagggctgagatcattgagggtattcgcaacccagggcactccgcacccattacagaccttcctgctatgagcaaacagcttgtgccctgccttggcagggagttagcgccattcagtgttgatgtgattgaggacattgcgattagcgtgattgaactgaccattgaaaaatgggctataggcagtagcactgaccccgtactcctagccaattcttcgaggcaacaggctgttggggtatcttatatctctgtcgtgacttctctcttttacatgctgtaaagtattattctttttcctgactcttctccctttattttagatgacgtttcttgcggaacggacctgcaaggaggtgaactcaatggcagtccaactagacctttccttaaccacccggcgatacgtggaagcccaagttgagactatcaagaaggaaactgagcagtattgcactaaagccgatgccaaagctgacaagaagtacttgcaaaagtacaacgactataaggcagccttcacgacccaaatcgaagaaaaactcaagactcagcgtgatgagctggaggctaccaactctgctcttgctcaggaacttgacaaaaccaagaaggccaaggtagatgataagccacctgtcacttatgtctatgcgagaaagaggggtaagaactttactgtaggtgctggcatagagaattagctgactgtgcaagtttgttaagtgagggatgtttaggtgtgactgagtctcaccattgttactgtggggtgaggtatataaataatatgggttgagtttgtaatgtttttcaggcaggaaatactgatttgtaaggagagcccaggctctcgaatacctggggacttcaattatcaatatcaatttcttttcatcttctttctttttcttctacttttgtttgtggctattgaatcgataggtgttcacctatcagtagacctcgagaatcaggcatcagccaggcgcctagaactccaggataaaagcaatcccatcaaaaggttggaggccaaggtcaacacggctgaggcaatgcaagaacttgttgaagatcaagtcaccgctttgaaggctggcgtcgaggagaaggataagcttattgagaaaaagactcaaactataacgaagttacatgacacaaaatccatgttccaacaaggtcaaacccaagctctaaaaaaagtcaccgccttgcgtaatgataatggatacctacggcgattcaaacttaggaaataattgtcaaaacccccttggtctatcagtgacatccgagataggatgggggtacgaattacgcggaagggcattttatctcttcgagaagtacttcctccagaagcatttgcatccaagtatgttgccaaaaatcttgcttgaatttcctcctcaataaggggatttggatgatgactggcacatgttgcaacaagaagctcctcgtctttggcggccttatttatcagaacaaacaattccaaagcaatttgttccttgagatcgcttggggtctgaggttgactgccactgacgtcgtggatgctttggaaatttgctataaaaccatactagcacaacaactcagtggtcacaaaatcctccactttcagttcctcctctgaaaaagcttcataggaggttatccgttccctcaattcatccgttaacatagttctaggaacagattatgaaagcggactacctttttaaaactatcaagaaaaagttacaaaagcataagttttgtacctataattttgaagtctagtgagagagctaggactcacttcatggaaaaacctgttgtaaagtaccagtactcatgatggtctgggcagtgtgagtaggtgcttgttgggcatcgagtgcacttgtacttttaaaggcggtaaaatccaatttttgaagggtgccccagcatgagctgcgacttcagttcataaaagtacaatatctctttcggggttggagcagcctggcgtcgggattaacaaattacaaaccacccagagagcagtttgtatgaaactggaaggagttggaagggagcaattctggctttgacacataattgggcaaagtatgttctgagcggaaggtgagcctcgcacgagatgtgagcccaactccaagcttagaaaccttccacactttgggatggcaattccataagaacagacattcagttccacataagtcccaaaatgttttgaacaccaccattagtgaatacgcctccagcaggccataattcctcagcaaatttggcatctgatctatttcccaaatagaactattgagtacaagaggagacggagatgtggcatgggctttgcctttgcccttgtctttccgtcaccgtttgacttggatattttcggaaggcccctcttctaaagctgggtcttcgggatctaagtgcacaaagggtgcgtccactgaagacgctccaacctcttcaaggttcacgattgccaaatggaaatcatcgtcttcaccagacactgtaaaagtgaaaagaaaacccaaacagttaataccccatatccaaatgaaaaatagggtatcgtgaaaggcctcctccaaaactgtttggagaggtcctcgccggactcatcacctaaaaggtcaccctcacgaagctactggttatggtgacgaatcgggaacccaaaagcacaacagtagcaaagaagcccagacatttcctttcgcaaacaaaaaaatatatatagagaagcaaaggggattatcccagaaaccagtttaaacccagaaatgttcaaccacacctgaaccaaaattttccaaataacaaacattcccctcgacctaaactgaagggaaaatacttcaacagagccttagctctagaggtattaccccaaagttcatgcagacctatttcacatatagcgaccctaattttcaaatctaaatcttacgcatggaaaacaataaatttctacaagcttgagagtacatttcacaatcaaaattggaaataacagtttgagtggaaaaaatacttgtagacggattgaagggaaaatcgttggttgctagttgtcattcgaaatcctacaggtcgcttgatgatctggtcacgccctgctctagtagagaactcgccgtctgggtgagtatcgaacgttgggaaatacgacagtaaggtcgagaaaaggagatgagatgtttggttcagacgagtgtgtaagggcgaaggtttttctgggtcgaaggtttttctaggtcgaaggttttgcctgaagaaattatctggcctaaggatcattgcttaaggtgagaaagaaaaagtgaatccattcccccaatcctccatttatatgggtggcaacggtccagagtattttgaaatgagcaatccaaattgtattgatcaaaagttgctccatccaacggctagggacccaaagagtttgcatttaatgtgccagaggaaagagaataagacattcattactcatcatttcatggcagcatcactaacatgccataaatctgttgtcttttcaagtatagtcgtcattaacttcccacgagaaacgcgcttgagcctagagcgtaagccccacggctccaccaaatagacaacatgtttcaacaagacaacagcaatatcacaggatatatcaacccttcagttacccgaagtaatatggaagacttcttctgcatttcaacagatggctggcatgtcatgatagtaaatcaagcatccggaaggaagctgcaagctcccataactcgtaagtcctgggagcttgggggtaaatgttatttgtattttcggatgcctgtagcaatcacggaaaggcaccacctcagactatatgcaattagtatgtattttccgcttattagcatcacgaaagaagttatatttcaggagttagtcgaaggttctccatattagcaaggatgggaaggattttagggctcccactattcattcgctactgagaaggatcaaagtctcccgaagctacgagcattccaagagaatagcaagtcagtgcaatccaggaaggatgtgacctaatggtcctggaacctattaggctgtatcccatttggagctcaagatgacggttacatatcttctgacaccaaaccggatcttgtcccctacgtcagaccatggtagtgcgcgtacgtgcctttgaagccccctttttgtccaacagcttgtctagacaacaacttttcaaagtgaaacctttgagcgacacgtgtcctaatttccacgaaatgccttacagcagttgtacaccacacgatgggaaagcttcccaccaaccaacggtcaaatcatcatgttatagtatcaacccttgtgttgtgttgagtacgaaaccctaagtgggtaaagggtatgtctttacccacatgcgtgcctataaataccctcacttttcatgtacaaagggtgaacaatttcttacttaccgaacctctgctaaaacttcctattaactatcttcttctccaagagaaacgattggaatacagaactaggatttatattgtaaacacttgtattattcaaacactcgcccgcaaggctaatacaacagactcatggactagggattattaacgcctgaatcacgtaaaaattacccgtctattatttattattttatatctttcttaagctctgttttattgattttcaaaaatctcggtaaacatctataatgcaagaaaccatcaaagtaatattggcattccatgctatataacaagtaaagaaaagactaccattgccaaaacgctatcagcacaaaaaaagttaaatgttcctcatctaatgcactgagtttactttttcttttcattttatgaatttttggccttgggaattcgattgggagacctcccagtgaaccaaaggtttttaaatctgtggggattcgaaccttggaacaaatgcctaccactactttccaccactccccatttaccactagaccaccccttcgtgttttatgcatcgagtttactaagacttacgcccattacagtttcaactttcacttcaaatgttgtaggctatagaaatactaacacaaattatgacaacaatcaaagaaaaaggggcattcccaaatgactacaaaaactacataagtataatttgttctcttattctcgtaaaatctattttaaagaactaaattataccaagaactaactgcattttaacaaaccaaacagtaaattacacattgaccaaaaatttaccagaactttttgtggacacaacatctgcagaagtagtatatttctcagaagagcctgtagatgaagttaagctttctggaggatttgggagaaccactgaatcaacaggaacaaggtaacctagatcaggaggctgatcctttccaatagtggggttagcctgtgaccaaaaaaaggtcatattttgtgatatatttgatgtttgttaaattctgaagaaacattttaattacctccaagtccacatatgtgggatctctccccaatgatttaagaaatgtgtcaaggcctgagacattaagagctggaagtggaaacagaaagatatagaagagaagggattattcacatcaacttgaaagaagattataaatatgaagatatcaattacataaattaagttgaaagcaatatagaaactgagacaaaatgtacaaaagtttcaacaggtttctggtaattatgtataataaatgcaggtattttctcacttacaaatcgatgtgtcatttgagagtggatggaagaagcagcgttcctgtcttttaaacccttgatccaacaataaagagacaagtcttcaccagaaaataaataaataataaggacatcaaccattattaactcaaaaagagacaaaaataaaacaactaatggacagtgtaatatatcgcaggtagaaatacagcaatgtaccccaggtgtggctattgaatattaaattgatccaattctttatatggtaggtcgaatcaatgatcaagtgcaataaaatctagtgccgtgataaaatccagtaggaatcaagaatcatttctgatcatatgccaagagtggaaaataaattttcaccaaataaagagatatataatggtgcacaatgttaaaagatttagaacaatattaatgcagcgccattcatgcataagtattacaagaaatagaaaaccatttaatagtacagctaagaaagtaacagtaacacagcaatatgcatataaatgcgaaaagagtaactaagtggcacttaattaagttaaaaaagaatgataccgtgctgattcattcaccaatgcgaatggtgtaacacaacctaaaggtacctggcaaagaaaaggccaaccaacaataagtctggtgtatatgttacacttgagatgaattttactttttccacacacatgagatttgctctaatctttttattatcaagactgatcaatctaaattgaggagcattcataatagccaatagtaataaaataagatcgatacaaaatgaggataatgctagagtttgaaaatgatagtttcaggtaacaatgaactctcaaggcatgacaccaacctggagtatttcacctaatgcttcttcaggagccattctcaaacctccttttcccaaaccaagccttgcggatagaactgttcagtttcaatgccactgattactcaagtaaaccttaaacatcacaggaaagagtaaaattcatcttcaacacgtgtttttgacatcttaaactattccagcaaaaacatacctttcaaatccaccttagtatcagacaaagcagaaacaatgtataacctattcttcttatcctacatataagcaacaaaagcattaggaaatcgaaatgggcaaatagaaagacaaaagaaaacaccaaaattttcttatacaatgaagaaagaaaatactgctttcaaagatttgaactttgaagtaacttaccttcagaaataaattcttgctcagtgcaccctctaaattccccacatatttcgcctgattaagaaacacagattcttgaatcagaaaagaaaacacataattacatataagtattaggtatcccttatatgtaaacacaacacacatattgaatctctaaagcttcatttacctgagcttcaaccgtcaaaacaacaggatgttcatacttcgaataatcaattttaagttcctaagtaattcaatgatgacagattagtttccagcaaattaagaaaacaaaacgaagaccaaagatagacaaatatatacatttatattattagggaaaaactaactcaaacaaatgcaatgcattaacgttaatatactattaacaatcaaaaaactgaacagaaaaacaagctttaaataacaaactaaaacatgggttaattgaatcatgagaaattggatgaagacccaaaataaagagataagaagaattagcgaacctgtaaacgggcaagcaactgttccttggtgaaacccatagtcagagcaacaaagcaaaagtaagaaagagtgttgggatttggaggaggcacacaatctgcagatggaactactgttaaattctcttctccgctctccccgacacccaagcgactcttcctctttactaggtacttgtgttcttgcctacttcactacttggtttggtttgtacaccatttcaatattgattgggccatccttacaaacaaaatataatgattgggccaggcctatcgaaaccagtcgtagtagtatgtagaaaatatgggaaatttatatagattaccaacttttctcaatttattatatttatactgtaacacgctgattgttaatttttattatttttttttattccgcagtatactgttattgattcaaagtttatatattatttgtggcttacacgtatcttcacggggttttaccacgttttaaaaagctgtgatttgatgtcttttgtcaccttttttgacagttttttattttttttttaccttttttttatttttatattattttcaaatacaaaaggttgtttaataattactttaatcccactccccaacctccactgtttatcttcttcttcttttagtttcttaggcagttacctaagtcgtgggtggtttttttcatttcaaaaattttcagttaatataccatcttctcaagcttccctcttatttttcctccccattttcctagttattttctataaatacttctcatcctacatctaaatggttgttacacgttcatccccaccatccggtacagctaaaaatccctcaaaataaccccagaaaacgaaactcaaaccaacaatgggtaagaaaaatctaaaagataatccacctagccctacttctcctattgctcctaaaagaaaacaacttgctggaacttgcaagaacactcgagggaaacgtcctctaactgttgtggagttttcagactccgattttgagttggaaactaagtttgtgaagtctcctaaatctgtgaaggtattttcgtattgatctagtgttgtttttgggttttttgcatttttagtttattgttcatttatctgtatattagttggggttttcattttgcatgttaatttttttatttcttatattatataattttctgtttatttcttgttgtttttttggttttgtttcgtttaattttagggaaagggtaaattccctgtgaagattttgccatcaacaggtgttgttgaggaaattattgacaatagggttgtagaggtgtgtaatttaattcattttgttctatttttattttaccttgttttttgtttttatttaatttatttcatgttgttgtatgtttgttttagtagtgtttttgttattatttttttttttttgattgggaatccaggtacacccgatctcaatactatcattctagagtagtaacatctggttattactctgtaattgaagatatcaaaaaaattctaactaaaacccaactagaacttttttgaaaaactgtgtttggatattttctccgaattccagagtatattatccattaccgacttcttcatggtttgatgttgagggaggttcaacaacctaatgaattagagttttaggtttgtgtgcaaggaaaatatcttaggtttagcattgaggagttttcgttagttattgggttagattgtcaaattgattatgatttttatcagtttaagcaagatggtaatacattagttaaacagtgcttaaagggttacaaaaaaattaccaagggtgctattcaaattgccttcattgctgacaatcttaagggtaatgacgatcttgcagtcaagttggctgtgttatattttgttcagtgttatttgttgggtggtctctgggtaaagctgtttcgatagaggaaatagatgttgttgatagtggtcggttcaatgaatttgggtggggtaagcacttttttgatatgactattcaatctttgaaaggtaagattgattctggtcttaggaaggttgttcgcagtgatgaggatggtgggtactataggttattgggttttcctttggcgatacaattctggtttttcaagtgttatccttacgttattgggaaactttctttgtactcaaatgttggcattccaaggcttctgaattggcctaaactaccaaaggataaggatggtcagatgaagatggatgtcatgaacagcctcgtgttcaatcggtcattgaaagaggtacatgttttgttttttacaatgtttctattgttgttttacagttgttttggtacatatttgttatatttcatgttttcaattttttttgttattttatttttcagatttatgtggataatttttttggttgttgttgttgcagttaaaattacgaaacatctctccaacatccgttgagagagtgagtttgaagcttgatgacttcttttccggtgacactactccgaatgttgttaaattcaaagttaaaggtgtatccaagtctgttggtgaacctgacttgatgggtgcttcttcatcatctgctcatgagaatgtctcccgacttgagtatgaggaattaaaaaaaaatatctctgttgttgtcagccagcaagggattcttatgaaatcttttggtgaaatgaacaagaagttggacattcttattgaggtgtttttttttattttccttaattgattttttttttattttttttactatttttttcatatttttctaattcacttttgaattttttctgttgatattttttcagtcctcccatgctggtcatactcacactagaactcagtctgatgatgctcttcgcacttctgaaaatgatgatgatgatgatcttgatcttgatgaagttggagttggtgttgggcaggatgaggctgctattagaaatgatcgtaatgatgagggtgttgttgttgccgaagttgtttcaaaggatgatgatactggcaaagtggattcttcttctaaagatgccaacattgctgatgccaacattgttgttgggcaggtatattttttttgttctacttttttgtgttgttgttgtcttgttgttttaatattttcttactgttgtttttattgtcagtctgaacaacatcaagttgatgatgagaaaattgatgttgatgcaactattgcatctgctgttaatgttgtggagaaattggtttgttttatatttttctcttttttagtgtgtttctatattattttattgttgttttactagtgtttttaatgttctttttttgtaaatataataaatcattttcttaaattttccagatagtttcctcaaatattgtttctggttctgctgagatttctgagaagaatgtgttggattatgttttaccaggatctagatttactgcca

SEQ ID NO: 27155 - DNA, 1923 bp, Cannabis sativa
ttgattttcttccattgttataaaatctctaacaggctgtctaaggatcacaacgtgaaacacaagcattgtagatattgaacattattattagtaataattcactatttttccctattttctttgtgttttagtactttagaagttacctcaatactataagctttgataattattcattccaatagatttttttttctttgaaaccctctctttttggtttgttcctaggcctaactataggggtagtcaaacaaatttgtaaatatattgattaatttatgataagatgtaaatattgtgttaaatttgataaatacaaaataagtaaatgttatatttgctacaatatttattattgtattctaatacataataacattttatattgtaaattatgaaaaaaaaaaatcaaatgacattaataatcatcaataaattaaatatttaaaaagtaacttattgtaaataaaaaatatataaatttgagtttcagcttgggttcgatggtgagggttgcaatttgagtttcagcttgggtttgtactctcaaagttatataatctcactaaagtaaaggaaagaagaaaactcaccggtgaagagaaagacagagcaaggtagagcaaagcagtgggttgtgatttgagtttcaattaagattgtgatatgggtttatatggggatagagagatggagaagcactgtaatggtggtctccaatggtagtcttagatggaagtctccaatggtggtcttcaatggtagttctccaatgtggaagtctccgatggtagtctccaatgatagttctctgatgataatctttaatggtggtctccaatggcagagcaatggtcagattatggtatcaaatggaagcttagagaagaataaaagaaaaaaatgaatcttaccgtaaaaaaagaataattttaaagtaaaaataaataaaagaaagtaatgatacaaaagaaatatgaaaacataaaagtaaaaaaaaagtcattaaataatgttctctttaaataattctattttttttaattatttgtttgcttagattaataaaattatgtcatatgtacatagataaaattactagcgaagtaaaagtacttagaattatcctgcaatttacgcttaagtttatcattgatgataaatagaaacactgtaattaaaataattgtatttattgtatgttaaatttatcataataatatattttatgctaaatttgacactttgatgtaaattttagtatgcgttaaatttaatataagatttagtacaatattagaaagttaattttcttaaaagtattagaatatagcattacactagcactccattaaagatgttgctgggtggagtggtagtttatgaaagatgtgatgttaaatttgggttatacttatagggaggaatgtgtggcaaaaattatggcatgtgtgaggactgagattttcttttctcattaatggggaatatttactcccacgagtttccaataaaaaataattttaaacttatttgacataaattattgttgttgaccctgttaaatcattaattgagcatcaaacaacataatcaacattaacaataacaattatgttcaataatcactactaaacattatcttatttaaagcattaaatgtaatataaaataaaaattttactttgtaataatcataatgattactaaatttctctttgtgatcatttcattccttcaatctatatatcaaaagaaaagaaaacaaaatgtgcaaaagatttctatagacactactcttttcactctcaacacacatatagccacactcattctataataatcaccaataaagactacattccttttataagtaattataggtcaattgagtctacatgcctattgtgagagaattag

SEQ ID NO: 27156 - DNA, 1389 bp, Cannabis sativa
ttctaaatctcaatcctcgatcgtttactttttagtttgcaaatctcatcccaaagagactagacgtgggccatcataactaactatatattattaggatcttaactttcaaaaaagttttatatccttaaatacttaacacatgactaattatatattacctaagccatttttattacttttaaaggtcaaaatattatcagtacttatttaagaaagatgagttatcactaaaaagaaaaactgaactctaatatttaattaattacgatctaactaccctagctaagctataactaaattcatttaatactacgtactcttatatcatgcatacgtagcttttttcatgcacactactccatatacgtacaagttatatatatatatatatatatatatgagtacgtagtgttatcgatatataatacaacatatagataataagtggtatgagtatgcatagagaatcaatggccactccaataattttgggtgttattctaaatctaatccttctcctcccaaaatctctagctcacatttatagtgataatgatctgttggaattttctttaaatcttgagtatgtgggagctgaattcttcttgcacggatcattgggttatggtttggacagagttgctccacaattgacaaagggtggcccacctcccattggtgctacaaaggtcaattttgatattttgataacagatttcaccatgcaaatggggttacaaggagttgaacatatcaagtatactcttgtgtttaacttcttcttattattattagcggaattttcatttttatgattttttattttcaattattattattattatgatattgttaattttcctgatattagatatatgtgcagggctattaaaaattttgtggaagggtttcaaaggccattgttggatttaagttcatcagtatttgcaggatttataaacagtgcattggggagagagttaagacctgcctttgatccatacaataacacccttaactttcttatagcctcatatgcaattgctcatattggacccactgcttacgttggatataatcaaaacctcacaggaattatttccaagagggtatatcactaaaatcactattattattgcttatttaatactattttatatccctatttttattttttttttactaaatagcacatatatataaatctatttttttaaaaaaaaaaaattacagcaaattaattgaatttttctaatataatttagctataatttaaattgaaagattatatatttgaggttttaataaaaatcttttatctactttttgttgggataaaattaggtcaaagttatcaaagcctaagaataaatataatttttgtgt

SEQ ID NO: 27157 - DNA, 1524 bp, Cannabis sativa
aactaagcggtctttacataaagattttaaatgctgactctaagaagaatcttcctctatctcaagaaaagaaaaaagtaaatttatccaagttgtaaggactcatcattggtatatacattttttttctttgttgaagtatgttcatttttttttgaatttatcttcatatagttttataagtttatttgtagtttctgaaatttgtttttctaggtcatatctctgttcaattttttagttagttgtaccaaatagctcctttttgtgtttaaatattatatatatatttttttattttaagaaactgatttcatagttcatattttttactagcagataaatgtaactggtttatattaatctgattccaacgtctaactccaatgacgactctggcatcaaacttcggtgacggtgacaactctgacaaattgtctggtgttttttcggtgacaatgtcaatttcgatgactttttcgatgttgacagcaactctgacaacttttctgtaccgacaataactctaaaaacttttcaggcaccaatagcaaactccagtaaatttttcggcaccaatggcaactccagtgatccagtgagtttttcagcaccgatagcaaaaaatgtgatgagaattttaatattttttatggtaatataaatgatatatcctatatatgttaatatttttattttaaatatcatattttgttctattaaatttatatttatgtaaattaggtttcttattatcatatttatgtaaatatttctaaaaagaaagcttcaatttgatttgctgacatcaccattttttgtgaaaaacaaaaatcagatttaatgttgataaaaatagcaatctcatattttctcatattagcatgttacctaattaaagttacctattttcttagtattaattttaaatgtaccaatctgtgatgctagtacaacaaatgatccatattcatacatatatatctaattttatttatagtaataatgctaagtaatgataaatttagtagtaacagatttaattatttaataactcaattttattgtcacgcttatcgatgaatgaatgaatataaaaaaaaaattgcataccaaatactaaatatggttatgttagaaaaacaaaaattatgaataggatttactatatatgtcatgaatgaatctacatatataaagaacaaagtatgacgagaatatatcatttttacttttttatttaatattgaaagaaacaatgggatttagagagataattgtgattatgctaatttttgctatctctctttcatcaaataagtgtgagggactctctgaagacaaattagtaagaattaaaagtcatttgttgaaaagcgaaataggagataaggaaatctcagttgtggcgacatgtgcatcaagtgataatacaattgtaacgccataataataaggcatgctacagtattttttcaattacagtgttgtctttgctatcaaagaattttctcgaaaaatgtg

SEQ ID NO: 27158 - DNA, 1684 bp, Cannabis sativa
gatttaacaaaacaaatagtttgttaaataacttttacaaaaacacatgttccaaaaaaaatatttactcattttgtaaacaaagtcaaacaaaaagtaattgaattatacaattaatcaactttcaattcccacttgaatctttcatggacttccacgatcattaatttatgtatttggactaactacataacaattttaataataaatcaggtaacacaatataatacagctgatatccaaaatatgaaaactatgtaagaagatatatataaatattataatgagcgcagctcctaaataataatatattaataacgatattgatacataatgtgccaagttaaagattataataacatttcttgcctctccccatgttcacagttgacactaagtacatatcaattctctcatataagaaagattttctttttttattttggagagagcttagcaaacccactcagtcaagtacacactgttgctctgttccattcgagagagagcaagaaacagatcaagaagaagaaataaatttattattactattgttattgttatggcttctgtaattctgctagctaataagtactaattaacattgtcttttggctataaaagcacatctgattagctattctatttctaatttgtagctatggaccaaccaaaacttgccctttatcttcttttacttcatttctctctacaattgcagatacctacttctttagctattcaaaaggtgagtaaatagttttcattttcactaaatctctcttcttttcattaccattgaatataaatgaaatataaatattaaagtcaaagtttataaatatatacatattgaataatgttctgattgatatttcgttatctgaatatatatatttatatattcatataacaactcctttattgtgttgtttcagtcttatgtggtttacttgggagctcattctcatggcccaaattactcaccacttgactcggagcgtgtgactcagtctcactatgagtttcttgaatcgtttttaggaaggtaaaaaaaagaagagtacatgtaccaatatactttatacatttttctttctttcctcatataataacatatctcttcttaaaaccttatccaaactatcttatatcttgtctcttttctaattttttgatcttattaatgctagccatgaagttgctagaaattccttattttactcttacacaaagcacatcaatggctttgctgcaaccttggatgaagaagttgctgccaagatagctggtatgggttttattattttatttagattataattaaagatataatatcctctgttttgagatgttttctgattgattcccagaaaaaaaaaaaaggtttgattgattatgtgaaatttgtaacgcaggtcatccgaatgtgatatcggtattcttgaatcaaggaagaaaactacacacaactcgttcatgggatttcttgggattggaacgaaacgatgtcgttccttatagttcaatttggaagaaagccaaatatggagaaaatactattatcggaaaccttgatactggttagtgtttattattattattatatgattaattaaattaattattatttttttttatttaaattttgtgacgttttatttcaaatataatatgttcctcc

SEQ ID NO: 27159 - DNA, 3102 bp, Cannabis sativa
cctaaataactttactttcataaaattatcagtgttaaagaaacattttgcttgaatttttttttttattatttactttagtcaaactatgacatggttctttaaccactaggtccattttagatcatggcccacattgtaaacctataaataggaggctaaatgactaattatttcacatgcaattcattatacaagaactcttctattatatgtgctctctttgaggcttttgaaactcactagaaccttgttcttgtgatctagtcttagtccaatcataaataacatcttgagtagattgttacaatacaatggagtcgaacctctcgaattctagtggttatcatttattttaatttctttattttagttctgtcgtagttattgacttagtttcattgaataaatttacagttaacaattgcctaatggctactgcacttaatttgagatatttcctcttaattgggtattcgttgtgtgcaatttagtttgaccaccaccattagcacaagtgcaaaataccaccactaagtgacgctttataaatgattagtaatttttcataataattagtaaatcaaattgtatgcacttaacttttttttttttttgaataaattagagaattgtattgcttgaacttccaacatttacagtctacaacacctaattaaggcctgaaaagaaaactattaataacaatctataattgttttaccaaatcaaaaaaaaaaaataataatatctataattgttttataataaaaaatccttcacatttataaacctctataccaataagtgtcttgttggctcacttttgatggccaatgttgagcaattctattatttaacactctcctttacatatcttcaatcttgctagtttctgtagccaaagcacatcattatttcgaacaactcatactcgcggtacaccaaggttgcaatggtagctaaaaaacactgctttcgaaacattcttatctttgctcgtttaatccatctcaataatcgcataagtaaatgtgtttgcattttccagtatagacattgttttacgtgttgaaggcccaaaagactaaaaggcaacaagaaaacaagtgtttccaacgactcttcacgaacttcacaaaataaacaattagaggaatcaagaatctgtattttcatcaagcgctctctagtcttcaatctattttgaaccgccaaccatagtatgaaactatgttttgtgtgttcaatacaacccacacctccttacaccagtgtgccttatttacagattcaccacaaagcaagttgtaccctttttttaatttgatacttatcgtggaggaaagactgaagagaaaccaaccttttaaaagattctttgacttcaactactttcctccaataccaactactttggtttgacacataggaccactaattagcttccttaatgtaaacaatgtgaattcattttactcacaaattacctttttagaagcaatgatccaaatgtatttactaattgtagcgacattccaaacaaaattatttttgaaaccaagaccacctgtggatttagatcaacaaagcttctcccaagctatacttcctggccaaagtgaagttgcattacctattcatagaaaggctcgacatatagttgtaatctcattgagaattttttttggaataatcatttatctgaagttgcattacctatccatagaaaggctcgacatatagttgtaatctcattgagaattttttttggaataatcatttatctgattccaataagagtgaaagtagagtagaacagaattgatcaatgcgactctcctgataaaagataagttccttaaactctaactccaaatccgagctattattttttcagtgagaaattgacactcctttgttaagattcttttggagaaaatgggaatgccaaaataccaaaatagtagtgagattttatgaaatttgaaagtataaaaaactcattgaacctcatgatcttgcataccacaacaatataagatagattttgcttcatttggatgaagccaagaagttttcaaaacagtttaagtcttgcgacatataatagatagaattaaactatccatgaaaaatagtaaaacatcatcaaaaaacttaagtggtttaacttcaacccctcacatctttcatggaacttaaagtttttttgtccaattttttcgcatgattcttgtgagatactccatacccagtacaaataatatcggagacatagagccaccttgcctcaagcctctattagattcaaaaatccatgcatttttctattaaacatcaaagagaacttaggagttcgaaaacattacataatgagattaatgaacttacttggaaagttgaaggctccaagcatctcttcattaaaatctcacccaatgtcatatgctttccttaggtccaacttaatcatgcaatttttcttgctcaatttcctctcataatgcttcactaaatcttaaaaaatcataatgttatgagttatgaatcttcccttaacaaaccctccttatttttgtgctaccagatcgagcaagatctcccccaatcaagaacaaatcaatgtagtagctaccttatataacacattataacatgctataaggcggtagtcacttactgtatgaggacatttacatacatttcaggactagagtcaaatcacaacttcactcacttctttacccacaatgtctcaactgtctcaaaaaactatacccatcaaggccatgagcttattcccaagtatggaaaagaaggcttttttaacatcatcttcagtgtaaggagtcaataatctatcagcttgttttagagaaattctcttcctttaggccacaatttttgttgactaacttgaattctatcttccatcttatttcttaggagatgttgataatactcaagaaaagttattgctacacggtctgcttatgttagaatgtgggaataagatgaatgaggttccatctcaaaaccaattggcaatgggaggagtagcccattcatcttatgtattataatttatttccacacatt
